United States Patent Application Publication US 2005/0208558 A1 - sequence listing, part 18

SEQ ID NO: 17470 - DNA, 17258 bp, DROSOPHILA
cttcgctgtgcaagtgacgcgaacaaaattaatgtcctttttgtagcgaaactacaaaaccatgtatttgattatatgctttaaaccctatttttataacactttaatttgtaagaactgtagcgatgaacctacaaccccgcatccctccagtagccgcctctttttcaccatttgaagttttgtctgttttcggtatgaggtacaatttcattttgtaatttacgtgcatttttgtgatctaatttgtgtaactattataaacgaaaaaaaaaagaaatacaaaatactttaagaaaacgaagcaaaaaaaaaaaaaaataaaacaaatcaaagcaaatgaaaaaaagaattgattgattttatggcaacagaatattttaccctgaaaatataatacagtatttttagtaaaaaaaaaaaaccaaagcatcctggcttgtcattgatcaatgggaaatcggtatggggaactgatggctgggtatcgggaatgggaatctcggcaggcggtgaccagattttcatagactcacattcgtttaacaacataattttctcctaggaaacagttagtttgccttgacacatactccgagtaactcccgaaaacaaaatacaaaaaacatcagcagaaccgccgaattaagaaacccgctaatccttcccaggattctttcagtgcgtttcgtcgagttgtggtcgaggattcaaattcaaaggttatattgaaaattattattttctattttgttttccttgctcgaccaccaacccaatcgcatctaatcgcaaggagcattcagtccagtgcaaaagagacaaaaactgaccagatctggtccggattatccccgttttgctaaggtgagtgagtgccatgtggcggcatttcctactctgggttgtccgtatgcagcgattattacatcatatcctagcaggcgtgtcgtttgctgtcggttgtaatgcatacaaatgcctatctgagctgccgtctccccgattagtcactttttttgtacgtttgtaagctgccgccagttttcagagtggcgccacggggatacgtggaatagcgtggtaagtgggcgccacatgctccaccatcgaccccactaaccgactcctcaccaccagttgtgctctacgtatatttttatatcatcattgcggaaccacaaagctctcgactactttctaactgaggaactgaatcaaaggtgagttcaattcagcatattctgtatatttgcgctatgactctttcccgcataaattgatttaaataatatgtagttatcaccgacaattattactttatttgctaatacaatttccttaatttgtacgaatgcgtatgtcgtaggacatagcaggactaaaactgtgttttaagcttcgatatatttacatggtccctacaagctgaacttaagctatccttaatccaagtgccataaataagaggggggggggactgtttggtgctataactccgtggtctccagttttcgggccaggatctgagcattgttggtcattttgtcgatttggttgtatagattaaagtgccgattaagatcattgctgttgttgaatagtttggcagttcccttgagcgtttcgtgcatatcctgtgtggccacggccagaaagttatcatccaaagagtcatggccaccaatactatggagaaataagtgttatatatttaagtaagggacgatttagtgatttcctctattatcgcacctgccactttcttctgatttgaaccactcgttgtcgtaaccctttagccaaataggatttgatccttggacactgtgcttgttggtatttggcactcgagtggccggctcctgagcgtcttgcagggacatcgaggagtgaccacctaaatggaatttgtgtattaaatatattaatttatcttttatcctaatcgttacttacggaatatattgactttagcggctctcagctgcctgcggtatccattccgttgagaggcgcaaagtgctatagtgactaccagtagagtggccagaaagaggttggtgaaaatcagccacacgaataaaggacctcggctgggtcccgcggtcaggagctgagcctctgccgcctgcgtgtccagcacgttgagctctttaaatagcccattcaggctttcgatgtgcgagtcaatcagtttgagcacctcggatacctcgtagattgagttatcctcccgctcgactagatgcatgtacagatccgtctttgtcttgtccaccgaaccatccttgttctcatgaaccttaatctcatcaatgtttacaatcgattctgttatgttgctcagggtgctaaggtatggaaataacattagaaggggggttatactttaaaatcaactcaatatttactctctgaaggagtccactcgagatcgcagttcgtccggctgaagtctaaacacgaatcgcaccttttggtcctctcttaacaagtagataaacacatgggccacatccttcattcctgaggtgtcgttggccaaaacgacgaaatcgaaatagcccttcattcccttttgtgggtcaaagtttagctgcacttctccggtttcctgatcgagaaggaagggagctttgcgtacgttctccaatccctcggaaagagtctgtcggatttcacccacttggtagtatccaatccttccattatctccttcatctgcatccgtagcctccactcgcatgaattttaaaccgaaatcagcattggtcgttataccaccagtaaagattttagaacggaatctcggtggattatcgttgatgtccagcacgcgcacctttacttttattacagtgctatctagttctggatgggttgttgccaatcctccggttggatcctcctgactactgtcataggcttcatacgataacagctctgcatcttctggtccgtattcattactctctgtcgatctcaattgtcgagagtgtttgaaacgatcatatccaaactgttggttatgcacaatgcctcccaatctattgttaatctcgattcccatacgacgacgtttttcgccaccagatatagaatcatttctacaattctcagtggcacgaacatagagcgtaaaattggcaatcacctcgcgatccagttcacggtcaacagtcaatatatgggtttcgggatcgagacgaaagtatcccgcttcgtttccattcactataaagtagcacacctggctgggcgtatcattcggatcgtccagttccaactgatccttatctatggtgtccggtagctttattctttcggatcctggatccgagtgctccgtgaagtttacggatatttcgttaaccataaactgaggctcataatcgttaacattccgaacataaatcgttagatccaagtctgaactcagtgaggttggcaatccctgatcataggcttctatacgtatctgtaatgaaaattatatcatatagtatattcttttgtgtgtttatactttaaaatttgtaggtataaggagatttggcatttacctcgtgaatcttctgcttttcgcggttaagttgttccttcagaaagagctcccctgtgctgccgtctacttcaaacattttgtagctgcccaatggatcgggtttgagtctgtatctcaccaaagcattctgccccatatccccatcactggcatatgcctgtagtatcagcgttcccacagtcgcattctccggaatgcgaacagtggtgttatgaagtggcctcacaaaaaccggagcgtgatcattgaaatccgatacgcaaatatccaaggtgttgtgcacaatattggctggaaggcccatatctcgcgtagttatagtaaggctatagtttccgtatctattgcgcaaacttttgctagcgaagatttgggcattccaagcgtctatctggcgcagctcaaacatacctttaagtgcaaatatatttagtgattgaaagacttattctccttcaaatccttaccatctttgttaccccgagtgatggcaaaatcgagtctaccatttggcgtagtggggtcatctgcatccttgcccactatgcttgccactcgttcatgcaactcgtgatactcagtgattaaaacacaactcatgggcaagtcaacctctggtggattatcgttctcatcgagtatggaaatgctgaaagagctaaatgaaataaatttgtcaaatgcttaaatttttataacttacaaaacctgtttgaaggcattgcgactttctccggccaggaatccgaattgatagttatcccaggcctcgataaccaggttgtaggaatccttagactccctgtccaaacgatcggccaccgttagcaccccagtgtctgcatctatggtaaactttccctgcgaactgatgcgatccatcaggaaggtgatcttgccaaaatctcccgaatccgcatctccagcctggagagtggcaactctggtgcctggagctgcattttcactaatcgtatagttcttgctgccacccacaaagtagggattgttatcattctcatccagcactgttatatacacatccaccagtgaggatcttgctggaattccagaatccgtggccctcacactgaaatttagccactgatgctgctcatggtcaatcttgctggccaccacaatttcccctgtttgcggatccagatgcattagtgatcggtacgtgggatttccttccagggcataggttatggtgcgattcttgtccacatctgaggccagcacattcacaatcattgccccgtttatgctgttctccgtaattgattgacggtaaaagggaagtcgaaactttgggttattatcattttcatccagcacttgaatgctcaggaaaccctcagcgatttgtctgcccttggccgcagccagatcctccacagtaatggctagcttaatatgctcgactctttcgcgatccaacagcttaaccaccttgagggttccctcgatggagtccacctcgaaggcgcccaagaagtcgtattcgctactcttcaccagcgccccctcttcagttcgaccttcgcagtgttctgggttcagtttgtaccgcagaatggccttgtggtccaggtcagttgcctgaatgcgatacaccagtgtgcccacaggcgtgttctctaagatctgcaatgctggcatttcctttagcacaggcggcttattattcacatcctgaatgctaatgttcaccgtacatgtggtcatcaactgggaattgcccaatccaccatccaaagcaatctgtggtaaacaattacgaaagggttttaatattctacaaaaaggaatctcttttgaacgtaccactgacagagtatagagtgatctcttgctctctgtgagatctggatctagattggctccgtgtgccaccgatataactcccgtttccgagttgatgataaacttatcaccggcacccgtctgtatgcgatacaccaccacattgttgggtgctgatccatctcgatctatggccgttacctgcagcaccgagctcccacctggcagatcctcgggaaccgtctttgcatagaagctttgctgaaatatcggcgcattgtcgttaacatcctgcacgtaaataagaacaggaaccacagtggagagcattggaatgcccgagtctcgtgctcgaaccagcagatcgatctctcgaatgctaaaggatccacccgtgtaaggatcacttctgcgactgctcccatctaccagttcctcgaaatcaaaactgtgcaccggacgcagaaggccactctggggatctatagtgaagttggagcggtacagaccctcgacaatctcgtaggtcacctggctgttctccgtgccattgagatccgcatctctggcctccaattgcagaggggtttcgaactcagcctgattctccagcaacttggtctcgtattgccgctgaggaaatgtgggtgcgttatcgttcacatccaggatgtctacgattatttgggccgtattcctgttgccctgaccagcgttgtcgatggcttccacggtgagatagtgtcgtgaaatgatttcacgatcgaaggcagttccacctgcctgtttgatggttatcactcccgtaatggggttgagattgagtcttaaaggggaaaggtatgttagacccgtatcatagttttaattttaaaacttacaaatgagcgattcctcctctgaggttggtgtaacgtatacccatagttccataatccccagaatccacatcaaccgcctggacatgggtgatgattgtatcctgctcgctgttttccaaaacgctcgcattataaatggtttgactaaactctgggaagttgtcgttttggtctcgtataaaaatctgaacatgagcagaactatataagagaagatatattttagacattactctatatgcattttccacactataagcttacctccatcgactgggctcgtcgacctccctggcgaatatcgtaaaattgacctcggtgaattgttcaaaatcgagagactttgagttcttcacccgcagcataaagttggcctcattaacagccaactcgggtacgatctcgaacagatcgttgggcggatccagaaacaagcggaaggtgccattgttgccctcatcgtggtcgaagaccacgttttgcacctcctcgtcgatgaaattaagcggggtattggtttgggcattctcgttgacctcacaacgatagactgtttctccaaatgtgggtatttcgtcatttacatcgcttacaatgaccgtaacttcggtgcgtacagttgtgggcgccatttgggtattcgacttggacaactcggtggccgaaatacgcaggatatgagctccattcacctgatcactctgctcctcgcgatccagtttggttagcgtgtgaactatgcctgtgtgcggattaatgtcgaacagatcgttggcctccagggaataggctatgggattattgatcccacgatctccatctatagctcgaactcgcagaacttttgtgcccactggagcatcttcggcaattcgggccactgcctgtacttctacgaactccggcggctgatcctccagatcctttaccttcaccaatatggcagcagttcccgtattgatcggtccctgattggcacgatcgatggccaggactctcagttgatacagactctttctctcatagtccagctccttttgcaacctcaatatgcccttgccttggtgcgtagctatggagaacacatcattgtcgccatccaattcttgcagatagtaaaccacctggccgtaggccccttcatccgcatccgtggcctccagagtgctgaccactcccggtgcactgccctccggtatttcaatggcattttgatagggcagaaatgtgggaacattatcgtttatatcctcaaccaggagcaaaaaactctgggttacatagttgtgatcgctgtagtgactgtcagtcagcgttagcactatggcatactcgtcctgcagctcccgatccagttccttggccaaaaagatcttggcctcgttgccacccgtgttctcaatccgaatgatctcgctatcatgcgaattgcgcttgccaaaggtcagcggatcgttgtccggatcgtaaccctttagcgtgtatatcagggttccttacgaggaaaaaaaagtgcaaaaattcaatcaaaaattatttactatctatcttttgcagattatttataggaaataaatgtaaagccattcagcaaaagatgattatacggataagcaaaccatttttaaacacgacacattgtcatttttgatatctggtcgaatttatattacgattttattttgcacaacttcaagattaagtatatttagcttaaaattgttgagacatgacacactaccattctttgtatagataataagtttgctatctgatatttcacatttctgcttagcttttgaaataattttctttttttgtaatatattaactctagactggacttacccactttcgtttcaggactctccttcagacgcagtacaatctccgactggccgtcgatagcgaaacgcggcggtcgatttgaggcaaccaagctgattagtgtggtgagtattatgacttggatggatatggagcttatataactagagaaacttcgccgcctttgtccttttaagcgcaccttcttgtagtccatgctgtcgattccattaccattcgccggcggctgtgattcgttgtgcatcgtgtgtggcgtttgggaacgacacctttggggttactggttataataataacagtcactaccacatgacaggtagaatcgagcggcgacacctagaaaatagacgaagtgttacgacagaagccaagtggagtgttaacccattttccccacatgtcgcacgttttatgggccgtgatctatgacccgctggcagtttcgctcgagaagctaacttaaagtggagggaagaatccaccagagaagttctgtgctcgtttgcccaaaaaaaaaaaaaaaaacagaaacaagaagtgaattgggtcgtgcattaagaaatccgaatggaactggactcgcagtctgcgtgtctacaggtgttctatatgttgtccgtcttttctgcgtgagaattggccagtggattggctgaggcagatctttgcgaaagttttatgctcaaattaattaagcgtcagctctttattggctttatacttcagttgagtttacttaaatgctggctcagcgccagcctggaattccgctaaagaaattttatgggtttcttcacagctgcctttgggttttgattgttattttgttcgcggtttaacgaccggaacgttttctaaactgcccggcaattattacaattttggcttattcatgtgccagatttgtctcattgcaaatttcaaacaaattgcgaataagttctcgctcaagtggagtgaaaattgaaagttgtcttcgaaagatgaagctatcacgagcttaaagaaaaccgcatttgcgaatatttttaatgatgttgctacacttttggaaaaacttccatcgccaacggcttatcttttcacagaggggggtgcgtgtgaaaaatgcatttgtagagcgatgactgcatctgtcaaatgcagatgcatatatgcattattaatgccattgttcgcgagttcaactcggttaggctcatttgcaatcggagctgcggatccgcaagatttgccaactgtggttcattgatttcgcaattgccgcacggcaatttcttaatgggctgccatcgtaaatgtctccgtggatggtaattgatttacctgccactgcaggttgcatcaacctctttatcgccgggaaaaatcgcggcaagcagccagcaaggtcgctagagagtcgccttaactgatcacggttaagtgattcaaaagtaatcacaatctgcgcctgatttcgctttcaacacgcgccgcatgcaacattttcaatggtgcgactgccactaacacaacttgtatctgtatctgccgcatcttctgcttttgggcggctaattctctccatcgccgtccgcggataattatccatgcatccgtggccagcatgtttgtgtaacgttggcaattgggttgtttggtcagttggacgatgcagggattttggatgctctgctgcccaggcaatttcatgctgcactggctcagtcgaatcggggttatcatagctgtcgattatttacgatgggtaaatgaagagaacacttcgctcggtacataaaattgtatgcttttgttctgcgtacagatattgttattcatgtgttttttacaacacccatacgcctttgcattttcggcgatcttatagctttctaattagttcaatttatataaatgaaatgaaatcaaaatacggttaagaaatagaggaaatgcgaggggtggaagttccgccacacttttcattagcctaatatctgggctatcacttcccttcaaatagcccattcaaaatcgcatttagtttagttaactccattagtggcaaacacactcccactttcttgctgccaattttccacacagctaaaacccactgaattaaggcaaattaataagttacgccgcctcggcaagatcggcagggctctgctctgccatttcccctccagatttacgtaagtggaaagtggcaaaagtggctgaggctgctgaggagtcgccgaaagtcaagcaaaacacttggcccagccaccatgacgacggcgcctttccgcagttcagatatgtagctctgcgacctgcaagatacacatgtgatgtatctcaatccgaaaccgagcgaatttcggtgctaatgactctggtggcagcagggttcatgcttggacaagttctgaccccatccgagtgggccaaaaagtgaaatcctttgcgaaaatgtgtccaacgtacgcgctgtaaccaacgtcggttggcgtcgccaatcttgcggctttttgggttaaccgcaaacaaacctggtggcagctccaaggtaatcgccaccgaaatggaaatcccaataaacaattttgatttgtctgccgctgtgacgagtttcccgatctctttcaccgcccccctttttccagcaacagtataatcgccggttcatgactttccaagccagccaggggcttacttaattatattaaatattttaagcccgcctgagagcaacagtcacatatgtacactcgaaaaaataagtgctctgctttgggtcaatatatgtatgtttagctaatatcaaaactaatctcagaaatctaagaaaccttatagatcagggaactatccaaaaatcatagaaattcatgagaaaaacataaaatgttaataatacgattaatgagaagtcgttgatatcaacccttctaaaatatatcaatatttttttccgagtgcagccatggagatcgagattggcgggaatcgtgttgtgaccaatgttgcctccagtttccggcccgcgagcaaacaatcggtcccctggcgttcaggcgttccgagtactccaatttgaacacttcctcccccgtattagggcccttttgtcatgcccatcgattccgatatgtgcggcactccgacagtcaagttcaacgccagcagccaacgattgtttgctggtggctggctggcaaacaaaaggagctcgagctggattgggcggtggggcaggagagtttggggagctgactccgttgcggtggcatggtttttgactcatagcccgggttcaagcgacgcccgcatccgtctcactattcgagccaagctctccgagacttggcttagatgttatactattgtactatgcattcatagctggtgtcgtgagcaatttgtccgttacactccggctccttttctggcttaagtttttgcacttttctatttgcatctgctttgcaagtatttctacattttggggtaattacacaatttttattggactggctggtcttggaagagcagccaagtccttgacacgagctatggccttagtggcagtattacaagaagagcagaagtcagccaacccttcgaagttgaacttcaggctccaatgcacttgaggagcttgtaaagtgcgaatttactactcgagagttatggcaaacatttaacaatattttaatgagccaatagatatttctaggatcattaatatttaattccatttaatgctattaatagtttgattataggagaagatcttcttggtacaaatatttttacataccgtggtaaaagggtatataaactctggtactatctttgagctctttttctttccgtaaagtgttttgtttatgttttttcacccccaacgactgcttgcaaggaaacctcctaacttcccactttatcgaaggaaagtcgcatgccaggacaggaatgcagaccggtttcgcttacttacccccgtataaaagatagatattcctatagtccgagtatcctttggcggttttctggttggggtccttttccctatacaatttttgaagccagcgaacagtgacacactcgagtgtctttcagcaagtgtctttcaccagagaactgacaaatttcgtggctgacacatattttcgaaaaggcttcgacgtcactggtaattaggcataagtcaaagaaccccgcaaaacacacatatggagtacacgatgaagccgcataaaataaacgtgtcgcacgcttcgaaattgggcaatgcacgaaccggaactcgactttaaagagcggtgtttgtggtaaggggcctcgaaacctggatggtggtcagatcacttgatgacactttaagccgacaacggaacgtgccgtagaacacgcagagtttcgagttcttggccaagcgaataaattacgttggaggctattttgcactttcgtaagccgaaaaccgaaaaccgttgagtgtttatttcacggaaagccaattttgaacgaagtgtttaccgcaacagccgctcgacgactgacgttgagtttggaaaacaagctaacgagactttgcagctcaactggaatcgagttatcgccggaatggcatggcaaccctgttgcgggagagacagatatagccgggtcgtaactaaagagagagaaacgcaccagaggcacgcgagtaattagccaaccgtaaattccaccggcaagtgggcggtgggtgagctctgtttgtttacaatttgcgagctcgtttactggatcgcaagtgggtgctcactggaaggctggaatggtggtcagcggaaaccggaagtgcgtgcgcttatgcaattttgaaggttgagctttccatcgcaaaaaccaattttagtttgcttagcatcagttgataatctttgaaaccttgaacttttttggatcggttttctcttaacctaataatttcagtactgtcattctaatttgtcattaatttaatccagtgatttgccatatcatattgacagatacgtaacgtcattatttttcctagaataatatgtccgtgagtcgagtgactatgatgcgaaagggccactccggggaggtagcacgcaagcccaacactgtggtggtgtcggttccaccgctggtgaagaagtccagcaagagccgctcgttccacttccgctatctggagctgtgccgggccaagaatctgacgccggtgccggaaatccgcagcaagtcgaatgcgaccaccacctttctggagctgtgcggcgataagctggcggtcagcgattggcagctcctaaccgaggcgctccactatgatctcgtgctccagcagctggtggtgcgcctgcgacgcacatatccacaaagtaggtgatctttggtagtctgctactctgtatggaatgtgaattataccatttcgtttattcatttttttcggcagccaacattgatcccattgacaccgagaaacgagcccgactttttcgccagcggccagtgatctatactcgcttcatattcaacagtttggtccaggcgattgccaactgtgtttcgagcaacaaaaatctaagtgtgttgaagctggagggattgccattgcaggatggatatatcgagaccattgccaaggtgcgttgaaaagttttgcggtcgggatcacgtttccaagtacacacatatatccaatccattcacaggcactggcagacaacgaatgcctcgaatcagtgagttttcgcaaatccaacattggcgataagggctgcgaggtggtgtgcaacacagccaaatacctgaatcgcatcgaagtgttcgacctctctgaatgcggacttacttccaagggagccgagcacgtggccgacatgctcaaggtaatctcttaatccctgtagatctttttctttctttctagaaatatatcctggcgttttcagtagtatatgatgaaattccattgcatatttttattacccttcttaatggtcttcctataactgcgtttatgttttttatgtaatcagatgcaaaagatcacccgtttcacggagggatgggagaagtccctccgctaccgtagcgtcgatgtgaacacgattggcggtctgcgcacggttttgttggctgacaacccggagattggcgacgtgggcatccggtggataaccgaggtgttgaaagaggatgcttggataaaaagtacgtagagtccgaatagtgcgatccatacagttcaaataccccacagaaatcgacatggagggctgcggcctgacggatatcggggcaaatctaattctcgattgcctggagctgaacacggccattacggagttcaatgtgcgaaacaacgaaggaatcagtaagttcctgcagcgaagtatccatgatcgtcttggctgtttaccagaggagaaacaggagccagagtatgatctcagttgcgtcaacgggctacagagcctgcccaagaacaagaaggtcaccgtctctcaactgctgtcccacaccaaagcattggaggagcagctctccttcgagcgaacgttgcgcaagaaggccgagaagctgaatgagaagcttagccaccagctcatgagacccgactccaatcacatggttcaagagaaggccatggagggaggatcacaaacgaacatttcgagggaatatgtggcgcggaatgatgttatgccagaagtcatcaaaaagtgggctagctctcaattctcaattcaatgcctatctgatttgagtatttcttcacagttcccaaagctaccgccagtcgcacttcaaccggctggtcaacagtgcggccaccagtcccgaagtcacaccccgcagcgagattgtcacattgcgcaaggagcagcagctgcaacgtcaacaacccccaccaatggaggtcaagcatctttccttggagcagcaaatccgaaatctgcgcgacgtgcagaaaaaggtggacttggacgtggaggaagaggaggaggaggaggaggaggaacagcaggcggaggaaagtcaatccgagtcggagccgcagaacgaggagcaacagcattacgaacagcaaatgcaggtccaacgcaaacatctccaggtgcgcaaggttcgcagtgagattaagtatgtggaaaacaatcccaaggaggcagccaaaaagaatcgcgagtccaagtcggaccatgagtttgccaacgagagagatgtgagtagtatccacaatataaattaaccagtactagcaatttattctcctgtacgataacccatcttatccccacagttcaagcttaatccctctgttcaattcgagacggacattggcgacaatgtgatggtcaatcctggccaccgatacgagggcggcgggggcgatacggcctatgtctacaactatgagcatgagcagcagcagcagccagtcaagcggggctacgagcacggctatgtggtgggcgtgggtgacggatcccacaggaggcagaggcaatctcaactggtcgaggctttggtgcaaaaacgtgtcccaggcgccagcgatggacatgtggcgcagttcgttagcaatctggaacgacaagcgaatgctggtaaaacggggaaaaagcgccttaaacctcggcctgaggacgatcttcaggtaccagtcggcgacatgcacatggagtcgtcgtatatgtcccgctccgaagaactctcctcaacggacgttacgctggagaactcagactacgagacggaggcgacggactccacgttacttagtagctcgaaatactcctccatgcatgtctttgtgcggcgcaagcaatcggagtccatgtcactcacagaagaggccggcgacggagatgccggcggtggtggaggctctggcgatttcggcgaccaaaatgtcatatccccggccaatgtctacatgtccctgcagctccagaagcagcgggagcagagcgcctaggggtcgtgactttaggttcctccattcaaaatccccgcagccattcgcagccggagcagcgacaccacagctggctgatacgccgagcagtaacaacaacaacaccactaccaccaccatcacacccacaacaaagcagccaactcgattcgataggatccccactgggagagctaaatttgcagtcatactcccgggcagtagcagtagaaaagggaacctgctcctttttgcacgtcctgccatctgcgaattcaagctgcaccaaaaatgtacaaaaatatactttggtcttactaatttccattaaagatttattatttgtgtgctccctaagcgagtttgttggaccttattttcggatgattaaccgccccaagtcaaaatgcacatatgcatgatattgagttctctatgtgatatcttttgatttatttagtccgtatattgtgaaattataaaatatttgcgttcggttaagtttgcgttgaatactactgattaagattcaattggatcaagtattttgaatgtagttaagttaactccatggttatttattatgtggaggttagagggcgtgcttaaccgccaaatccgtaaagggtgcgtccctggcgcttgagggcatagaccacgtccatggcggtcacggtcttgcgcttggcgtgctcggtgtaggtgacagcgtcacggataacgttctcaaggaatacctgtgaattttccgagaaattaatcagtttttcaccactttcccttcgtttcgccagaacgtacctttagcacaccgcgagtttcctcgtaaatcaagccagagatacgcttaacaccgccgcgacgagccaaacggcgaatagcaggcttggtgataccctggatgttatcacgaagcaccttacgatgacgcttggcgcccccctttcccaatcctttgcctccctttccacgaccagtcatttctcagttgcttcgtaaagttggctgaaaagaagagaagacgcaataaactgtaaagcgacgccatgtttggtgaaaggtaaacgttcatttgacaggtgaaaactgttgttaataagtctgttttcatacaaaataatggtctccaattattttttttatgtttatgcacaaaaaaactttgttgaccgattcttctattatt

SEQ ID NO: 17471 - DNA, 2883 bp, DROSOPHILA
ccccgattagtcactttttttgtacgtttgtaagctgccgccagttttcagagtggcgccacggggatacgtggaatagcgtgttgtgctctacgtatatttttatatcatcattgcggaaccacaaagctctcgactactttctaactgaggaactgaatcaaaggactctccttcagacgcagtacaatctccgactggccgtcgatagcgaaacgcggcggtcgatttgaggcaaccaagctgattagtgtgaataatatgtccgtgagtcgagtgactatgatgcgaaagggccactccggggaggtagcacgcaagcccaacactgtggtggtgtcggttccaccgctggtgaagaagtccagcaagagccgctcgttccacttccgctatctggagctgtgccgggccaagaatctgacgccggtgccggaaatccgcagcaagtcgaatgcgaccaccacctttctggagctgtgcggcgataagctggcggtcagcgattggcagctcctaaccgaggcgctccactatgatctcgtgctccagcagctggtggtgcgcctgcgacgcacatatccacaaaccaacattgatcccattgacaccgagaaacgagcccgactttttcgccagcggccagtgatctatactcgcttcatattcaacagtttggtccaggcgattgccaactgtgtttcgagcaacaaaaatctaagtgtgttgaagctggagggattgccattgcaggatggatatatcgagaccattgccaaggcactggcagacaacgaatgcctcgaatcagtgagttttcgcaaatccaacattggcgataagggctgcgaggtggtgtgcaacacagccaaatacctgaatcgcatcgaagtgttcgacctctctgaatgcggacttacttccaagggagccgagcacgtggccgacatgctcaagatgcaaaagatcacccgtttcacggagggatgggagaagtccctccgctaccgtagcgtcgatgtgaacacgattggcggtctgcgcacggttttgttggctgacaacccggagattggcgacgtgggcatccggtggataaccgaggtgttgaaagaggatgcttggataaaaaaaatcgacatggagggctgcggcctgacggatatcggggcaaatctaattctcgattgcctggagctgaacacggccattacggagttcaatgtgcgaaacaacgaaggaatcagtaagttcctgcagcgaagtatccatgatcgtcttggctgtttaccagaggagaaacaggagccagagtatgatctcagttgcgtcaacgggctacagagcctgcccaagaacaagaaggtcaccgtctctcaactgctgtcccacaccaaagcattggaggagcagctctccttcgagcgaacgttgcgcaagaaggccgagaagctgaatgagaagcttagccaccagctcatgagacccgactccaatcacatggttcaagagaaggccatggagggaggatcacaaacgaacatttcgagggaatatgtggcgcggaatgatgttatgccagaagtcatcaaaaattcccaaagctaccgccagtcgcacttcaaccggctggtcaacagtgcggccaccagtcccgaagtcacaccccgcagcgagattgtcacattgcgcaaggagcagcagctgcaacgtcaacaacccccaccaatggaggtcaagcatctttccttggagcagcaaatccgaaatctgcgcgacgtgcagaaaaaggtggacttggacgtggaggaagaggaggaggaggaggaggaggaacagcaggcggaggaaagtcaatccgagtcggagccgcagaacgaggagcaacagcattacgaacagcaaatgcaggtccaacgcaaacatctccaggtgcgcaaggttcgcagtgagattaagtatgtggaaaacaatcccaaggaggcagccaaaaagaatcgcgagtccaagtcggaccatgagtttgccaacgagagagatttcaagcttaatccctctgttcaattcgagacggacattggcgacaatgtgatggtcaatcctggccaccgatacgagggcggcgggggcgatacggcctatgtctacaactatgagcatgagcagcagcagcagccagtcaagcggggctacgagcacggctatgtggtgggcgtgggtgacggatcccacaggaggcagaggcaatctcaactggtcgaggctttggtgcaaaaacgtgtcccaggcgccagcgatggacatgtggcgcagttcgttagcaatctggaacgacaagcgaatgctggtaaaacggggaaaaagcgccttaaacctcggcctgaggacgatcttcaggtaccagtcggcgacatgcacatggagtcgtcgtatatgtcccgctccgaagaactctcctcaacggacgttacgctggagaactcagactacgagacggaggcgacggactccacgttacttagtagctcgaaatactcctccatgcatgtctttgtgcggcgcaagcaatcggagtccatgtcactcacagaagaggccggcgacggagatgccggcggtggtggaggctctggcgatttcggcgaccaaaatgtcatatccccggccaatgtctacatgtccctgcagctccagaagcagcgggagcagagcgcctaggggtcgtgactttaggttcctccattcaaaatccccgcagccattcgcagccggagcagcgacaccacagctggctgatacgccgagcagtaacaacaacaacaccactaccaccaccatcacacccacaacaaagcagccaactcgattcgataggatccccac

SEQ ID NO: 17472 - protein, 811 aa, DROSOPHILA
MMRKGHSGEVARKPNTVVVSVPPLVKKSSKSRSFHFRYLELCRAKNLTPVPEIRSKSNATTTFLELCGDKLAVSDWQLLTEALHYDLVLQQLVVRLRRTYPQTNIDPIDTEKRARLFRQRPVIYTRFIFNSLVQAIANCVSSNKNLSVLKLEGLPLQDGYIETIAKALADNECLESVSFRKSNIGDKGCEVVCNTAKYLNRIEVFDLSECGLTSKGAEHVADMLKMQKITRFTEGWEKSLRYRSVDVNTIGGLRTVLLADNPEIGDVGIRWITEVLKEDAWIKKIDMEGCGLTDIGANLILDCLELNTAITEFNVRNNEGISKFLQRSIHDRLGCLPEEKQEPEYDLSCVNGLQSLPKNKKVTVSQLLSHTKALEEQLSFERTLRKKAEKLNEKLSHQLMRPDSNHMVQEKAMEGGSQTNISREYVARNDVMPEVIKNSQSYRQSHFNRLVNSAATSPEVTPRSEIVTLRKEQQLQRQQPPPMEVKHLSLEQQIRNLRDVQKKVDLDVEEEEEEEEEEQQAEESQSESEPQNEEQQHYEQQMQVQRKHLQVRKVRSEIKYVENNPKEAAKKNRESKSDHEFANERDFKLNPSVQFETDIGDNVMVNPGHRYEGGGGDTAYVYNYEHEQQQQPVKRGYEHGYVVGVGDGSHRRQRQSQLVEALVQKRVPGASDGHVAQFVSNLERQANAGKTGKKRLKPRPEDDLQVPVGDMHMESSYMSRSEELSSTDVTLENSDYETEATDSTLLSSSKYSSMHVFVRRKQSESMSLTEEAGDGDAGGGGGSGDFGDQNVISPANVYMSLQLQKQREQSA

SEQ ID NO: 17473 - DNA, 4145 bp, DROSOPHILA
gagcgggaagcgctgccatgggcatcgcctatttgcttaaaatggagctgatgtccaggggtctctccgaggctgatgctgccaaaaatatatatttttacgatcaagacggtgtcttgaccacagctaggaagagcataccggatattctatgcgttttcgccaagaacatgaaggaaactaagtccctggagacgttggtcgaacaagtgaagccctcaattattatgggtgccacctcggcaccaggacttttcactgagaaaataatacgcacaatggcagcgagtcacgaacgtcctggcatctttgccttctccaatcccaccatcaaatctgagtgcactgccgaacaggcgtacaaattctcagatgtaagtgttttagaatacttgccgaatatttacccattttattttctgcaatttgtctagggaaaggctatatattcggcaggatctccttttccgcccgtggagttcaatggcaaaaggctaactcctggtcaagctaacaactgttttgcttttcccgctttggttttggccaccatgactgttttggccactcgaatgccagacgagatattccttttggccgcccacgagctcgctgaatttccaaccaatgaggagatgcaaagcggacgtatctatcctctggtgaagcaggccaatgaagttgcctacaaaataggcgtgaaagtggccaagtatctgatagaaaacggtgagagcctacacttacatatatgcgcatattattatctttctaattggttaattaaggttatgctaagcgcaatttagaaccggaagatgttgaggagtatatcgaaaagaatagctataaactgacctatggaagctcgctggctgagacttgggcgtatccaaaaatgaaaccgcatccaagtacagccggccatgaaaataaacatcaaaagaaaaagtaggcgtttcgaataaaaatttaacatctcaaaattcccaaatgaaaaggtacccataaaaattcggacttgcaaaaaaaattttaaaccatggaatttcgccggctgcatccattgctgcgccttgcatcccgtcctcttctgagttccagcaggcggttcagcgtttatgatgacgaaatggaacaaataacaagacctgactggcatgttgttatgaatggaaagtacaataaggtgggtaaggatccatatgccatggaatgcccaaaactaattgtatatatatatgccttctagggccttgcgttcaccattaaggaacggcaacgtttgggcatcatgggattgatgccctgctccgtgcgctccatggatgaccagatgaatgcggccctggcgaattttgaggcgagacccacagatatcgcccgctttacatacttgagtgctgtccaccatcgacaccggcgactgtactaccggttcatcaaggagaacatcgagaaatcgctacccattgtttatacaccaacggtgggcgatgtggtggccacctatggactgaacttccagcaggccatcagcctgttcatcagcattcacgacaagggccacatccgggatcttatgcacaactgggtggacgagggcgttaaggccatctgtgtgacggatggcggaagggtactgggtctcggggacatgggtgccaatgcgatgggcattagtttgggcaaaatgatcctatatacggctttgggtagcattccgccgagcacactaatgcccgtttgcctcgacgtgggtaccgataatcaggccctgctgcaggatcccctttatgttggggcacgaataccgcgggtcaagggaccggaatacgatgaactggtggatgaatttatggagtcggcggttaaatgcttcggaaacaacaccttcatccacttcgaggactttgccactccaaatgccttgaagttcttggaaaaataccagtacaagtactgttgcttcaacgatgatattcagggaacgggagccactggcctggccgcgttcatcaatgtggaacgcatcactggccgtaaattggaggacaccgtatttctcttcgtaggagctgggagtgcggcattgggtatcgccaatatgctggccatggaactggaggtacgcggcattcctgccgaggaggcaactaaaaatatctacttgatggatgtcaatggtattttgacaccggagtcacctaatccaccggagatgggtaaaatatttataaagtccatggagcccatgaaggatatgatggccgtgctgaagaagcttaagccatccgtacttgttggagcaactggtgtgggtggaattttcaatgaagaagtactgaaaaccatggcgaaaaatcacgaacgtcctgcagtttttcccctctcgaatccaactgccaactcggaatgcaccgccgagcaggcttttacacacactgaggttagattgagtatttgtggggtatgtcctttaattatgtaagaccaatgctttgtatttcatacagggtcgcgtgctcttcggatccggatcgccctttccaccagtggtcatcaatggcaaaagatatcgccccgctcaggccaacaactgtctgacttttccgggcatcgcattggccgccattacggccaaggcccggtatctgccaaacgaagtattttccgttgtgtcgcacgagctggccaggaatacaccgcaggaactacttgacgaaggcactctgtttccgcccatcaaggatgcacataatgtggccttcaatgtgggcgttgccatgactcagtatctaattgataatggtaagatatctttggtaatacaaactgcgtctaaatgagtgcggtccttacttatcttctgattgctaactgtgctctcgcagatctttcaaatgtttacccaaagcccgatgatatctgtgagtttgtcaagagaagtctgtataagttcgattacagaaattccctgccaactacgtgggactatcccgtggaaccgccaacaccgaaacccaaaaccaaacccaaaacgaagccgaaggaataaagcacgaagtaaacttggccgggatacctttatatcgaacacttttgacctaagaaagaaagccttgtgtgtaattagttgcagatgcaagtgtacaaagacctacatacacaaagacatatacaagctggcacgataaatgcccgacattttaacgttattattgtcctgtcaacgggaagccagttgacatgctcgtgcgcctgtgtgtgtgtttgtgtatccagctgatttgcatataaaataggacgaaatgtctgctcaccaaaaatgtcaatcaatttcttagcctcctttgcgctccttttagacattttttctccttttttggtgtggtggatggtgggggtggatggtggggggggggaatgatgtggggcaagagtgagacgagaggacgtgcatgcattaaaaagcaattggtgttaaaagagcagtcaggcggcagtcgcacgttgtctgcctgtctatcagtttggcattggcatgtgccccacccattcctttggctcctcctcgatttaccctacgagcggagagtttttcctcgggaaacttgctccctagccgctttccccatgcaaagaagccccgggaaaaagtggaagcaacagaaatgcgaaatcatttccctcgactgacagctgtcaaaatatttgctctctgtcgatggctgcgtggcttctgccgctgcgtgtgtccttgtcctctgtaaatttcattttaatattcattacttcacacttaacactcggcaaaggaacccatgttgaccacattcgactctttaatcgatggcagcgaaaaacttaaggcctaaaacgagatcttgaggcgtcgaccgatttcgttacggttagcctggcttatggaatttaattggccataaaaatgtatgcggcttgttgaacgtggcaagctgtagccgtaaatcgtaaatttccctcctgccagttttccgcatcgatttacgccccacgatagggctctaaatttaaatgccagcggcaaaggttaagggttttccttcgttttttttttcctcgctgctctgggataaagattatatgatgcgtcagcatataaa

SEQ ID NO: 17474 - DNA, 2015 bp, DROSOPHILA
ggtacccataaaaattcggacttgcaaaaaaaattttaaaccatggaatttcgccggctgcatccattgctgcgccttgcatcccgtcctcttctgagttccagcaggcggttcagcgtttatgatgacgaaatggaacaaataacaagacctgactggcatgttgttatgaatggaaagtacaataagggccttgcgttcaccattaaggaacggcaacgtttgggcatcatgggattgatgccctgctccgtgcgctccatggatgaccagatgaatgcggccctggcgaattttgaggcgagacccacagatatcgcccgctttacatacttgagtgctgtccaccatcgacaccggcgactgtactaccggttcatcaaggagaacatcgagaaatcgctacccattgtttatacaccaacggtgggcgatgtggtggccacctatggactgaacttccagcaggccatcagcctgttcatcagcattcacgacaagggccacatccgggatcttatgcacaactgggtggacgagggcgttaaggccatctgtgtgacggatggcggaagggtactgggtctcggggacatgggtgccaatgcgatgggcattagtttgggcaaaatgatcctatatacggctttgggtagcattccgccgagcacactaatgcccgtttgcctcgacgtgggtaccgataatcaggccctgctgcaggatcccctttatgttggggcacgaataccgcgggtcaagggaccggaatacgatgaactggtggatgaatttatggagtcggcggttaaatgcttcggaaacaacaccttcatccacttcgaggactttgccactccaaatgccttgaagttcttggaaaaataccagtacaagtactgttgcttcaacgatgatattcagggaacgggagccactggcctggccgcgttcatcaatgtggaacgcatcactggccgtaaattggaggacaccgtatttctcttcgtaggagctgggagtgcggcattgggtatcgccaatatgctggccatggaactggaggtacgcggcattcctgccgaggaggcaactaaaaatatctacttgatggatgtcaatggtattttgacaccggagtcacctaatccaccggagatgggtaaaatatttataaagtccatggagcccatgaaggatatgatggccgtgctgaagaagcttaagccatccgtacttgttggagcaactggtgtgggtggaattttcaatgaagaagtactgaaaaccatggcgaaaaatcacgaacgtcctgcagtttttcccctctcgaatccaactgccaactcggaatgcaccgccgagcaggcttttacacacactgagggtcgcgtgctcttcggatccggatcgccctttccaccagtggtcatcaatggcaaaagatatcgccccgctcaggccaacaactgtctgacttttccgggcatcgcattggccgccattacggccaaggcccggtatctgccaaacgaagtattttccgttgtgtcgcacgagctggccaggaatacaccgcaggaactacttgacgaaggcactctgtttccgcccatcaaggatgcacataatgtggccttcaatgtgggcgttgccatgactcagtatctaattgataatggtaagatatctttggtaatacaaactgcgtctaaatgagtgcggtccttacttatcttctgattgctaactgtgctctcgcagatctttcaaatgtttacccaaagcccgatgatatctgtgagtttgtcaagagaagtctgtataagttcgattacagaaattccctgccaactacgtgggactatcccgtggaaccgccaacaccgaaacccaaaaccaaacccaaaacgaagccgaaggaataaagcacgaagtaaacttggccgggatacctttatatcgaacacttttgacctaagaaagaaagccttgtgtgtaattagttgcagatg

SEQ ID NO: 17475 - protein, 558 aa, DROSOPHILA
MEFRRLHPLLRLASRPLLSSSRRFSVYDDEMEQITRPDWHVVMNGKYNKGLAFTIKERQRLGIMGLMPCSVRSMDDQMNAALANFEARPTDIARFTYLSAVHHRHRRLYYRFIKENIEKSLPIVYTPTVGDVVATYGLNFQQAISLFISIHDKGHIRDLMHNWVDEGVKAICVTDGGRVLGLGDMGANAMGISLGKMILYTALGSIPPSTLMPVCLDVGTDNQALLQDPLYVGARIPRVKGPEYDELVDEFMESAVKCFGNNTFIHFEDFATPNALKFLEKYQYKYCCFNDDIQGTGATGLAAFINVERITGRKLEDTVFLFVGAGSAALGIANMLAMELEVRGIPAEEATKNIYLMDVNGILTPESPNPPEMGKIFIKSMEPMKDMMAVLKKLKPSVLVGATGVGGIFNEEVLKTMAKNHERPAVFPLSNPTANSECTAEQAFTHTEGRVLFGSGSPFPPVVINGKRYRPAQANNCLTFPGIALAAITAKARYLPNEVFSVVSHELARNTPQELLDEGTLFPPIKDAHNVAFNVGVAMTQYLIDNGKISLVIQTASK

SEQ ID NO: 17476 - DNA, 2746 bp, DROSOPHILA
gtttgtgcaggtttcggcggttcctgcaaaaacaaaagaaaaatgaatgataagtatgaatcaaatataaagtatatgcatagattctaatgatttaagtaaaatagataacgattgattacaaatcattgattatacatccttatccttagttaaaacaacttcaaaaattgcaaattatgatatattaggtttttaagagctttatctggaatttaagttaattaaaaatctctctagaactttaaatatagcatcaaatctaaggcaaatgtgtatgttatgatcaaaagtaaagttgctatgaaatagcgcgaaacccaattaaaattagttaacgtaaatgtcatcctaagaactaaataataataattcaaaagaatgtttttccaatcagtaaatccgtgtttaccgctctgcagtcgctgctgcgctgagcccgctgccggcgtcgcagtcggcgtcgctgcaacgtcatcctgggcgagcggcgccttttgcttctgctcctcctgctgctgatgatgcagttcctccactcggctgccggtgacgtcgccgcgaaagcgcagctgacgcttgccgcccgcggaattgagtgtggcgttcattaagtacggtgtgcggagtccataaaattaacaataacaacgagctacaaaatttcggggtgaaacagcagttatatgaaaatgtactaacgcgtgccgaaaatacccaaacgtaaacagtgtgtgtatcgaatgtacagaactatcgcctaaagtaacagcttagtttatattatattaacatggttaatatttgcaatgatttttattctaagcttaaagaataagttcccgttagggccatgagagaaattgatatataagtatacaacgaattttaaaataatatatttttgctacccagtaaactttttatgcactagctcaccgattcatatttcaaagtgctatcgaagtatcagtcaatagagtgccgtcactaaataaaagcagagaaaatatttcaatagtttgtagctgaaaaatatgttcgcatctgtggaattaagctcatatcgcgatcagcacttcaaggtgagtacatccgaaggcgccacagcagatctccgactcaataaaccaattgcagggctcgcgctccgagcaagagcgatcgctccgcgactcgtgtacactttacgtgggaaacttgagcttctacaccaccgaggagcagatccacgagctcttctcccgctgcggcgatgttcgtgtgattgtgatgggcctggacaagtataagaagacgccctgcggcttctgcttcgtggagtactatgtccgatcggaggcggaggcggccatgaggtgagccatatccatctctccacgctagaaaaagccgccttttttccggcatttgtagaagtaatcagatggggtatcattatctcttaactaacttcaacactcttttcttctcccacaaaagatttgtgaatggcactcgcttggacgaccgtctgattcgtgtggactgggacgccggcttcgtggagggcaggcagtatggacgcggcaaaaccggcggacaggtgcgagatgaataccgcacggattacgatgccggccgcgggggttatggcaaactgttgtcacagaagattgcacccaacacggacaatcgctagttattagataaaatgactgtaaagactataagccccccaattagatattaaagcataccccttagacataacatctctaatcgcatatatattgtacgttttacatagttcttttgaagacgtaattgatatcattgcggcctagcattagcatgtatgagtttctagtgttttcgggctgactggattccatttacttcttgccaatgttgttggccagcgagcagctgagtccggtgccatcgggctcgacattcagctcggtcaccttgccgttctccaccaccagcgagtagcgctttgagcgcacgccgccaagtggtggcagatcgatggtcacatccagggccttggtgaaaccgccggcgggatcagctaggaggcgcaccttgcccgcggctccgtgctccttgccccaggcggacatcacaaagggatcgttgaccgaaacgcagacaatctcgtccacgccctgcttggacttcagctcatcggcggagctcacatagccgggcaagtgggtctgtgggtgtggggaaatgcattattcagttggaatacataagctgcataaattacactatactgctggaagtttctacaatattcggaaactcaaagcagatgactttgcaactatgctacctacgcacctttgagcagcctggagtgaaggcgccgggaacgccgaagatgatcaccttcttgccattgacgagatcgccggtgttgattttgttggctggcgagtcctcgaacagatccaccgatggcagggagtctcctacctggaaataaagtgggaggcagacaggcgtacttagagaaaagaggcagcaagatggaggcgataaccttgaaacgctgtaatttctgggtgccgccgcaatcaatatttatgcagctcggcaccggcttatgtaatggaatccggactgccgcacagccggaaatccgcgtttgccggtcaacctgcacttactttcaccatagctgcactggttttggacagggatcgcagtgaaatgatttgttggggcagcgcggagttaacaactcggccaa

SEQ ID NO: 17477 - DNA, 567 bp, DROSOPHILA
gcagagaaaatatttcaatagtttgtagctgaaaaatatgttcgcatctgtggaattaagctcatatcgcgatcagcacttcaagggctcgcgctccgagcaagagcgatcgctccgcgactcgtgtacactttacgtgggaaacttgagcttctacaccaccgaggagcagatccacgagctcttctcccgctgcggcgatgttcgtgtgattgtgatgggcctggacaagtataagaagacgccctgcggcttctgcttcgtggagtactatgtccgatcggaggcggaggcggccatgagatttgtgaatggcactcgcttggacgaccgtctgattcgtgtggactgggacgccggcttcgtggagggcaggcagtatggacgcggcaaaaccggcggacaggtgcgagatgaataccgcacggattacgatgccggccgcgggggttatggcaaactgttgtcacagaagattgcacccaacacggacaatcgctagttattagataaaatgactgtaaagactataagccccccaattagatattaaagcataccccttag

SEQ ID NO: 17478 - protein, 154 aa, DROSOPHILA
MFASVELSSYRDQHFKGSRSEQERSLRDSCTLYVGNLSFYTTEEQIHELFSRCGDVRVIVMGLDKYKKTPCGFCFVEYYVRSEAEAAMRFVNGTRLDDRLIRVDWDAGFVEGRQYGRGKTGGQVRDEYRTDYDAGRGGYGKLLSQKIAPNTDNR

SEQ ID NO: 17479 - DNA, 7160 bp, DROSOPHILA
acagccgtctgttgtcctatgatgacagaaatgatgccaacttcgcaggacatgttatctccaatggaagtttctccaagattctgggaccgggagttcgcctgggttggcttgaggttcctccgcgcctgaaaccaattttagatggaagtggttttgccactagtggtggatgcttcaacaactacacatcagggattgtgggcagtctatttgagcttaagctagcccagaagcaaatttctgagtcctatgaagcttataaggagcgcatgctggccaccacgcaagtgcttcgagatgagttgcccgactgctgcaagttggtcagccccacgggcggatacttcatttgggtgcggataccggatcgattggactgccgggagtttctcaagtactgcatggagaatcacaagatctactttatagtaggaacacgcttctctgcggatggtcaaagtggcaaacagttcttccgcctgtccatcgccttctatccgaagtcgaagttggtggatggtgctagaagactttgcaacgcacttaaggattacatagccgagcaatagattccccatggcgtatcttaatatggcaaaatgtgtttattattgtggttatctgctatcgtactttaaatatgacttaaaaggatgtgactgtgcactaaactacttatcaagaagttatctactatataaagagatatatgatatacacacgtttgttgtacagattcttgggcatgacgctaaaaatatcacaaatctgttaaattctatacaaatacacaacaattagttcagagtataactttacacacgtacagcggatctcagctcaactgtaactatatccctagttgtatctgcatctgcatcttgtcatttgtgctgcgctgcgaatgtttacagatttcaatatctttcgattgctcataatactttcgcttgaattggaatgcccgctggcggatttacgtccttgcatatgcaaactactccgaaaaggttagtacgatctccttgagtgaggtatacgtgccgattaccaagcccaggatgcccacaatgatcagcacaaagttgcctgcaaggatttttggttagtaaatagatatctatggctatttaatcagcacactcacttaacaccagccagacttttgcgaaacccttcgtattgtaccaatgtgtgcagatctggatgagtgccgggaatgccaaacccaaagcggaaaggcatagtgctccaaacagggagatgaacagctccaggttgggaatggccactgccaggaggactacggtaaataaagacatgaatattactggctaaagaatatgcatatatagggaatatcagacttacaggtgatcagaacaagaccagttcgcactgcgtactcccaaaacagggcattccgttgggcgcccaggcgcttggccacatagtcattccaggtgatatcaatggccacatagcaggccaatccatgggtgatataaatggcaaaggccagcatgcctttgacgcacatggaaagccttaaaggagacacatttaaaagtcagtataatcaggatataactaacaagttagcttacacttcgtgctccggcatgtttagtgtgatggaaccaagcaccgcagatccatagttaagataaccaaagagacccatgcccacgtagaggaacacaatgagcaccatggatacgttgagcacaccacagctgccgccgaacttctgcggtgtcttcatctcgttttccaggggcaggattacaccgatggcttccagggcaaacaagacagtgccaaagaagagcgggaaattcgagggttttccaaaggcatccttgccctctgtggtaactggctcgcggaagatgtagtagcagatgatgccgaacgataccatcgtaatggcgttggccagcgtggagaacggagccagatacttaagattccgcacccagttgatgaggatcagtggcagcagtatgatgatcatgcagagtcgcacatcgatgctcgtatcggccactgcatccacaatggccttaatgttggacgccacgaagaccacgtaaacgcaacaggtgcccagttgatagattagcaggaaggtgttaaccactgtgccaatgtagggagcaaaaacccggaaacatttggggccttcgcccattgccgtttccgctaccattggataattcatgctgggcatctgtcagggagattgcgttattaatctagattatctaacttcaggataagtgcgtaacccaccttcttcctgcggcacagttcatactgagccttgaccagctggtgaatgcagaaggtgcaaatgaaaccaatgacaatcgtaccaatggatccagtgatataaccggagttgcgaaaggcatttggcatggccagaattcctgtgcccagcgaaccctttagcaaatggaacagggtttccgagttccttaaaattatttatattatattatttttttaggaattatcttcagatcctcgcttacgtggtgggatgctccacatcgcgatgatgatagggattgtagtcgggatccttggccactacggccttgttcttctgacccttctccgccagctccaatttgtccggatgatcggcgacgtaagccgaattgctgtgtccattcttggtcatgacttttaattaaaaatacgaattaattaaaagagtataaatactttagaaaaaattaagctataaagccccctcccgttaagaatagtattaatcagtgacttctccgaaatctacagcatatctacagctgtatctgtaaatgtatccgctttgcatttgtatctgcatctgcatctgtggcgcaacaagtgcgtgatgtgcacgatgcgcgttgctctgaaaatagtttgcgccgctgacatatttctaaattgaaagcagactgcggcaatgtcaagttcagtgccagcgattcattgccccgattttcgaatccgacgttttcccctttctgattttacggtatttacgagtcttacgagagtacctggcataacacgaatcgttcggcgttctgagacgtgctaaaatagaatggaagcgaaataacaaaggccaattttagtgtcacttgtctgtagaatcggactttgttgtccgcctcatgcttaattggaaaaaatatgtgtattcgtgtgacaacggacaattcgagactttacggcttccagttaagataatctcatctgtccgagagatatggaaattttggcaaattacgccaacttttccggttctcaatggatcgttttacgagcgtgcctctttgcaattgccttcattgataatatctgcagatcagatgacatataacatgatatgcaagtcgagtcgagtcgagtcgagtccatctagtctataacctgaatgacactctgcataatctcaagtacggcggcttttctttccgtacctctgacaaattctcagatatgaggaagtcataacaccgatctatggggagctcttgacgttgattacactaaattgacttttggaaatacatgagtaatagttctagctgggaaaactatgcaaaataatttatttatgagtggaataattgctgcatttgtatatctaatgatttaatgggaaattctgaaattcctatagctgctgtcggactatttagaaaagatttcgaaagaaaagacagttttaaacaatagtattcatcaatgaacgcaactgggcgtatgagcaatgtgcttatagtaaaatctatgttaaacagttaacaattgaaattttaaggaaatatctataatttcgcttatttcacattctttaccaattaagccattattctaataactttctaatagtctaattccggcttacacgctatgggcccattgtatcaccaccaaaaatagacaaagcctagactagacgcaaaacagaattcgcagaaataatttccataatttatttcaactatgctaaaacaaaataaacccccccttagtttgttttactaatgaagtgcaggcggttttaactggattcgcatcatgtcaatgaattaattttgtgactgtgccgatttgcaatttgtcaatttgttttgacttggccgcaaaatgatttagattgctctttctattttcgctttttgtttttattctcatgcagctgcctaaaaatataaatatagttttgaaaatttcgctgagccaagaattccccatgatgaatcgcttgagtttttgttcacgtgaacgccagtggaatatcaattaaaaaagcggcacgctactctctgttttgtttttattttgttattttggcctttattgtgcttttatttactcactggtgttgttgttgctgtgttgtgggcttttagccgtctagactctcgagagttagccaagttcaatgagccaggccagtgtatttggccttacctgctccgcagcggaatacaaatttcaattgtcagcagcagcgactttctggttagccgctttgctcgtggatttggaatctcttgacttggcccaaacgacttctaactggctggcttcaaccaataaaaaaaaaaaccaaacacacaaaaaaagtagttggccttgctccgctttatcatttcgaaactacagttttccaccgttttggcccgtctgacagtgaatttcggaatgaaaaagttcttggcaatatccacattccgagcagctggaaaagttttgtcagccaactgtttttaaagatcgcaatgtggtagtgcaacaactgcaagtgccagtttttaatgaaattttccacgcaaggcgataattaattttgcgtgagcgcaagagagagagaggaaaacgagtagagttgaagtaatacgttttttttaaagagaaaattatagtgaggaaaatgggctatcaaatgcaactattgaatgtttatctctctataaagtatatatcaaataatttttaactaattgagtatagctctatgactgatctttaaaaagctttgaaaatgcaagagtagtttcccaaaccagtaattttcttaatgtccatgtgccattcactcaacttgaagttggtaatcttcttcaagaatagccaggtgaataattttatatcagccattactcggcggagtgcaaatgtcagtgatctttgtgtgtgttgccacacttcagcttgaccaactggacgtatgagtgatgtgggttgaaagccatgttctttatcacactctcatgccgcatatcagaaaataaacgtgcaaatcaaacaaaagtaggtggttttatagctatgcattattaatattgttcaaagacttgatcacttatgatttttatctgccagatatcaatggctgttgacaatgaccactgatgattataacgattaagatatagatagattgaacaacagattgtaacaagtggatccattttcccttaagcgttgtgaaaggacttgaaattgttgacagagagttgtgttttcatcttatcttgagatatatatatatttagactttatgtttgcaaagaagtgtatctcggcactgtgcaaatattcgaaatgagttgagtctcgtatcttgaaaagctgatggcattttgaaactttcgcgtgtaaattttggcaactcgatcaataatttgcgtcaggcatttgatgcgcatcgctggctaaatataactgcaattaattgggtcttagttcacttaacttagctaaagtgaactcaacgatctgtgcactcatgcccgacttactaatttgcaaaagttgcgcgacttccgctgactaattagccccaaaaatatgtatcactcacttaccgatgcttgtaaaaaaaataacacaattttatttcaattcagcaaaaataactggatttcttttgtttaatatccaaaattgttgaataatcgagtatgacggttattagccaaaacactcgttgacagaaacgacaaagaatcaaaacataaatctaaatcaacgccaatctcgcaccgtcgcgcacttgttataccagactatatatatacactatacactatgcacactatactatgcctatgctatggtgtatagtttgggtccggtgtggttgggtttggatctgcgatgtgatcgtgttggccgcgcgttaacgactaaatcagacccaacgtggatcaccagttttaagcatcgcgcgaaacgctgaacgatactcatacagtgattttcacacagacgatattagcggcacacagggaaatctcttgcacacttgtagagtgtcgcataatgtcatctaaaagcggtgagaaaggggctatcagatgtttaagggatgcttggctagcccatgtgcatcattgtgatctctaggaatcacctggaattagcaaagatgaattaaatgcttttatacaggtaaatttgttggattacatcatctcgttattaacatttgaatacttacttggttctttaagtgtgacattatctttggaacttaaattctttagcaatttctaattaaatcaaagaatacaaattaatttccagtaatatattatacaacacacgctatatggtttatatctaataactatttaccatttcgaagtgtccttggaacgccagactgtttgtgtttaatcaaagtcctcactaattacttgaccaacgtgctcaactaatatttgtgctagtcatttggctcagtcaacgaactatcttgtttattgctcgtgtattctagttttgaaatttgaaatacaaatctaaggaagatctattgcctaaccctttgatatgagccaagattgcttcgttggtagtcgaaatctgctcttccttaaccagctttccctgttcccaaacatcagcgtttaaccgtttttgagcgttttatgattgtcactcgacgtgtttctcatgtaaccatcaccatcgagatgctcctttctgtctccaataccgccaagacagcaccctccccccctcccagtttccccctactggcgagcgatcaccatgatctgtgggccactttttctgccttggtaaagagacgttgccaaatatttggccgggacattctctggcttatg

SEQ ID NO: 17480 - DNA, 1970 bp, DROSOPHILA
cggacccaaactatacaccatagcataggcatagtatagtgtgcatagtgtatagtgtatatatatagtctggtataacaagtgcgcgacggtgcgagattggcgttgatttagatttatgttttgattctttgtcgtttctgtcaacgagtgttttggctaataaccgtcatactcgattattcaacaattttggatattaaacaaaagaaatccagttatttttgctgaattgaaataaaattgtgttattttttttacaagcatcgacgggccaaaacggtggaaaactgtagtttcgaaatgataaagcggagcaaggccaactactttttttgtgtgtttggtttttttttttattggttgaagccagccagttagaagtcgtttgggccaagtcaagagattccaaatccacgagcaaagcggctaaccagaaagtcgctgctgctgacaattgaaatttgtattccgctgcggagcaggtaaggccaaatacactggcctggctcattgaacttggctaactctcgagagtctagacggctaaaagcccacaacacagcaacaacaacaccatcatgaccaagaatggacacagcaattcggcttacgtcgccgatcatccggacaaattggagctggcggagaagggtcagaagaacaaggccgtagtggccaaggatcccgactacaatccctatcatcatcgcgatgtggagcatcccaccacgaactcggaaaccctgttccatttgctaaagggttcgctgggcacaggaattctggccatgccaaatgcctttcgcaactccggttatatcactggatccattggtacgattgtcattggtttcatttgcaccttctgcattcaccagctggtcaaggctcagtatgaactgtgccgcaggaagaagatgcccagcatgaattatccaatggtagcggaaacggcaatgggcgaaggccccaaatgtttccgggtttttgctccctacattggcacagtggttaacaccttcctgctaatctatcaactgggcacctgttgcgtttacgtggtcttcgtggcgtccaacattaaggccattgtggatgcagtggccgatacgagcatcgatgtgcgactctgcatgatcatcatactgctgccactgatcctcatcaactgggtgcggaatcttaagtatctggctccgttctccacgctggccaacgccattacgatggtatcgttcggcatcatctgctactacatcttccgcgagccagttaccacagagggcaaggatgcctttggaaaaccctcgaatttcccgctcttctttggcactgtcttgtttgccctggaagccatcggtgtaatcctgcccctggaaaacgagatgaagacaccgcagaagttcggcggcagctgtggtgtgctcaacgtatccatggtgctcattgtgttcctctacgtgggcatgggtctctttggttatcttaactatggatctgcggtgcttggttccatcacactaaacatgccggagcacgaagtgctttccatgtgcgtcaaaggcatgctggcctttgccatttatatcacccatggattggcctgctatgtggccattgatatcacctggaatgactatgtggccaagcgcctgggcgcccaacggaatgccctgttttgggagtacgcagtgcgaactggtcttgttctgatcaccttcctcctggcagtggccattcccaacctggagctgttcatctccctgtttggagcactatgcctttccgctttgggtttggcattcccggcactcatccagatctgcacacattggtacaatacgaagggtttcgcaaaagtctggctggtgttaagcaactttgtgctgatcattgtgggcatcctgggcttggtaatcggcacgtatacctcactcaaggagatcgtactaaccttttcggagtag

SEQ ID NO: 17481 - protein, 462 aa, DROSOPHILA
MTKNGHSNSAYVADHPDKLELAEKGQKNKAVVAKDPDYNPYHHRDVEHPTTNSETLFHLLKGSLGTGILAMPNAFRNSGYITGSIGTIVIGFICTFCIHQLVKAQYELCRRKKMPSMNYPMVAETAMGEGPKCFRVFAPYIGTVVNTFLLIYQLGTCCVYVVFVASNIKAIVDAVADTSIDVRLCMIIILLPLILINWVRNLKYLAPFSTLANAITMVSFGIICYYIFREPVTTEGKDAFGKPSNFPLFFGTVLFALEAIGVILPLENEMKTPQKFGGSCGVLNVSMVLIVFLYVGMGLFGYLNYGSAVLGSITLNMPEHEVLSMCVKGMLAFAIYITHGLACYVAIDITWNDYVAKRLGAQRNALFWEYAVRTGLVLITFLLAVAIPNLELFISLFGALCLSALGLAFPALIQICTHWYNTKGFAKVWLVLSNFVLIIVGILGLVIGTYTSLKEIVLTFSE

SEQ ID NO: 17482 - DNA, 3722 bp, DROSOPHILA
aaaagtaagcaaaaaaaagtattggcgtctttttagagttttttttttttaaatgtaccgaaaaaaagtgatttagggcgattttgcatttttatcagtgtaaagggagatggtaaccggtaatggctcagtttcgatgcgcttaaataagcatttcgttttgagtccaatatatcttaaggttttaaggtccactctggagcttcgacgcgtactgatcgttgtgaggaggccagagtggatcatttcaccatagcttgttgttagtggctttgcctcttgtcgcgtagttggcggggttctgatgcggttttcttgaagacgagtgagcttaagtcgagaaatcctccttgataccgagctgcatctgcgtgagctacacaaccctacacaacagtagctgcatctgaaactacatatttagcgtggaatcctcaggtttgtgatgatgttgatgaagatatctatcttagatgatagatagaagatagataccagagtagtgggaaagaatgtcgtccgctgcgggggcgattgtatttgttgaccattgatcatttgaagtgtagccaatcctcgagtagtttcagcattgatggaagatatttcagaaatacggatcctcgaggacagctttgactcgctatataatacccgtcaggcacatataccaatatgttcattgttatcccagaggtttgggagcttctctacgcaatttctgcagaaacaattgatgggccatttgtggtagatggatggagaaggatggacgagaatgtccatcttaggttccaccagggtgtcaacgttttagtacaaaaagattcccgctcacaagttgttaaaaacacagtcactgtatggtgccactggcactctgtaggaggatcaaaatacttataaggactactatttttataccagtaaagattctaaatggttggtcaagaagttgataattctttccgcactaggacccgtcatcggcatccgacacatgcaggccctcctcttattcttggccatcgtcgtgaactacacagcccggctcagcgttagcgtagcaatagttgctatgacggatgcggccactactaacttggactttcctgtgagtacaatatgaaatgagtccgatatgattatctttaatcaaataaattgcgactaaaggagtacaactggaatggtgtgcagcaatcatacattctgtccagcttctactggggatacatcgtcactcaatttccagccggttttctcgttcgccgcttcggggctaaggcggtgctgctcgtccccacgctggctacggccgtcctgagcggtctcacaccgtattgcgtggcctggggtggctggcaggctttttgcaccatccggattgtggagggtctttttcaaggtctaatctttccgtgcatacatgagcacctggccaagtggtctccgccagaggatcgaaaccgactgggcgcctttgcgtactctggagccgactgcggatcagtgctggccatggctagcagcggtcttattgcgaatggatcaatgggctggcctggaattttctacgtgtcggcgggcacttgcgggctgtggtgcctactgtgggtgctattcggcgctaacaacgcgcccagttcccggctaatcggttcccgggaacgggagcacatcgagcgctctatgaagcggcaggatggctttcacgcacagaagattccaatcccgtggcgggccatctggtcatccagtccgttctacgcactgttggtggtacggagcgctcagggctgggccaactccaccatgcaactgcagacaccgtcctacatgcacggcgtcctggagatggacattaaaagcaacgctctctactcggccctgccctttctggccatgtggggtatgtcgtatgtatacctggttttcgcagatgtggccatgtcgaggcaatggatgtccctaaccacgctgcgcaagtcaattaacaccgtttcctattggggacctgcggcggcccttattgggattggctttctggataagagccagacaactctggccatcgcactgatgacaatcaacgctggcctaaatgctggctctgggattggcagcatcctgaccattatcgacatgtccccaaaccattctggaatgctaatggcaatagtgaatggcattggcaacatctttccgctcctaacgccgctcttagtgggagtcattgtcactgaatcggtgagtaagggtattaaaggtatttttctcagacttttatactgcaataggaaggcgagttgaaatgcgggttttcaatatattgaagatttatgccaattttacgataaaagtaaattattattttatggttatctttcgttcagaagaaaaaatttaataattttaatttaactaggcgctgaggtgggaaggtttatgttaaaattatatgaagcaagtctataatttaatatgtgcttgcgtttcttaggactcacgaagccagtggcagattgtgtttgccatgaccgctgtggtttttttcattggcaacctggtgtacctgatttggggcaccactgatcagcaggcgtgggatgccgaagactatttgcaggcgaaggacccggagagcgagtcaaatgcccatcaaatggagttcaagtcaaggacggattcagaggctaaggcagatataaaagcagaatgattcgcgaatggaattccgggatcgcgcctgaagccgcagggaagtgcgaaatgaaaatctgatctatctggcaagcgctgtctgaatgcatatttggcgtagtagagtatgccattttaattaaaaattcttaaaacgtttcgctgcgcccttgtattttaatttcttgtttgtacgcatttctttcgctaaccggcgaaatttaatagaaaatccttactatttctttgaatgaattcattttctatttctgcccgcatttgcatgcgaacagcgcagcggggcagatggaaagagtagagccaaactacacttaaagttgtcttgtaatcaaacaattggcttaaaaagctctatctttactatggccactgtttaatttataaaccattatgctcctattaacattagttttagttatcatgcgtttatcattctatccaaatgtaatttaatatattgtttcgatctagttcgatctattactcaaaataatagtattaaaaatttggttttcaaatactttcttcatactcgcgtaaggcatgctggttccggatcaaattcgatctcttcagcgtatgcccgtttttcttttcagtgcagctaaggcaacaagacaccagctccggcttaccaactgtccgaacaaccctctcgacccaccaagaccattcccattcccatcagcatgcttatccttgtcctcgtcctggtcagtcagtcaacactgagcggcggatggcaaacaacaaggaaaaaactttgcacacaaatcagaaaaatggacacttggtagaatttatgcacgaacgcgtgcgcacagtacgtcgcaaggaaccgctcgccagtaggcggcagaaggcaactggacgacgagtgagcctgcggggatggggaggactcctgccaaaagaggcttatggccagcaagtggctgcggcacgttttccaggcccgacaaaaaccaaaaccgaaaccaaaacgaaaatgttttttc

SEQ ID NO: 17483 - DNA, 1407 bp, DROSOPHILA
atgcaggccctcctcttattcttggccatcgtcgtgaactacacagcccggctcagcgttagcgtagcaatagttgctatgacggatgcggccactactaacttggactttcctgagtacaactggaatggtgtgcagcaatcatacattctgtccagcttctactggggatacatcgtcactcaatttccagccggttttctcgttcgccgcttcggggctaaggcggtgctgctcgtccccacgctggctacggccgtcctgagcggtctcacaccgtattgcgtggcctggggtggctggcaggctttttgcaccatccggattgtggagggtctttttcaaggtctaatctttccgtgcatacatgagcacctggccaagtggtctccgccagaggatcgaaaccgactgggcgcctttgcgtactctggagccgactgcggatcagtgctggccatggctagcagcggtcttattgcgaatggatcaatgggctggcctggaattttctacgtgtcggcgggcacttgcgggctgtggtgcctactgtgggtgctattcggcgctaacaacgcgcccagttcccggctaatcggttcccgggaacgggagcacatcgagcgctctatgaagcggcaggatggctttcacgcacagaagattccaatcccgtggcgggccatctggtcatccagtccgttctacgcactgttggtggtacggagcgctcagggctgggccaactccaccatgcaactgcagacaccgtcctacatgcacggcgtcctggagatggacattaaaagcaacgctctctactcggccctgccctttctggccatgtggggtatgtcgtatgtatacctggttttcgcagatgtggccatgtcgaggcaatggatgtccctaaccacgctgcgcaagtcaattaacaccgtttcctattggggacctgcggcggcccttattgggattggctttctggataagagccagacaactctggccatcgcactgatgacaatcaacgctggcctaaatgctggctctgggattggcagcatcctgaccattatcgacatgtccccaaaccattctggaatgctaatggcaatagtgaatggcattggcaacatctttccgctcctaacgccgctcttagtgggagtcattgtcactgaatcggactcacgaagccagtggcagattgtgtttgccatgaccgctgtggtttttttcattggcaacctggtgtacctgatttggggcaccactgatcagcaggcgtgggatgccgaagactatttgcaggcgaaggacccggagagcgagtcaaatgcccatcaaatggagttcaagtcaaggacggattcagaggctaaggcagatataaaagcagaatga

SEQ ID NO: 17484 - protein, 468 aa, DROSOPHILA
MQALLLFLAIVVNYTARLSVSVAIVAMTDAATTNLDFPEYNWNGVQQSYILSSFYWGYIVTQFPAGFLVRRFGAKAVLLVPTLATAVLSGLTPYCVAWGGWQAFCTIRIVEGLFQGLIFPCIHEHLAKWSPPEDRNRLGAFAYSGADCGSVLAMASSGLIANGSMGWPGIFYVSAGTCGLWCLLWVLFGANNAPSSRLIGSREREHIERSMKRQDGFHAQKIPIPWRAIWSSSPFYALLVVRSAQGWANSTMQLQTPSYMHGVLEMDIKSNALYSALPFLAMWGMSYVYLVFADVAMSRQWMSLTTLRKSINTVSYWGPAAALIGIGFLDKSQTTLAIALMTINAGLNAGSGIGSILTIIDMSPNHSGMLMAIVNGIGNIFPLLTPLLVGVIVTESDSRSQWQIVFAMTAVVFFIGNLVYLIWGTTDQQAWDAEDYLQAKDPESESNAHQMEFKSRTDSEAKADIKAE

SEQ ID NO: 17485 - DNA, 4581 bp, DROSOPHILA
catatccatgttattcatctctattaaatcataacagtttcaagtgaaataaacaataatatatgagagcgtaacgtttaaaccaaacatattccccacgatttatttatttgttagcttagtacactcttaaaatcaagtgtgcgaaaatctgcacttgagcgccacttgacaaccgtttaatacacaagacgcgcggacaaacgtaaatacatggggactataaaacttaaggactttacgataataaatacggatacttaagctcaagtagcgaaacaaaatcagcataaagtggctgcgaacaaacaactaataacaacggggagcagctggaggagtcggttattgaatctgatagtcaggtacaatgtgtgcgattgtgcaaagatactttcatacatgcatacaagcatacatgtttggaattagtgatggacagaacttaaaatatattgtcaataccatatatattcttaagctattagattaaatttacaaatgtaatacataaattagttttttatatttggatacatattttataaatctcctaagcatatgacagcctcgcacatctctagcgcagaagagcgagatgccgcactcgcattccgatgctgtgctgtgattggctccggggcggccattttgcccgtatgctcagttcgctcacacacatccaaaaacacagtggcatgaggcggtctggggtgaaaggagtacgcgttcagtaccaaaatcgagctgacaaattgcagacacggtcgagtgcgcatcggaacggcgctttacggcttacgggttacggactactgattgccgattacgggctacgactcacttacggttgcgctaacggttgcgtggagtgtttgctcgattactggactaccgagattccaattcaagtgtcgcaagttcaagtgcgatttggcaaattgttggacttatttaaatcgaagtgcttctcaagtggccaagtgatcgcacagcgaggatgttgcagcaccatcagcagcaggctcaatcgggtggctactacgatcactacactcagtcccccagtccgggcagcctgacgaacgcggatgccctgaacaccactccattttcggtcaaggatatcctgaacatggtcaaccaaacggaggcctacgaaggttcctacgggcatatcgatgggtaagcttggaagttttgaatcaattatacattaagggtcaaaagcaactaaaaattggggtacaccaatagactagttccaaggtactgtgttctacatgttaccaaaatctactaaatcgaatcagtgtacatatatgatataaaactaattattataccggttaactatctaaattgcaatgatttaagaaggtatctgtgcagttcagagagagaccaactgttagttgagccatttttagctatcaactggcatacatggacatttccaccacttctacctgtcagtgacttcttctcgaagacagcgcccttccccgtcccgatcgcttttatttatttttatttaatagggctccataggaaaattaatttctaccaattttccaaagaaagataatattttgataaccttccgccgagacgtagcagaagaaatcctatgaaaacacatagaaagcatgaattgcaaataggatctgggatcggagagcgtcaagcgttgagcgttgagctcgaggctttgacaaatcatcgttatttgtacaagaggccgaagacaaagacgaggagagacagtgttaacaataagaacaacaatgtccgaggcaggcagtcgggagtcacggcgatcgctggtccgcccgatcccttctgggctggtcaacatgtgtgattcgcatgtgtggaccgccgcacaggggcgtccttaattgcctgatgagccatgaaatgatgtcaccatggatcctgtcgcgccagcaggaagtgggcaaaaagtcctcgtcccagctccccgggctgtgtcctccgtgatgcaacatatggcggccatatacgagactttgtattgccttgtttctaaccttgcgcttttccattttcctgctttcccgcagcgcggcgactgcctcggcgctcttcgccgccggtgagtaccagaatccccaccagtacctcaaccaccagcagcatcagcaatccgagctgccgattccgcagcagcaactgcatcaccaacacttggacgatggcgccaccacatcgtcgtccctatcgccactcttgccacccccgccgcaccagctgtacggcggataccaggactacggtatgcccgcccacatgttccagcaccatcacggacatccccaccagagtttccagcactccgcctcggcctacaacatgtccgcctcgcagttctacgccggcgcctcggccacggcctaccagacccccgccacctacaactacaactacgccggatctggtgaggtgtacggtggagccacgccctcggcggtgggcatcaagagcgagtacatacccacgccatacgtcacgccctcgcccaccctggacctcaacagctccgctgaggtggacagcctgcaagctccgacgcagaagctgtgcgtcaatcccctgtcgcagcgcctcatggagaccgctagcaactcgtcctccctaaggagcatctacggttcagatgagggcgccaaaaaaagtgagtatcttgtttaattgtttaatggagaagtggatctatgaaatgtatggatgttaattattaagcaattagaacgatttggggaatacatatgtacatacatacataggaagtgtgccttcgaatataaaaaatgaggataatgggctaataaatcaaattcgttgttcatctgttttaaaacataaaaacataaaatttcttaaggttcaaagatagattcattccaaataacgtcaagttaaaaattcaatatataattaaattaaacaacaaagtgtttaaggattgaaagatgatttatggatgaaattgtaatggcaaagtaaaacattgtttgaatatgatcctaaactagtgcctagtcccttaactagttataactattatattctactatattctcgatattggctatctttcagaggataacagccaggtgacctcctcgcgttccgagctgcgaaaaaacagcatcagtgggaacagcaatccggggagcaacagtggttccaccaagccccggatgaagcgaaagcctcgcgtgctcttttcccaggcacaggtcctggagctggagtgtcgctttcgactcaaaaagtatctgacgggtgcggagcgcgagataatcgcgcaaaagcttaacctgtcggccacccaagtgaagatttggttccagaatcggcgctacaaatcgaaacgtggcgacatcgactgcgagggcatcgccaagcatctgaagttgaagtccgagcccctggactcgcccacttctctgcccccgccgattcccaaccacgtgatgtggcccccaaccatgcagcaatcgcagcagcagcagcagcatcatgcacagcagcaacagatgcagcacatgtagtggacatctcgcaggacgaaggattcgagtctctaatttattgcagtttcaagaagaatacatgttgtagtctaaggaaaacgcctcatagttctagttctttgttttatgtatatattggacaataaataaagcttaagaccaatcagttcagactatatatttcattttcaacgatttctgtatgcatttgacattggtttgactttcggagctaacttgtttttttttaacaattatttcatatatcagaaaaatggatcattcttggctttagaaaagttaaaagttatgttccgttttttaaaatggtagaggtatattattatcagggaataagttcacccattagaataggatttttaaaagattttctttccgcatccttttgtatcttgcagactcaatacaaccaatttcagctaaagatcaatcagaatttcagcttggcctgtcgtgtgaacttacaccactgaatcccatgactccttgctctggcgcactcgcatttatatcttcatgaacagctttcgatcggccaccgatccattaggcaccgcatctgcgtataattgccgccgatcgccgcataaatcaattttatcggagagagcgatcagttttatgaaaaacgaattcgaaggcgaatgaaaacaccacaatttccgctttagtggaaattgaaatgttttcccttttctgcttttcgcagggattcctggggagggggaaaggggaagtgcgttggcggcagacattacaaaggttgcatttatgaaacgtttaagtggcatcaatgcaactgtaaaatgtttccctgcctccacagatacagatactctcgttcagatacgaagtgcagggcacagaaaaccgctcctcctcggcattttatgacagccatcgggcaaaggctaatatttcattgggggctcgagtctggtggtggatcagtggtgtcggtggtgttgtggcagtggcatatatcaattactccaca

SEQ ID NO: 17486 - DNA, 1251 bp, DROSOPHILA
atgttgcagcaccatcagcagcaggctcaatcgggtggctactacgatcactacactcagtcccccagtccgggcagcctgacgaacgcggatgccctgaacaccactccattttcggtcaaggatatcctgaacatggtcaaccaaacggaggcctacgaaggttcctacgggcatatcgatggcgcggcgactgcctcggcgctcttcgccgccggtgagtaccagaatccccaccagtacctcaaccaccagcagcatcagcaatccgagctgccgattccgcagcagcaactgcatcaccaacacttggacgatggcgccaccacatcgtcgtccctatcgccactcttgccacccccgccgcaccagctgtacggcggataccaggactacggtatgcccgcccacatgttccagcaccatcacggacatccccaccagagtttccagcactccgcctcggcctacaacatgtccgcctcgcagttctacgccggcgcctcggccacggcctaccagacccccgccacctacaactacaactacgccggatctggtgaggtgtacggtggagccacgccctcggcggtgggcatcaagagcgagtacatacccacgccatacgtcacgccctcgcccaccctggacctcaacagctccgctgaggtggacagcctgcaagctccgacgcagaagctgtgcgtcaatcccctgtcgcagcgcctcatggagaccgctagcaactcgtcctccctaaggagcatctacggttcagatgagggcgccaaaaaaaaggataacagccaggtgacctcctcgcgttccgagctgcgaaaaaacagcatcagtgggaacagcaatccggggagcaacagtggttccaccaagccccggatgaagcgaaagcctcgcgtgctcttttcccaggcacaggtcctggagctggagtgtcgctttcgactcaaaaagtatctgacgggtgcggagcgcgagataatcgcgcaaaagcttaacctgtcggccacccaagtgaagatttggttccagaatcggcgctacaaatcgaaacgtggcgacatcgactgcgagggcatcgccaagcatctgaagttgaagtccgagcccctggactcgcccacttctctgcccccgccgattcccaaccacgtgatgtggcccccaaccatgcagcaatcgcagcagcagcagcagcatcatgcacagcagcaacagatgcagcacatgtag

SEQ ID NO: 17487 - protein, 416 aa, DROSOPHILA
MLQHHQQQAQSGGYYDHYTQSPSPGSLTNADALNTTPFSVKDILNMVNQTEAYEGSYGHIDGAATASALFAAGEYQNPHQYLNHQQHQQSELPIPQQQLHHQHLDDGATTSSSLSPLLPPPPHQLYGGYQDYGMPAHMFQHHHGHPHQSFQHSASAYNMSASQFYAGASATAYQTPATYNYNYAGSGEVYGGATPSAVGIKSEYIPTPYVTPSPTLDLNSSAEVDSLQAPTQKLCVNPLSQRLMETASNSSSLRSIYGSDEGAKKKDNSQVTSSRSELRKNSISGNSNPGSNSGSTKPRMKRKPRVLFSQAQVLELECRFRLKKYLTGAEREIIAQKLNLSATQVKIWFQNRRYKSKRGDIDCEGIAKHLKLKSEPLDSPTSLPPPIPNHVMWPPTMQQSQQQQQHHAQQQQMQHM

SEQ ID NO: 17488 - DNA, 2937 bp, DROSOPHILA
gatgatctttgacgagtttttggaaattgttacggaattgctggctttgtggaaaggaaaaacgctggatgttgactggatttatgggttctttcgtggcgcccaggtgcgcagccaagggacgtagtcgtgtccaatgctgttgcaacagtttggcgtattcccttccatgactcagtagctccagtttattgtcttccacggtgcgaaagaagccagcggaagccagggacttaaagcatcgttgtatgcgactcattgctccagcggaatgttgcccggcggcgaaacgaagtagtcctcgtccgtcaccttggcgttccggagcacctccgcccggcaatcgccttcggtcacctggtcgttgcgtaactggagctgctgatgctccaggaccgtgtacagtggacgcacgtgctccgtgttgatatgggcaatcttgtccgcgaactgtatgctgctctttagcgtggccagcgctcgttcgctatccagatccaccagcgacagccgctccagcaactggatggttttcgtgtcgatctggatttcggaggcgctggtgtcgggaaacttcgagtccactggtgtctgtggcaccttggtgggatgcgttagctgcttgaagtccaatttagtggccttttcattcgattttgttgcaattttgcagtaaaaacggctgctgaacagacgcaacattctcaccagcacaaaatcagaggtggaactgagtttcggaacaatcagctaaatgttatctgaaaagtattgtccttgcaaaaatgttgatttatgtgtttattctatcttaatttaaagcaattttcttgttattgtgatctagtttaattaaacatgtctccatcacatttgttcaatttaatatatccagcccttattgttaaaaatctagctataaatccgaaacgagaacaacaatcgataacggcacacttatcgccggctgttattgctgcacttccatcgcttccttttcactgagcgggttatttttttcgtgaccctttaatttcatcaaaacaaaaccgcaatgccgtacgccaaccagccgtccgtgcagataaccgagctgacggacgacaacgtaaagttcgtcctggaggacacggaactgagtgtggccaacagcctgcggcgagtgttcatcgcggagacgccgacgctggccatcgactgggtgcaactggaagccaactctacggtgctctcggatgagtttttagcccaccggatcggtctgataccgctgatctccgacgacgtcgtggagcggctgcagtacacgcgtgactgtatctgcctggacttctgccccgaatgcagcgtggagttcaccctggacgtaaagtgcagcgaggaacagacgcgccacgtgaccaccgccgatctcaagtcgagcaatgccaaggtcctgccggtgacgtcccgcaaccagggtgaggaggacaacgagtacggcgagagcaacgatgagatcctcataattaagctgcgcaaggggcaggagctgaagctgcgcgcctacgccaagaagggatttggcaaggagcacgccaagtggaatcctaccgcaggcgtgtgcttcgagtatgatccggacaactccatgcgacacactctgtatcccaaacctgatgagtggccaaagagcgagcacaccgaactggaggacgaccagtacgaggcgccctacaactgggaagccaagccaaacaagttcttcttcaacgtcgaatccgccggtgcccttaagcctgagaacattgtggtcatgggtgtgcaggtgctgaagaacaagctgtcaaacctgcagacgcaactcagccacgagtcccaaaacgatgcattggccgtttgatttacatataacaagtttattttaagtttataaaagatgttccgcctaatccttgaacaagctgtctatgttaatgcccacgttcgcttccttttttcccttgggagcaggtggtgctggtgacgacgtgatttgctggctcaccacagcctccttgaagtcgctcagcagctgggacttggattccgaatcctgctctggcaggcattcctctggggtagtctccaggcgggcctgctggcgctgctccgccaaaagatccagtgcggtctcgtagatcctttgctcatccagggctccttgtcctttcaggtcctggtatatttggacaaattgctgtgactgcgtgctgcgcctgtggtcaaacagggatatcgtttcctggggtttgttttctttatgcagctttctgttggtgtacaagattagttcagtattggtataagcccgactgcaggtgaaaaacatacgctcggacaacatcctcggcataaaatatctggcgcactggaatctcaggcgcgggtctgtcgaatcggggctccagtttcggcggaaaggcggcgtacacatcgtaccaaatgggtttatcctcggttttcatagctccaccgcgtaggaggccctgaactctgcaagagtcgggtgtttaaagcttgcacagatatttcgtaggagggtaaatacctggtgaagattgtgccaatcttttcaagcctactttgtgccattttggtaaagttttaattaattaaatgtgttttttaacaaattacgattacgacatgcagtgcatgaacttatcggtaagcagccggtgcctatcgataccatcagagttgccgctgtgagcttaacggacttatggcttataagagcctagagcgctccaattggcatttagacggcaagtgaaatatttatttttttaaattggttgaattgtagttacaaagatattgacttaaaatctattcatatatatggcacttaattgaaataaattaactacattatgttactatcgataccagtccaaacaaatatagtattta

SEQ ID NO: 17489 - DNA, 937 bp, DROSOPHILA
actgagcgggttatttttttcgtgaccctttaatttcatcaaaacaaaaccgcaatgccgtacgccaaccagccgtccgtgcagataaccgagctgacggacgacaacgtaaagttcgtcctggaggacacggaactgagtgtggccaacagcctgcggcgagtgttcatcgcggagacgccgacgctggccatcgactgggtgcaactggaagccaactctacggtgctctcggatgagtttttagcccaccggatcggtctgataccgctgatctccgacgacgtcgtggagcggctgcagtacacgcgtgactgtatctgcctggacttctgccccgaatgcagcgtggagttcaccctggacgtaaagtgcagcgaggaacagacgcgccacgtgaccaccgccgatctcaagtcgagcaatgccaaggtcctgccggtgacgtcccgcaaccagggtgaggaggacaacgagtacggcgagagcaacgatgagatcctcataattaagctgcgcaaggggcaggagctgaagctgcgcgcctacgccaagaagggatttggcaaggagcacgccaagtggaatcctaccgcaggcgtgtgcttcgagtatgatccggacaactccatgcgacacactctgtatcccaaacctgatgagtggccaaagagcgagcacaccgaactggaggacgaccagtacgaggcgccctacaactgggaagccaagccaaacaagttcttcttcaacgtcgaatccgccggtgcccttaagcctgagaacattgtggtcatgggtgtgcaggtgctgaagaacaagctgtcaaacctgcagacgcaactcagccacgagtcccaaaacgatgcattggccgtttgatttacatataacaagtttattttaagtttataaaagatgttccgcctaatccttg

SEQ ID NO: 17490 - protein, 275 aa, DROSOPHILA
MPYANQPSVQITELTDDNVKFVLEDTELSVANSLRRVFIAETPTLAIDWVQLEANSTVLSDEFLAHRIGLIPLISDDVVERLQYTRDCICLDFCPECSVEFTLDVKCSEEQTRHVTTADLKSSNAKVLPVTSRNQGEEDNEYGESNDEILIIKLRKGQELKLRAYAKKGFGKEHAKWNPTAGVCFEYDPDNSMRHTLYPKPDEWPKSEHTELEDDQYEAPYNWEAKPNKFFFNVESAGALKPENIVVMGVQVLKNKLSNLQTQLSHESQNDALAV

SEQ ID NO: 17491 - DNA, 3779 bp, DROSOPHILA
ttgcacacaaatcagaaaaatggacacttggtagaatttatgcacgaacgcgtgcgcacagtacgtcgcaaggaaccgctcgccagtaggcggcagaaggcaactggacgacgagtgagcctgcggggatggggaggactcctgccaaaagaggcttatggccagcaagtggctgcggcacgttttccaggcccgacaaaaaccaaaaccgaaaccaaaacgaaaatgttttttcaattaaaatcgttgcggagcgagcgaaaaattcatttgaattgccccatcgctgtcatgttcccgcgactaccttcctctttacccacccattgctccaaataccaccaagccgcactgccccaatggaaagtcataaatggcccctcgcccaaacatacggcgatacgggtatataaaagtgcgtatggcacaaaagcgccaggactcgcagtgtccttgcagtaagtaaacgaacatggtatttaagctcgccaaaaggcaattccattgttatcaaagctctttaagtaattatgaattgaattgaggaatcgaactagaacaatttctagccgaaatttttttttttaattagatgaacaatagttgaaagcaaagagttaggctctattcggagttagtgccaagtggaatctatctttaaatgtttaagcaatcttaagaaatgcaaatgcatcttcatttgcccggaggagttataaagcatatatagtttcgattagaaacactagtcgagtccatctggccgtgtccatctgtctgtcggtctaatcggttcatatgaattttacgatacactatttcacacttttggtgctacaacagcacctacagaatttaaaaggatcccaggatcagcgatgaaaaggcttttcgattacagttacatagatcgttgaagcctaatttataaaacttcctaaaattacaaaggaatggcttggttgtctcattgctatttcgtggtagagttggctttatattaaatggacatctgcttcgggagcatcacctttgatttaaaacccaaagcgacgagaggagccacctctgagggatggcgtcctcgcgtctctggcaagtagcgtttcgtcaggccaaatatcaggaggcaggtcaccgagaagggcaaaaaaactaaggcgccccagaggttctgcatcgtggggaacgccattccgataataaagttgcacagccagtacgccaagcttcccaacgacatggcggctggacgggtagccagttcaaacagttctgtcaagtgtcaaaaatcaaataaaagaaacctgataagataaaattttaaatagtgcaacgcacctgctccgatgaagaacggcattgggcccagaccaaattggaagaagaaaatgtacaggaaaatgcagccaatgcagcccataccaaaccagctgtagctctcctaaggtataagaaaataataattaacccaatgactatttgtttttaacaaaacttacgatgaagaagagcattatggcaaacaaaagcagaaagactgcgcagaagaatgtggagaaaagcatcagtggtcggcgattgactcgttccagcagcacggggcccagcatggaggcgaacaaattgagggaacccgcacctaggttggcccactcagaagcctgactggaaagacccgcctttcggaaaatggagacggagtagtaaaatatctgcagggacaaacgagaggtgaatcactttttagtcgctccgcaggctgcaccgtacgtacagcattaatgccagacagctgttggccaccaagaaaggcgcagacgatgatcagcggaagtcgcaattgggggtcacgcaggacctgcatcaaactgctggtcttcacctcgcaagcagattcctgctccatctcttccatctcggccttcagtgcggcgctgccagccgtgtaaccccttagtagctgaagctggcgacgagcatcctccttacgaccttggacgatgaacaaccacttggggctctcaggataccacctaaaaggtgcataacacacaagcacgagaagaccgtagaatgcgaggccgaagtgccagttctcaggacctccaagcaccgagcgcaggctgcagacctgcgcaatcaccacccccaaggtcaagcccattggacagaggggagccaaggtgctgcgctgggagagagccgagatttcgctgtgccacatggacataaaggatgttagcagaccgccggccagaccaaccatcatccgacccagcagaaggagctccacggaacgcaacggtcgacatgcgtaaaagctaatggctcccagacccagaaggaggccacagatgaagaagcagccgcgacgtccgaaccgattggccatggtggctccaacaactgatccaatggcgcctccaacgaggaatatggagactatggcagaccacagtatttccaaccccgcatcacttaagttcaggtcatagctggcaatcagtgtctcgttgcaccaggagcgcatgagctggccaaatgggagatgaacttgtgcggtgctgacaaatttaaagagtactcacttcagcgggactattcatcactcctgtgcaatagcccacgggaaccgccgcaccaagcgacgatccgattgccgcccaattgagggaccagctccactggggccgctcctcctggaaacggggactgttgggacatttcccacgatattggggttcctttgccttacctgcttgccattttcgtgtgccattagcggcgcctctgagaacgttaatgattgctcctgaagcgattcgccgacttttggctttgccattgcgtatttcgtgggtggtggtgtttcttatggcgcttttgtgagcggaatgctggtgaatggagtattgcggatcgtatatcattcgccgcgacggagacggcatttttccactgagaagtcggttatcaagcgcagagataaccgatggcatagtcgcacaaatgcgctaagggcagggcataccgtgcttataattaaagcgttgggatgccttcggcgtcttatggcttcatctttgagatatacaaggtgctttatttgaattcgctaatcattatcacgatggtaatgaatggcgataaatacgccagcgtatcacagaacccacaataaaagcctaaacctacttatctgtcatttacattatattacgttagtaggttgccaaagttgccaaagtaatgcacgtgcagtagcacaatacggaaatgtgtgatgagataacaataaaaataaactacatatacttttatttattaaggcaactgttcgcatatcggaatatgttatgttataatttatttagtttttcacaatttgaaaactttttagggtaaagtttctttatttaatcaacagaatatatcacatttatacatttacattataacgatatatgtaccacttgtgcaatgttgctagccacaaaaaatacttaaaataatttatttaactataatcaaatagtgtaaataaaaacaaaacccgaaaggaagctagcttcgaatagctttttattgtatatatgtatatatatattaaatatcgcataagaacactttatgatcaagagcaacaaaagctttttaattattttcccaactattcccatcgcatgatacctgcaatagaaagaagtcttttatgaaagtttcatgcatgttgtattttaactgagaaattatttggtatgagtaaaaactgacgg

SEQ ID NO: 17492 - DNA, 1482 bp, DROSOPHILA
gcacacgaaaatggcaagcaggaggagcggccccagtggagctggtccctcaattgggcggcaatcggatcgtcgcttggtgcggcggttcccgtgggctattgcacaggagtgatgaatagtcccgctgaactcatgcgctcctggtgcaacgagacactgattgccagctatgacctgaacttaagtgatgcggggttggaaatactgtggtctgccatagtctccatattcctcgttggaggcgccattggatcagttgttggagccaccatggccaatcggttcggacgtcgcggctgcttcttcatctgtggcctccttctgggtctgggagccattagcttttacgcatgtcgaccgttgcgttccgtggagctccttctgctgggtcggatgatggttggtctggccggcggtctgctaacatcctttatgtccatgtggcacagcgaaatctcggctctctcccagcgcagcaccttggctcccctctgtccaatgggcttgaccttgggggtggtgattgcgcaggtctgcagcctgcgctcggtgcttggaggtcctgagaactggcacttcggcctcgcattctacggtcttctcgtgcttgtgtgttatgcaccttttaggtggtatcctgagagccccaagtggttgttcatcgtccaaggtcgtaaggaggatgctcgtcgccagcttcagctactaaggggttacacggctggcagcgccgcactgaaggccgagatggaagagatggagcaggaatctgcttgcgaggtgaagaccagcagtttgatgcaggtcctgcgtgacccccaattgcgacttccgctgatcatcgtctgcgcctttcttggtggccaacagctgtctggcattaatgctatattttactactccgtctccattttccgaaaggcgggtctttccagtcaggcttctgagtgggccaacctaggtgcgggttccctcaatttgttcgcctccatgctgggccccgtgctgctggaacgagtcaatcgccgaccactgatgcttttctccacattcttctgcgcagtctttctgcttttgtttgccataatgctcttcttcatcgagagctacagctggtttggtatgggctgcattggctgcattttcctgtacattttcttcttccaatttggtctgggcccaatgccgttcttcatcggagcagaactgtttgaactggctacccgtccagccgccatgtcgttgggaagcttggcgtactggctgtgcaactttattatcggaatggcgttccccacgatgcagaacctctggggcgccttagtttttttgcccttctcggtgacctgcctcctgatatttggcctgacgaaacgctacttgccagagacgcgaggacgccatccctcagaggtggctcctctcgtcgctttgggttttaaatcaaaggtgatgctcccgaagcagatgtccatttaa

SEQ ID NO: 17493 - protein, 455 aa, DROSOPHILA
MNSPAELMRSWCNETLIASYDLNLSDAGLEILWSAIVSIFLVGGAIGSVVGATMANRFGRRGCFFICGLLLGLGAISFYACRPLRSVELLLLGRMMVGLAGGLLTSFMSMWHSEISALSQRSTLAPLCPMGLTLGVVIAQVCSLRSVLGGPENWHFGLAFYGLLVLVCYAPFRWYPESPKWLFIVQGRKEDARRQLQLLRGYTAGSAALKAEMEEMEQESACEVKTSSLMQVLRDPQLRLPLIIVCAFLGGQQLSGINAIFYYSVSIFRKAGLSSQASEWANLGAGSLNLFASMLGPVLLERVNRRPLMLFSTFFCAVFLLLFAIMLFFIESYSWFGMGCIGCIFLYIFFFQFGLGPMPFFIGAELFELATRPAAMSLGSLAYWLCNFIIGMAFPTMQNLWGALVFLPFSVTCLLIFGLTKRYLPETRGRHPSEVAPLVALGFKSKVMLPKQMSI

SEQ ID NO: 17494 - DNA, 5196 bp, DROSOPHILA
ctttgcgccctccttcgcgggattgctatcgggattggccaatggaatggcccatctttccggattcttagctccccatcttgtggccgctctggtccacactgtaagtttaaatacaagtagtttatgattaaactgatttatttatgtacctcgcagggcagcaaggatgagtggaatgtggtgttgatgacgctgattgtctttaatacgatggccatgttggtatttgcattttgcagcagtacgaacctacaaccttgggatcctcgtagcagaatggagaaaactgcatcaccaagtgctcaggaatcaaatagttagcacttatttgtttaaatgttttaacttttttgtactttcgaagcattttatttgtttactataaatgtagagttaattgtgttaaaataaaaacaaaataaatgtaaatatacaatatacatatcaatttagtttaaaatgataattgaactttcttcaacgcaatcttcaaataaaatttttaaaaaccgcgcctagcacatagtatctttcaatcttatcgatagttttaccgttgtataaagcaagctgacaaatgtttcacaacgaccagttttctacatttcaagtacaaaattacacaaatattcaataattcaaaaatatgtgtgaaagcagacatctattggcagtcaatgtactaaatgctcatattctttacacgccaatcgatagctgtttgatttgacgcatagatttggtttgagtcccggctgagaactgtaagacgaagaaatagctcatttacctactttaatggtgctaaatcgcatatatcacaatgctttaggaaaagtattaatatttctagaaagcgtatgctataactctttgtgctatactatatataggtggaaagacatcgatagtcgcaggggagtatcgatgcatcgatagtgccatcgatgtttctccaccttgctttattaatcatttcaattttttttcaattcggttgcttgacgttcactgacgtgattccgcacacagcacatagtcgaatacgtttcgcaatagaaatatcaaaattctccgtgtggactcaatctggattggatgcaacactaaattaccagtgttttcctcgattttctagcgacgcaaaattctcagtacaacccaaaaaaaaaacggagagtctcttcaacaacaaaatcaagcatcatcgataaaaacaacaagtctcccggaggaagtggctccaaaatatccagtgcaacagcggacgaacttctcggcaggattgagagtgagtagatcggattaaacaaattaaataatcccaaacattgtacatatgtatatacatttatttgtgcgcggggaaaggcggaagtcagagaacttggcttcctggtttttcatttaccttttggcgcttccgccaaaacacttaaacgttcacttaaaaccgcttctggacaaatcaataaaggccaagtgtcggatcggacattaccttggtgttccctacttacacttgaaaaaatttcgtttaacatggtaataaaattaatcaaggctatttattgcacatcacaaagaaagtttatgactttatcagttaattaactacaatacaagggtataaaagtcaattgcttttcaaaatgtctcaatataataaaatttaaaatcatttcatatgcctaacatatacatatacatatatcatctttcaaacctactagtagaaattcgaatttataattaccaagtaaagtgatttattgccttgagtgtacttcaaataaaacattaaatgctagaagtctactttttttcttcctgtgtacgtgtgcgtgggccaagctagactccaagtacacgaaccccaagaatattaatgtttaaactttaaacacttgttaccttgaatgaaacagtgcgctgtatgtattatcattgccgctgctgttgttgctcttttttttgggttgagggaggttcattcaatcgggcacaccaacaccactgcacttgagagcccatttgtgtgtgtgtttgttgttgcctcctttgtgttttctgcatattcactttacatactaaatgtatgcacgaatttcgtcaagtccgccgtgcaaatacattttaattttcgcaatttcatttaaaatatggacgcttaacttaacatctacttgcaattcgatgtgcttcactcgtgtgcgtgtgtgtggcagcacgtacaccagtaaagggccagagttgccatcctaacttcttttttccaagcactttgtcttgctgataaaagcagctgatttttataaataaataagtaaaagttggaagacgcaaaaaattcaatttattgatagtgcgatttgacctaccaaaggcaataaaaatctagaatggagagtaatcattatcttgtgtggaataaacattcacgcaaaacttgcctatgtatggagaactgtaaacaaatattcgcacagccgcgggtaacgaactaggccctcaataaaaataaataacaaaatatattattttcgatacaaacaattcataaaaaatgtcaaacatttgctcttaaactgacgtgcaattattagtgcgcaaatattgtaagcagagtaaaaaagaatgaaattacgtgattaaaatattaatgtcctaaaactgtattataaaaatatgtacacaatcgaacgttacaggcacgttcaacatgatagctaagcccacaaactcctccgatgacaatcatcgcctttggcttattgcgttttgcataaataccgctcttgactttcgtgttatttcacacgtttgcttgtttgtttttagctgatagcggcatttatatacgccataaaatgtttagcggggctagaagtgatacgagttgtgagcctatacatttctaatcggatgtagtactgaattatagactacattatatgtatatagcatacaagtatgtccacttatttggggctcttttcgcttttgcaccaaaagctgagtcactttgttttcaaatttttgtgtgccgcggccacaacgcaaaaaatagacatcactaaacaaaaaaacgttgcgcaaaaagaaaagagaaaatgttcacttatttatataaacaaataggtattagtgttagccactacacctgtataggtgcgatttttgttttgtttatctcgtggtaatgacggaaaaccggtttcgtagaacgaaaacacaactgctccggcttcttgccggttaaatacgatttgtttaaatacagaagagcctgcctaagtcaaacgaagctaaaaaaaaattcattcaattcattcagtagcacagcagaagaatttgtattttcaatattcgttggagtaggctacaagaaatatgtatgtttgagaacctcagaaaaactctgaaactcctgagattaagttgtaattaagcaatttataaatcaatcgaatgccttatatatagacatatttccgtggcacctcagattcaaatgtttaaattgtatttattaatataatatatttctcatagtttgagcttaatcgttgaaatattaagaaatatgagaccaactgttgataagttcgcttttagtaatccaaaatcccttacagccaatatgttgttaaaagtgccatctgtggactggacggatcaaataatttacgtagtggacgacgacgagtcgctgtcagacatcgacgatgagccagatttttccgaatacatgtggatggagaacgaggaggagttcgacaagaacgtaagattaaatctcctatttatgattaacgaattaactaatacatttgctatctgataataggaactgcaacggctggaggaggaagagattatgcaggagtgttttgaagccatgatagaagacgagctggaggagcagatcaacgaatgggagaaggccaagtgagtagtggctatccggttaacattgctgaattaaagctaatttgcaatcgcttatttcaggacggacgagcagaacacggcactttccgcactacccaagagccagtgtgatgttgaaaagtctgttctgaatccgatggctgatgagtttgttccgcgttgtcatgttatagatttccctgcctcataaagccagcccatatctcctgcccgccacagaatcacaaactaccccgaacccgtaccacgtggacctcatacgcgaaaaaccttagataaactgaagacccattgctaagactagactaacagattccgctaatgagattgatattgatattctgaccaagttgagccagatggagcattgggagcagtggctcatgaatatcttatttctagataccaaaatgctggaaaagaaaactaaatataccaacaaactccaaatgctggcgaccgaaatgcaaacgaatcatattaaaaaaaaaaccttataaaaaacaactgaaccactgcaaaaatacaaaaaatatgtttaaaagaaaaaccaacaaagaaacaaaaacacaacttaaactaagaacagacaaataacaaaataacaactatgccacgtacattagagtacattgaaattagagttaaaaccgaattgtttgccgtgaaattcggagccccagaaattccgaacctaaaatgttatcgagaaacgcagacgcaggcgcttgctgaagctagtgaaaactttggtattaacgtacaaaacgaaaacaaatgactttttacaagcaactaaatctaaactacaactaaactatgccaatttccagctaaagcaactgtaagcaacaaacaagactcgattgtgttagaaacaaaccaagaatttgtagccgtcatgtcgttaaattgaaattctattcaaagactttaatcgtagtttaaattgtaattaatttaacgtcccgcccactgtctacactcgatttaagttgatcatctttttttaatctttcaccattgttaactcgttgtacgttctatgcccaagtaacaagaagcgcttgttaaccttccctactgactcgcaatatttgtaatttaccaatataatctagtgaactaaacgaatcgatatactaatgtttaacgcctctttatacaaacatcatgcataaatatgtatatctagtgttaatggaggagacaacagacaacaacaacgctgcaataaca

SEQ ID NO: 17495 - DNA, 723 bp, DROSOPHILA
ttgcttgacgttcactgacgtgattccgcacacagcacatagtcgaatacgtttcgcaatagaaatatcaaaattctccgtgtggactcaatctggattggatgcaacactaaattaccagtgttttcctcgattttctagcgacgcaaaattctcagtacaacccaaaaaaaaaacggagagtctcttcaacaacaaaatcaagcatcatcgataaaaacaacaagtctcccggaggaagtggctccaaaatatccagtgcaacagcggacgaacttctcggcaggattgagaccaatatgttgttaaaagtgccatctgtggactggacggatcaaataatttacgtagtggacgacgacgagtcgctgtcagacatcgacgatgagccagatttttccgaatacatgtggatggagaacgaggaggagttcgacaagaacgaactgcaacggctggaggaggaagagattatgcaggagtgttttgaagccatgatagaagacgagctggaggagcagatcaacgaatgggagaaggccaagacggacgagcagaacacggcactttccgcactacccaagagccagtgtgatgttgaaaagtctgttctgaatccgatggctgatgagtttgttccgcgttgtcatgttatagatttccctgcctcataaagccagcccatatctcctgcccgccacagaatcacaaactaccccgaac

SEQ ID NO: 17496 - protein, 124 aa, DROSOPHILA
MLLKVPSVDWTDQIIYVVDDDESLSDIDDEPDFSEYMWMENEEEFDKNELQRLEEEEIMQECFEAMIEDELEEQINEWEKAKTDEQNTALSALPKSQCDVEKSVLNPMADEFVPRCHVIDFPAS

SEQ ID NO: 17497 - DNA, 3959 bp, DROSOPHILA
tagtattcggcatctatgtccttcattagttcagcgcgtgatttcctgggtggcggcggaggatcctgttcaaagagctcgcgaacacccggcagatccttggcggctccaaagtatttgtagcctcgattgccgggaacttcacggccctccgcatcgaacatcttgggaccatagcgtctatagtgggggccacccaatgaggatatctgattttcccaatgccgtttctcacgcaataacttgttgatttcatcgttcagatcgcgaatccggaattctcccaagccagctataagtggtcgctattagtgtatattgttagggagaaataaataaaccgaaataggtaccattctgtatctgggccaccttcttcgatatgtcgcgtattatctccaggcggaacttctcacatctgggcaaatcgtggcactcggaggccaaatagggccggcgttccttttcaccagattccacttcttttgcggcccgccaacgtgccaaagttgtcctgtcgaaaataagcggatgagtgctggaaatcttatgttatacgtatatccgggttacttacattgccttctctgcattgcgcgcctgaaaatatacatgtattattcatttaattaaaattaataaaattttcacatcatcttaccattttgtttactaacttcttctgccttaattgccagtcacagcgaactatacggaaatcggttacacgttatcgatagcaagtacagtaaatattgtccagtagcgatttcacatatattttaaatgcaatttattaataatattcccgatgaaacccgaagacataatattatttatttgtacttaatatatatataccatatgaattttattttctcttaattggatacatgctgaaataaacgattaccattcactacgaatactactaagtacactaccgcgcacttggccacactgacctgcccagttgttttttcacgacaacatttacgctctttggaaaaggaaaccttttttcgcgaatttcaagcagatcccgaccagaaacacacctgccccaggatgttggccctcatcaacaggatcctcgagtggttcaagagcatcttctggaaagaggagatggaactcacgctagtggggctgcagttctccgggaagacgacgttcgtcaatgttattgcagtgagtattttcgcagtgggtgtgtgcgaattcgtgtgggtgtatgggtgagagggtggttttttttgtgtgtggttgtctgttgtgtgggtggggagggggttcacggaaagccgggggatcagctactacttaaaaagcattacaaacccccagtgacaaaggaattggtcttagcttgattcccccactctaacattgtttatttcttatcttttcgtactcccagtttctttcactgcatccgtaattaacgctgtgctaaccgtttccttttagtggtaaagtttaccgttcctgccgctgtaatcaataaacctacatatagcccatatatacgcatgtttctccgcacaatgacgccattatcagcacttcaacccctgaccccgtattcccgtaccgcctccctggtttttttcacacatttctgcacgctgataatgcgacgatctcaagttaccatttactggaactcgtagatagttgcatacacttgccagtcgttgcgggaggtggagtaactactgcctttgtgaccgcctgacttattatgagtcatgtgaattcgattcaaatgtctgcccgcatctacgggaaatttgtttgttcaagtgctcccgaaacggaaatattcccctgcttatcactgctattagactccaattccgtgtttgcattcagattcgtgcattagtgtaatgttcaggttcggaatgaaaacaaacttgtgggtggcgccaattagtcacttttcccatttcactagcgactgctaacctatagtatacctttttaatttaaactaagtcacagaagtaacatcttgccattttaggagctttcgattctcttattgaatgcatatgtaaggtgattgatgctgatacagaacaaagatttatgggttagaatcaattatcaatttaagtgttgtatgttgaattaaatttagtaccaaaagacattgtttgatcaatactttaagatattacaatagttatttatttaagagcattttcaaaaagaataacaaattttttaaggttttggatgctgtcatgtgtaaaaaatcaattttttacacgagttttacattattttggattgcatacttctaggctttgttctttgctaatataaaagttgtattttatttaagacacgattacttactaattatttttgtttcttgtagtccggccaattcgctgaggacatgatacccacagttggattcaacatgcgcaagatcaccagaggcaatgtgactatcaaggtgtgggacatcggaggccaacctcgattccgatccatgtgggagcgctattgtcgcggcgttaatgcgattgtgtaagcaataatgatacttaagcaacaatcggtagtcaagtaacactgtaatgtattaatcaacagctacatggtggacgcagccgatctggacaaattagaggcctcgaggaacgagctgcactcactgttggacaaaccgcagctcgccggcattccagttctcgtgctgggcaataaacgagatcttccaggcgctctcgatgaaaccggactcatcgaacgaatgtgagcgccttaaaattgttaaaactatttaaaaattataaattaatcatttaaaataaattgcaggaatctatcgagcatacaggaccgtgaaatctgctgttatagtatttcctgcaaggagaaggacaacattgacatcacgctgcagtggttaattcaacattcgaaaagccaaagtcgttagataacgaacaccgacatacacacaactccgtaccctctacactcacacacttaggcactatatctcacacatattttaattttattgtttttgtattcattatatattttacatttcgcttatatgcttcgatgcggattattttcaactggaatttttgcttagcgaaaactggaatgcgaaagcagcggaaaagcataaattataaagacgttttaaactataaatatatattaaaacaatatgaatgtaaattcaattaagcaagtgaaagccatagttaaagaaattccatgattgattgtaaaatatgcaaaaaaaaaattgttgaggttttctagctgcagccaaaaaaccgaattgcgattcttaagccttgtcacgcttttcctatactcattaacattcacctagttaattatgataatttatatgaaacagcaatgcaaattataaactacaataaccaaattttgaaaactgataacgagcaaggcatacaaacaacagcaataaaacgaaaaataaatgaaaaaccaataaagacaaattataaaaacattacaaaaccccaagtgagtctcataaattacaaataactgagattgcggcgattgaaagcatcaaatattccaaacacttgttcgaatgtaatttatagagtcaagacgaccagcattagtcggccacccaaatgcagacgttgcaggctaacaattgatagatgcagacagccctatgaacgcataaatattggaaaacgaggtgccatggcccttggctaattagaaattctgtgtgcagaatcaagtcactgctaccggaggatagccacggaggaggggagcaggtggacaagggctccgacttccaggaatacgcgtcaagcacgagccgtgcgattgagtgagtcatgctcaaatgcttgcatgccccatgtctctgtagcttcctgcttcctttggaagtccgaatacgtagcaatcttcctgccgcacac

SEQ ID NO: 17498 - DNA, 629 bp, DROSOPHILA
ctttggaaaaggaaaccttttttcgcgaatttcaagcagatcccgaccagaaacacacctgccccaggatgttggccctcatcaacaggatcctcgagtggttcaagagcatcttctggaaagaggagatggaactcacgctagtggggctgcagttctccgggaagacgacgttcgtcaatgttattgcatccggccaattcgctgaggacatgatacccacagttggattcaacatgcgcaagatcaccagaggcaatgtgactatcaaggtgtgggacatcggaggccaacctcgattccgatccatgtgggagcgctattgtcgcggcgttaatgcgattgtctacatggtggacgcagccgatctggacaaattagaggcctcgaggaacgagctgcactcactgttggacaaaccgcagctcgccggcattccagttctcgtgctgggcaataaacgagatcttccaggcgctctcgatgaaaccggactcatcgaacgaatgaatctatcgagcatacaggaccgtgaaatctgctgttatagtatttcctgcaaggagaaggacaacattgacatcacgctgcagtggttaattcaacattcgaaaagccaaagtcgttag

SEQ ID NO: 17499 - protein, 186 aa, DROSOPHILA
MLALINRILEWFKSIFWKEEMELTLVGLQFSGKTTFVNVIASGQFAEDMIPTVGFNMRKITRGNVTIKVWDIGGQPRFRSMWERYCRGVNAIVYMVDAADLDKLEASRNELHSLLDKPQLAGIPVLVLGNKRDLPGALDETGLIERMNLSSIQDREICCYSISCKEKDNIDITLQWLIQHSKSQSR

SEQ ID NO: 17500 - DNA, 7347 bp, DROSOPHILA
taagcgagtttgttggaccttattttcggatgattaaccgccccaagtcaaaatgcacatatgcatgatattgagttctctatgtgatatcttttgatttatttagtccgtatattgtgaaattataaaatatttgcgttcggttaagtttgcgttgaatactactgattaagattcaattggatcaagtattttgaatgtagttaagttaactccatggttatttattatgtggaggttagagggcgtgcttaaccgccaaatccgtaaagggtgcgtccctggcgcttgagggcatagaccacgtccatggcggtcacggtcttgcgcttggcgtgctcggtgtaggtgacagcgtcacggataacgttctcaaggaatacctgtgaattttccgagaaattaatcagtttttcaccactttcccttcgtttcgccagaacgtacctttagcacaccgcgagtttcctcgtaaatcaagccagagatacgcttaacaccgccgcgacgagccaaacggcgaatagcaggcttggtgataccctggatgttatcacgaagcaccttacgatgacgcttggcgcccccctttcccaatcctttgcctccctttccacgaccagtcatttctcagttgcttcgtaaagttggctgaaaagaagagaagacgcaataaactgtaaagcgacgccatgtttggtgaaaggtaaacgttcatttgacaggtgaaaactgttgttaataagtctgttttcatacaaaataatggtctccaattattttttttatgtttatgcacaaaaaaactttgttgaccgattcttctattatttacttaaatttctcagcaacaaaactcacttcaagaaatctccagaaaattgcttgtgagcgtgaccagatctcgcacacctcaaaatacctttcgcaaaatgcgcgtatctagtatttctattgtctcactaccagccctggtcagttatcgcctatcggccatcgctatcgccgccccgttgcgacaaaaaagatttaatcgaaccgaaagacgtgctcgcactaaaatcgcttgaaaacaggcccgcagacctgcgaaaaacgaaaaagtgcagcgcgcatatactttttcaactgtgcccctctagcttaaaattaagtcgcggcgaaaagtcgagtaaaacccgcggaaatgcgcatgcaaacggcgtgtggccagcaaaatcgctgccaaggcaccgcacacacactcggccacccacacatacacacttagtgctgtactcgaaaagtgcgaagacaacaggaactctgtgccaaaataatattaacagtacccagttattccattccactgcacctgtccccgaaacatcgaaatattcgcgttacgtatacgcaacgagtgctgtaaacaagtttgcacaggcgataacaatgtccaaatacgatctgctttatctaacggcgcagctaacgctgggtatgtattgcactgcgagtgtgtgggtgcatacttattggcgccttaattcccagtcgctttattatgtacatatgtacataatattatattttgtctctgccttacgattttcctctgtaatgcaagccgacttcgatttataaccattcgtgcgtgtgatttttgatgatatggggtgcgtaatgctattactttattaatatcacatggcgcttgaaaagttcatatatagggtgtataggctttgtgatagctttgtcctattaaccaacacatcagaacatcttaaattttcagaaattaggtataacgaatgtaaatgctaggaatcaaatctatttgtgaagtgaataatgtatacactagatactctattaaagcaccaacaattgtactacacaaatgtagtaaaatatcgtaagaattgttgacagtgggtactacgaattcatatgttgagcgccaaacgcatactcggtataaatcgatcggatacctaattcccaatcttaatccatgtgtgtgtgcgctgagcatttctttgaatggattttgctgcattaggaacttgttgtatggcaggttctggtttctcccacccttttgctccaccggcctccctctctttcgctcgccatagccctctctctttctgtggcgcagtgcgctctcttccctgttgctgctgttgttgttgttgtttctgctgctgctgtttcctttttccgcacaagcgccactttaaacccatccctttctgtgtgcataatgtgcctgcttatgtatctactttactataaagcatgcacgcttacgaacacacacatacatggccagcgatccgattacctaaaggacagtgggacgaaaagtgtttcaaaggattgaaaacagtttgcttagccaatggtcaagaaatatcaatcaatatatcgcaggctcgttgcaataaacgttttcaaaattaaattttttgtatttacacatttaaaaagtgaattatcattttaatttttatcaacaaaaatttcggtatttggatgaggatcccagattaaatcgaattaaagaatgtaaatagattttcaagaaaccttactgcaggcccactgtgcactgcatatccgtgcattggggccatgcccactcaaaggctggtgtgtggccagtggggctaattccgtgcccaaatggggtggctttcaatggcagaggccccagcttaggacgctactcctgctacttctgggcatgcgatatgtgtacaaaggatagcgcccacaaagagctcgctgagcgccctccctttcagtcttattccccaaataggctcgactttatttgcccaccctttgagcacttccaaccgataattccattaactttgatctttaactacgttttaactttttgaaagtctttactcatgttttaggactgctcaaatatatactttaaatatagatcagtgctaatctaaaactagaaagattattaatctattttcccattgtcttcatttagtctgctgtctgattggaatccatggatctattttgcccggaagtcatgggatcatagaatgcgagcacttcgacgagaagatgtgcaacacaacgcagcaatgtgaaacacggatagagcactgtaagatggaggcggataagtttcccagctgctatgtcctttggtcggtcaacgagacaacgggtgagccgtgcagaagttgacgttgtttcaggcatactgattaattttaatttttccgttcccataggcatcctgcgcatcaagatgaagggctgcttcacggacatgcacgaatgcaatcagacggagtgcgtgaccagtgcagagccacggcagggaaacattcacttctgctgctgcaagggatcgcggtgcaattccaaccagaaatatattaaaagcaccacggaggcaaccacacaaggtgggttcggatccggtttcggattcagattcggtttaacgtttgctgctactggggttttgtctttggagtgtttaccccaattttgttatttttccgtttgcatatattttttgtttgtttttgttatttcgttttttttttttttttttgtatttttactgcatcttcaagttgcaaaaagagggcgtaggcttcgcctacaaaataccactcctcgcatccgaggcagcgtttttcgtgttaacgaactcttgacgcgaagtggcgcccgctcccccatcattttctacatccccagcctccagcaaccccttttcggagccgcatgtgttgcaatttctgccctcctgtgcacgttcgctggttcgtttttatttttatagtaaggtacttctttagcgatcgggtataatgcgttcgctttaaaggatgcaactgaaagaggtagttatttggtataaatccaatttatttcactccgattatgaaggcttaataggattagactctacctattttgaatgatacttaattggcttgcagccttaacccacaacgaggagagtatctgttatctaataccaggtatacaagtgtcgagtgacttcattctagcatcctttcttgtttttatttttggggtgttgctgctgcctttgacttcgaagccctgtgctgccagggcgtcttttgtgccctgctctttgttgttttgttcttgggcctagctcgcttttatctcgaaacaaaatgaggggaaaaagagatgcgaaattgggggcgaactttcgttttttagttttcgttttgcctttcatagcaaccccagcagctgcaggtgcatgccgccactcgagatgttgttcacctgtggcaaggcagcgtttaaagccctctttaatgttcgttcccgtgtgtgtccttgtatcgttgcagtgcccaaggagaagacgcaggacggcagcaatttgatatacatctacattggcacctccgttttcagcgtgctcatggtcattgttggcatgggccttcttctctaccgacgccgcaagcaggcgcactttaacgagatacccacggtacgtacatatccttgtgatgttgccgcaaatatataattttaattatgcaaaattaaaccctttagcacgaggctgagataacaaactcatcgccattgctcagcaaccgtcccattcagctgctggaacagaaggccagtggtagattcggtgatgtgtggcaagccaagctcaacaatcaggatgtggccgtcaagatctttcgcatgcaggaaaaagaatcgtggaccacggagcacgatatctacaagctgccgcgcatgcgccatccgaacatcctcgaattcctgggcgttgagaagcacatggacaagccggaatattggctgatatccacctaccagcataacggatcactatgcgactacctcaaatcgcacacgatctcatggccagagttgtgccgcatcgctgagtccatggccaatggactggcacatctgcacgaggagatcccggcatcaaagaccgatgggctaaaaccatcgatagctcaccgagacttcaagtctaagaacgtactgcttaagagcgatctgacggcctgtatagctgactttggtttggccatgatattccagccaggcaagccctgcggcgatacacacggtcaagtaggcactcgacgttacatggccccagaggtgcttgagggtgccatcaatttcaatagagacgctttcttacgcatagacgtctacgcatgcggcctagtcctctgggaaatggtgtcacggtgtgactttgccggacccgtcggtgagttccagctgccttttgaggccgagctgggcctgaggccgtcgctggacgaagttcaggagagtgtggtaatgaagaagctgcgccctcgtttgctcaactcctggcgcgcccatccggtgagtgtgacttctgataatgcttttagtcaatgaaaataacttgtaacttttttacagggacttaatgtattctgcgacacaatggaggagtgctgggatcacgacgctgaggctcgtcttagctcttcgtgtgtgatggaacgctttgcgcagctaaacaagtatccctcaacccagttgctaatcaagaaccacaccaacattgacgacgccaaggaatctacgaattgcttatagaagcggtactaagccacagaccagccagcggatctgtggctctgcaaaaaaatcagttgaagctttttgcttcgtagtggatagttgatcgtcgaggtcgtaagacgtttcgtttttagtttaatagtttgtagtaccattataagcagctatagaatgggttgatttatacgaaagaagtcgtgtaagatgtaacttttcctaagggaaaagccaaaagcttaacatgccaacgattctttgttattattttctttaaattataaatcgactcattcgatgttaacccgagttcttaaatctgttggaaatgagtggaaacgtacactaagcaactttgaacaaagagcattagctatgtccagagacgtggtagttgctaatccgacattgacttcattgactgataaccatatatagttctatataaatcatacatataacgtacaatttgttttgccctctggcagtagcctgtgtgcatatgtaaactgttgaaaattatcgtcaagccttttaaagtataattttatttgtacgttatcgaatgtcttcatatagtagtagttttatatttaaagttattttcaaaatagatttaacaattttagtttactttttagttgtaacgtttttatttcgcgctcaaacgtgcatgcgttttaatgttgtattttaaataaaaatactttaaactccatcctaaccatctgattttttattattttgtctgttttatatttctgcttttgatttttatttttttatttccaaaacgtagtgccaatgaccctcagaaatcgcgtaagcataataaatgtgtaattatgtaattgtattctaattctactggacagtacaagcaacacctgaagttttcaaaggaaagtttctttttaacaagaatctaacttaagcgcatatacataaattataaaatataaactatactctttatatatacacacaacacatacacgcataggcatacggaacacacgcagtctagcaggtttatatgaagcacacgctgcgactcatcgtcagcataaaatctaaacaaaaaaaaaatcaaagttaatattcaacccaagaggtatgcacacactgtaagaaattagagctaaacacaatgagtaagtatgttaaacattgttaaacggatagtatgtcttataatgttagccaaacaaggtgtatgtcgagctatagttatttaagctatagtttaattaagagagtcttggcggaatgtattatctttcgggttatttgaaacttttttgcgcagcatcagttcttatcaatggctaagcatctgaaatacttctggattatcagttaagatatcaactaaacacgatacacaacacagaacaaaacgaaacaaacaaagcttcattacctgatttttttgagcaacttacaacaaaaatagtttattacgcaaacaaacaaaaaccaaacgacataatcttaataatagaacgaattttgttatgctgtatttaatttgtatattttccattggtgctgaaacatcattacgacgaacataatgataatgaagataataagaaacgaattcaaaaacaaccagtatttaaagagcgaaggaataaacaattaatatttaatcatagtagtttgttacatatcagattgctaaatgggatagaggaagataatataaatcgatcattt

SEQ ID NO: 17501 - DNA, 2686 bp, DROSOPHILA
tatcgccgccccgttgcgacaaaaaagatttaatcgaaccgaaagacgtgctcgcactaaaatcgcttgaaaacaggcccgcagacctgcgaaaaacgaaaaagtgcagcgcgcatatactttttcaactgtgcccctctagcttaaaattaagtcgcggcgaaaagtcgagtaaaacccgcggaaatgcgcatgcaaacggcgtgtggccagcaaaatcgctgccaaggcaccgcacacacactcggccacccacacatacacacttagtgctgtactcgaaaagtgcgaagacaacaggaactctgtgccaaaataatattaacagtacccagttattccattccactgcacctgtccccgaaacatcgaaatattcgcgttacgtatacgcaacgagtgctgtaaacaagtttgcacaggcgataacaatgtccaaatacgatctgctttatctaacggcgcagctaacgctggtctgctgtctgattggaatccatggatctattttgcccggaagtcatgggatcatagaatgcgagcacttcgacgagaagatgtgcaacacaacgcagcaatgtgaaacacggatagagcactgtaagatggaggcggataagtttcccagctgctatgtcctttggtcggtcaacgagacaacgggcatcctgcgcatcaagatgaagggctgcttcacggacatgcacgaatgcaatcagacggagtgcgtgaccagtgcagagccacggcagggaaacattcacttctgctgctgcaagggatcgcggtgcaattccaaccagaaatatattaaaagcaccacggaggcaaccacacaagtgcccaaggagaagacgcaggacggcagcaatttgatatacatctacattggcacctccgttttcagcgtgctcatggtcattgttggcatgggccttcttctctaccgacgccgcaagcaggcgcactttaacgagatacccacgcacgaggctgagataacaaactcatcgccattgctcagcaaccgtcccattcagctgctggaacagaaggccagtggtagattcggtgatgtgtggcaagccaagctcaacaatcaggatgtggccgtcaagatctttcgcatgcaggaaaaagaatcgtggaccacggagcacgatatctacaagctgccgcgcatgcgccatccgaacatcctcgaattcctgggcgttgagaagcacatggacaagccggaatattggctgatatccacctaccagcataacggatcactatgcgactacctcaaatcgcacacgatctcatggccagagttgtgccgcatcgctgagtccatggccaatggactggcacatctgcacgaggagatcccggcatcaaagaccgatgggctaaaaccatcgatagctcaccgagacttcaagtctaagaacgtactgcttaagagcgatctgacggcctgtatagctgactttggtttggccatgatattccagccaggcaagccctgcggcgatacacacggtcaagtaggcactcgacgttacatggccccagaggtgcttgagggtgccatcaatttcaatagagacgctttcttacgcatagacgtctacgcatgcggcctagtcctctgggaaatggtgtcacggtgtgactttgccggacccgtcggtgagttccagctgccttttgaggccgagctgggcctgaggccgtcgctggacgaagttcaggagagtgtggtaatgaagaagctgcgccctcgtttgctcaactcctggcgcgcccatccgggacttaatgtattctgcgacacaatggaggagtgctgggatcacgacgctgaggctcgtcttagctcttcgtgtgtgatggaacgctttgcgcagctaaacaagtatccctcaacccagttgctaatcaagaaccacaccaacattgacgacgccaaggaatctacgaattgcttatagaagcggtactaagccacagaccagccagcggatctgtggctctgcaaaaaaatcagttgaagctttttgcttcgtagtggatagttgatcgtcgaggtcgtaagacgtttcgtttttagtttaatagtttgtagtaccattataagcagctatagaatgggttgatttatacgaaagaagtcgtgtaagatgtaacttttcctaagggaaaagccaaaagcttaacatgccaacgattctttgttattattttctttaaattataaatcgactcattcgatgttaacccgagttcttaaatctgttggaaatgagtggaaacgtacactaagcaactttgaacaaagagcattagctatgtccagagacgtggtagttgctaatccgacattgacttcattgactgataaccatatatagttctatataaatcatacatataacgtacaatttgttttgccctctggcagtagcctgtgtgcatatgtaaactgttgaaaattatcgtcaagccttttaaagtataattttatttgtacgttatcgaatgtcttcatatagtagtagttttatatttaaagttattttcaaaatagatttaacaattttagtttactttttagttgtaacgtttttatttcgcgctcaaacgtgcatgcgttttaatgttgtattttaaataaaaatactttaaactccatcct

SEQ ID NO: 17502 - protein, 516 aa, DROSOPHILA
MSKYDLLYLTAQLTLVCCLIGIHGSILPGSHGIIECEHFDEKMCNTTQQCETRIEHCKMEADKFPSCYVLWSVNETTGILRIKMKGCFTDMHECNQTECVTSAEPRQGNIHFCCCKGSRCNSNQKYIKSTTEATTQVPKEKTQDGSNLIYIYIGTSVFSVLMVIVGMGLLLYRRRKQAHFNEIPTHEAEITNSSPLLSNRPIQLLEQKASGRFGDVWQAKLNNQDVAVKIFRMQEKESWTTEHDIYKLPRMRHPNILEFLGVEKHMDKPEYWLISTYQHNGSLCDYLKSHTISWPELCRIAESMANGLAHLHEEIPASKTDGLKPSIAHRDFKSKNVLLKSDLTACIADFGLAMIFQPGKPCGDTHGQVGTRRYMAPEVLEGAINFNRDAFLRIDVYACGLVLWEMVSRCDFAGPVGEFQLPFEAELGLRPSLDEVQESVVMKKLRPRLLNSWRAHPGLNVFCDTMEECWDHDAEARLSSSCVMERFAQLNKYPSTQLLIKNHTNIDDAKESTNCL

SEQ ID NO: 17503 - DNA, 9330 bp, DROSOPHILA
ctgccatttgtggagcacttgctcatgaaaatggaaagtatatggtctgcgcgaaagaaaaagaaattgcggcccactgggatgttaatgctaacatgcatgcctaaacataaaaattataaccacatacctgccacagtatgtgcttttgattgagacttggacatggacatggacttggacttggacttggacatggacacgcagttggagttggagctgtactccactgcactccactccatcccaaacccgcaacctgcaactcgcacttgtacctgttaggtctggtgtgaataacctggccaatggataatggataatggctggtgcgtgctgcgattgttcgggtaattagttgccacgccaagcaatttgcgaggaggaaagtaactcttgttggttgtcactttgttgcggcattattgaaggcttaaccccattagctgaattgacgcacttgccaatcggcgcgcagatcgaagaaaccgactgagaagaaaccggtagacaagggccagaagaagaagccaaactttctgcgaagaacagccagcgaaacttttacccagcgccagaaaataataatataaaaaaacagaagagaagaaaagacctcatcaaatgccaaagaaaacagactcgaacaatgtaaactcattcacgagtctgggatggtgttgctccggagaagagagaagagcacctgcatctcgggggcaggtcccgcacttttagtaccactatgggatttagacccattcagtcgatgcagagaaagaaaaggggggtcacatgcatatataattgttttgtgaaactaaagttaggtaaagtataaacacatctattacaatttagatttttacaatatatattgaaaatgaattcttacaaataaatttcctactcaactaacttaactggcttaggacacatttttttccagacattctaccatgcgatctcagtgctccaatttcgcgccgtgcatggggggatggggggcaaaccagtttcccctacagagcggctccagcgcagagagttggcccaaaagcgaagcccagtgagctcggctttcgggcagcttcagttgagttgcggcgctccgacggatcggacttggcggaagtgaaaagagctggcccattcagaccggattccagtgactagcgttcagtttgggagaagcgaatctccggcgggcggagaacgcaacgcgaaggctgcgaattgttaccgctgcgcatgcgcagacaggcgtacttgtttttgttgcggcttaattaccacgccccccgcccatcgagcggcccgttttagtggtttgtctgcatttttccgcggtggccagtgtgtgtgcgagtgtgcaagtgtgtgccagaggccatctctctgggaaaacattcttcccgagcggagctttctttttgtgtataacaaaagagaactgggcaaaaacaaacgtaaacacggcatcgccaacttgtgcaatatccaaacccaaacccaaaccagcgacaaaaacaaaagaccgccaagttgccaagttcccaggccacaaaaagtttgaagtgcaatttacaagcagcgcccaaaacagaaacggaaaatgtaagccaagagtataaatcaaaaatataatgaaacaggttacgcgaggagaaaaaccgagatgtctgtgattagcatatttcccatcaagcgtttacacgcaacgcaacgcgaactgaacctgtatctgtatctcttacagatgtatctcgatctgcatcggtgtctgtggaacaagaagtgaatccactctactccactccgatcccatcccatcccatcccagttcgaacccattccgtgtggcaaggcaaccttgaagatctgtccaccacatcgaatcggtttggatcggatgggatcgaattgaatcgcacattgcccatgcatttcaatgagcaaaacagcgatttcggggagatttgggttttgaaagcccgctttatggtctctataaatttacatacgttaactggcttgtttgtcagcggatagccgtgtatttggccaacagactggccaaataccttccatgatttgcccatggaccgcagagtaaatagcacaaataacgctgaaaaacgcagagccgaaagtaatgcaaattgaaatacggccagacgtaaaagtatttatttttttttttttgtattgtcagtgcgcattaaaaagcaaacagtaaccaatgaacacggccaacaaccaccagcaaccgccgaccgtactagcaataacggtacagctaatgctgcgagagtgagaaccaagaatccaggtcccaagtgccgagaatccaaagatcatggctcaccgaaccgctcttgcgcttcaaaggcgttttgtataggaactttacagtcgaacttcagcaagtgattatgcattcagttgtggtttttatgaagtgatgtactgatgggttgatcttatttaatatcgtaaataatttatcatatataagacaaaaggcaggagataaatcttttccacagatactcattcactcgtaaattgtatttatcaaagaacatttatcaaagaactttgagatacaaattccttgcggttggattatgatcaacaagtagaatttcattatcttctagattttagattttggtagctgagatgtgttcgcttatagaaaggctctactgtctgctctagtaattaacgcttacttatcaagcataaactggaatttcgctgatggcctaaaagaaatatattcatgaattgaattgaatgagcgtagtaatgtttcatagagttacttttagcagatacatggcatatagacagcaaaacacattagattcacaccttcgatgtttagaatgacgaataagacaacaacaaatgcctctaatttgtccaagttcaccaaaattactcataccactcgtgggcaatcgtggctctttgttggccagatcgcttggattatagccttcgttctttcgatcggaccttgggtattggaccattgttgttgggcgcaagtatgcggcttgtatcgaaatagccagagatgccggagatcggtatgcaaatcaaatgttctaagccaacgcggcgataatggccaaatgaccaaatacgatgcggaatagagatctcctctcgaaacgagtttctatcagcgcggccaaatccgttcgggccagaaacccagtaataatagtgtcattcctcaattgcagcgacatggaagcgtggaaacagctgccaaacggagggcgtttcctgctgcttctcctggcctgcatcgcccacctgggccacccaatcctcgcctggcgcccctgtccggagctcagtcccgccctccgtctgccatgcaggtgagtttcatagcacttagaccacagtatgccattcactcagtggtcaccatagcaaaagcgacagcgaatttccgccgtcggtcgggcattattttaatatcactaaattaccgccaactgcaatttcatttggctttgtttttctgcaatcacctgccacggcctgacgacaattacaggtgcaatgtggttccgtttgcggcgactggccaactgggagccgtggccatggactgcgatcgcgttgtcttccacggcgatgccccgcaactgccttatggagcgcccatcgtggcgtatacacaacgtcacagcggccaacaggtgctgcccgcccaggtgagtgtcgcaatcgaatggagataagctgtgaagctgtgaagagatcggggatttcgacactcttcgatgatttcacaggcacaataaatgcccccaaatggaggtcaattagatcttatttcttaccgatttgactcatatgtatatgctgtcgaaatgttacttttccattcgtttaagatcatatttctataatttaaccaataagcaatacttaatccctccaatcgcagacttttggtcaactcaaactgaccattgaggagctggatctgtcctacaatctcatccgaaggataccggagaaggcattcgatggcctcaaggattcgctgaacgaactgcgactggcgaacaatttgttgggcgacaatctgaatcccatcttctccaccgccgaactgcatgtgctgaagaacctgcgtctcctggatttgtccggaaacaagatcaagctgatcgaggagggtcttctcaaggggtgtatggatctgaaggagttctacatcgatcgcaatagcctgacatcggtgcccaccaactctctgaatggcccaagtgccctgagacacctgtcgctgcgccagaaccagattggtaagactgattagccaattaaatgcatggttaacagcggggcgtgcaatcaaagccgcaactcgaaaatttgaaagtgaaatcagtaatcttgatcgcagagaaagcaattacctggcaccttgaatttgcataaacaattaattcttagcctataacttcaccaatcaaagcgggaatttaaagtagtacaatcgtaaaatcttttctcaggatcactccttgcggactcattcaatgcccagcggcagctggagattatcgatcttcgccacaatgtcatccgcagcatcgacagtctggccttcaagggactgcagaagattcgggagatcaagctggccgggaatcggatcagtcacctcaacagcgacgtcttcgagaagctgcagtctctgcaaaaactggatctgtccgagaacttcttcggtcagtttcccacggtggcactggccgcggttcccggattgaagcaccttaatctgtcctcgaatatgctacaggtatgtttttatgaaaacagccgccgactgataagagcaattattaacgtatatcttccttcagcaattggactacacccacatgcaggtggtaaggagcttggaaagcttggacatcagtcgcaacaccataaccaccattacaccaggaactttccgggagatgggtgctctgaagtatctggacctcagcttaaactccttgagaacggtatgcccatattgattaaaccaagtccaagttttacatttaaacctaaatcaaaatccttgaacagatcgaagacgacgccttggagggattggacagcctgcagaccctcatcatcaaggacaacaatattctgttggttcccggcagtgctctgggtcgcctgccccaactgacatccctccagttggactacaatcgagttgctgctctttccgcggagatccttggatcgctccaggcgggcgatataacaacgctatccctgtcgaggaatgtcattcgggaactaccgcccggcagcttccagatgttcagcagcctgcacaccttggatctgtctggaaattccttagctgtgatcaatgcggacacctttgccggactggagagcactttgatggccctgaaactgtcgcagaacagactgacgggtctaggaggagctccctgggtgcttccagagctgagaagtctggacctaagtggcaatacgctgacggaattgcccagtaccatatttgaggagctggagaacgtgcagtccctcaacctgagtggcaatcacctgactcctctgactggagctctcttcaagcccttggatcgcctgcaggtcatcgatctgagtgggtgcaacattcggcagataagtggtgacctcctggccggcttgcaggatctcaagcatatttacctcaatgacaaccagctgcaggagctccaagatggcagttttgtgaacctgtggaacattagctccattgatctatccaacaaccgcattggatccattcgatccggagcctttgtgaatgtgatgaagctccagaagctggatctccatggtaatcagctgtccgcctttaagggcgagtacttcaatacgggcacgggaatagaggagctggacatttcggataaccagctaagctatctatttccctcctccttccgaatccatccgagacttagggaaattcgagcagccaataacaagttttccttcttcccggcggaactaatttccaccctgcaatacctggagcacatcgacttgtcccacaatcagttgaagacaatcgaggaactcgactttgcccgcttgccacgcctgcgcgtcctactagtggccaacaatcaactggacatggtcagcgaaatggccttccacaattccacccaactgcagatcctggatctggcccacaacaacttggatcgcattggggagcgaacttttgagggcttggttcgattggagcagctcaacctggagggcaaccgcctgtcggagctgtcggatggagttttcgagcgcacgaagctccagatgctggagaacatcaacctggcccacaatcgctttgagtacgctccattgaatgccttgcaaagacagttcttctttgtatcctccgtggacttgagccataacaagatcaaggagctgccaggagatgacagcatcatggtgaacatcaagaggattgacctttcctttaatcctttaagttccaaggcagtccataatgtactcaacgaacccaagacagttagagagctcagtctggcgggcacgggcattgagaacctggaactcctggagacacccttcctacagttcctgaatctctcccacaacaagctgaagaatgtcaagccagaggtgttccaaagggtgacacttttggaaacgcttgacctctccagcaatcagttggagtccctggaagatctttccatggcttggccccaacttcaggtgctccaatccctagacgtgtccaacaacagctttgagatcgtctcacagtccaactttggcaagctggagatgctgcgatcgctgcgcttgagccacctgccccagtgcacgaggatcgagaagaacgccttcaagcagctgcccaatctggtcagcttggaggcctatgatcttccactgcttggctacctagatctccagggaatcctggaactcctgcccggcttggaggtcctcgatatcgaagtaaaggactctagcatcggtagcgagcagatacaaccgctgaagcatccacgactcaagagcctgggaatcagaggtgatcgactgaagtccatatcctctggcacgctggctggtctgaagagcaacgatctgagcgtccagctgcggaatacttccctaaatgccctgcccccagctttgctcttccccgtgccgagatcgtcccatttgagcctgaatgtcgagggatccaagatcaccgtgctggtgccacagtttttaaacgctctagaagatcgcagggccagtctgcagctccaaggattggccagcaatccgatagtgtgtgattgcaatgctcgagctctgcgaagatggttgcccagttccggtatgccggatgtcacctgtgcctcgcctgcctacctgctcaaccggaaactcattgaagtgggggatgatgagttgacctgtgatgcccgaaggatgacttcgtccacttccagacccactgcatcagtgccacacctactgaagacttccagccaattggtgaccaggagcagttccaccaccgaggagccactgatcatctggagcctggagcctactcagccgcccagtctgaagaagatgaagaccaaggcaccgctgatgaaggcccagtcgccgattataagcaacgatgataccctaatcataggcatcgtgggaggagtggtggccttcatagccatactcatcatcatcatctgcatcataaggctgcgcatgagcaatgcggagtaccagcagaacgcgacaatgattggcatcccggcgggcatgcaaatgggagcccacaatgcggcgtacaactacaagaatggcgcgggagcagccctgtacgcggtgcctccctaccacgccaccttgccccacaaggcggcctccatccaccagtccagccagaatctctcccagcgccagcagcagcagcaacagcagcagcaggtggctgcagcagcggctgcctactcgaccatgtcccgcatgtcgtactttagcggagcgggcggcggaaacggcgatggagccgagagcctgacgcaccagcatccgcaccagcaccagccctacatcatatactcggatgacaaggcctacagataagccggccagccagccggccgatcgaggggctcttcatctttcccactcctccattctgtccatttcaatcttagtcagtcagtcaggcgcatcgccgcaaacaggttctacattatatcgccgctctcagccacgttgtatatagccttaaagcattctaaccgtaaccctaactgtatctatgtctaaccataattaagtgcaaccaagtcgcttatgcggaataaacaaatctagtataattcatatttcaagtgtttttgacggcgggcgggaaaactccaacttatttactcagccgtcttttaggtatgcctgccacaagctatagactaccaactaacccacaaagtgtaccttgtaaacaacaattgtttaagctctttaacttcctagcccaaaaacattcgttctatgttgttgtttcttccgggatctttatcaaacgtacacagaaaagcaattcattactttatcttgatttaaattgactaaaccataaagttttgccgattttgttaagagtttctccaaaaatatctttggacaacaagccctttatctttactaggcaccagaaaaattcaaacatcatacaagtctttgatttgagcgattttaatacaataaatttatcattcatgataatttcataaaaatgtatatgtgtataaatatgttatgtataatatgtatgcaacttcaagatcgctattcacagtctttgtattccatatctttcactgaataacaacaaaaccagttattactccatttaaatgctatcgagcttgtgtttttcaatttcaaatgcacaaacttaaactaacaaaactaatcaatacaaactgactttgtgtgaaatgcacggcttaactaagtagtaaccacgaataacaacaactgtcgcctgagactccaatgacttccaaaatcaatatagaaaacaccaagaaaggcaaatcactttggcaactagagagcgggcaaggctcttaattcagatttaagtagggccttcaactgcatggcatgggtaagcctcctaagccatttgagagtacgaggaatacagcttgtagttgcgacgtcggtagtagatcatgaggccatagctggcgaaca

SEQ ID NO: 17504 - DNA, 4172 bp, DROSOPHILA
atggggggcaaaccagtttcccctacagagcggctccagcgcagagagttggcccaaaagcgaagcccacgacaaaaacaaaagaccgccaagttgccaagttcccaggccacaaaaagtttgaagtgcaatttacaagcagcgcccaaaacagaaacggaaaatacttttggtcaactcaaactgaccattgaggagctggatctgtcctacaatctcatccgaaggataccggagaaggcattcgatggcctcaaggattcgctgaacgaactgcgactggcgaacaatttgttgggcgacaatctgaatcccatcttctccaccgccgaactgcatgtgctgaagaacctgcgtctcctggatttgtccggaaacaagatcaagctgatcgaggagggtcttctcaaggggtgtatggatctgaaggagttctacatcgatcgcaatagcctgacatcggtgcccaccaactctctgaatggcccaagtgccctgagacacctgtcgctgcgccagaaccagattggatcactccttgcggactcattcaatgcccagcggcagctggagattatcgatcttcgccacaatgtcatccgcagcatcgacagtctggccttcaagggactgcagaagattcgggagatcaagctggccgggaatcggatcagtcacctcaacagcgacgtcttcgagaagctgcagtctctgcaaaaactggatctgtccgagaacttcttcggtcagtttcccacggtggcactggccgcggttcccggattgaagcaccttaatctgtcctcgaatatgctacagcaattggactacacccacatgcaggtggtaaggagcttggaaagcttggacatcagtcgcaacaccataaccaccattacaccaggaactttccgggagatgggtgctctgaagtatctggacctcagcttaaactccttgagaacgatcgaagacgacgccttggagggattggacagcctgcagaccctcatcatcaaggacaacaatattctgttggttcccggcagtgctctgggtcgcctgccccaactgacatccctccagttggactacaatcgagttgctgctctttccgcggagatccttggatcgctccaggcgggcgatataacaacgctatccctgtcgaggaatgtcattcgggaactaccgcccggcagcttccagatgttcagcagcctgcacaccttggatctgtctggaaattccttagctgtgatcaatgcggacacctttgccggactggagagcactttgatggccctgaaactgtcgcagaacagactgacgggtctaggaggagctccctgggtgcttccagagctgagaagtctggacctaagtggcaatacgctgacggaattgcccagtaccatatttgaggagctggagaacgtgcagtccctcaacctgagtggcaatcacctgactcctctgactggagctctcttcaagcccttggatcgcctgcaggtcatcgatctgagtgggtgcaacattcggcagataagtggtgacctcctggccggcttgcaggatctcaagcatatttacctcaatgacaaccagctgcaggagctccaagatggcagttttgtgaacctgtggaacattagctccattgatctatccaacaaccgcattggatccattcgatccggagcctttgtgaatgtgatgaagctccagaagctggatctccatggtaatcagctgtccgcctttaagggcgagtacttcaatacgggcacgggaatagaggagctggacatttcggataaccagctaagctatctatttccctcctccttccgaatccatccgagacttagggaaattcgagcagccaataacaagttttccttcttcccggcggaactaatttccaccctgcaatacctggagcacatcgacttgtcccacaatcagttgaagacaatcgaggaactcgactttgcccgcttgccacgcctgcgcgtcctactagtggccaacaatcaactggacatggtcagcgaaatggccttccacaattccacccaactgcagatcctggatctggcccacaacaacttggatcgcattggggagcgaacttttgagggcttggttcgattggagcagctcaacctggagggcaaccgcctgtcggagctgtcggatggagttttcgagcgcacgaagctccagatgctggagaacatcaacctggcccacaatcgctttgagtacgctccattgaatgccttgcaaagacagttcttctttgtatcctccgtggacttgagccataacaagatcaaggagctgccaggagatgacagcatcatggtgaacatcaagaggattgacctttcctttaatcctttaagttccaaggcagtccataatgtactcaacgaacccaagacagttagagagctcagtctggcgggcacgggcattgagaacctggaactcctggagacacccttcctacagttcctgaatctctcccacaacaagctgaagaatgtcaagccagaggtgttccaaagggtgacacttttggaaacgcttgacctctccagcaatcagttggagtccctggaagatctttccatggcttggccccaacttcaggtgctccaatccctagacgtgtccaacaacagctttgagatcgtctcacagtccaactttggcaagctggagatgctgcgatcgctgcgcttgagccacctgccccagtgcacgaggatcgagaagaacgccttcaagcagctgcccaatctggtcagcttggaggcctatgatcttccactgcttggctacctagatctccagggaatcctggaactcctgcccggcttggaggtcctcgatatcgaagtaaaggactctagcatcggtagcgagcagatacaaccgctgaagcatccacgactcaagagcctgggaatcagaggtgatcgactgaagtccatatcctctggcacgctggctggtctgaagagcaacgatctgagcgtccagctgcggaatacttccctaaatgccctgcccccagctttgctcttccccgtgccgagatcgtcccatttgagcctgaatgtcgagggatccaagatcaccgtgctggtgccacagtttttaaacgctctagaagatcgcagggccagtctgcagctccaaggattggccagcaatccgatagtgtgtgattgcaatgctcgagctctgcgaagatggttgcccagttccggtatgccggatgtcacctgtgcctcgcctgcctacctgctcaaccggaaactcattgaagtgggggatgatgagttgacctgtgatgcccgaaggatgacttcgtccacttccagacccactgcatcagtgccacacctactgaagacttccagccaattggtgaccaggagcagttccaccaccgaggagccactgatcatctggagcctggagcctactcagccgcccagtctgaagaagatgaagaccaaggcaccgctgatgaaggcccagtcgccgattataagcaacgatgataccctaatcataggcatcgtgggaggagtggtggccttcatagccatactcatcatcatcatctgcatcataaggctgcgcatgagcaatgcggagtaccagcagaacgcgacaatgattggcatcccggcgggcatgcaaatgggagcccacaatgcggcgtacaactacaagaatggcgcgggagcagccctgtacgcggtgcctccctaccacgccaccttgccccacaaggcggcctccatccaccagtccagccagaatctctcccagcgccagcagcagcagcaacagcagcagcaggtggctgcagcagcggctgcctactcgaccatgtcccgcatgtcgtactttagcggagcgggcggcggaaacggcgatggagccgagagcctgacgcaccagcatccgcaccagcaccagccctacatcatatactcggatgacaaggcctacagataagccggccagccagccggccgatcgaggggctcttcatctttcccactcctccattctgtccatttcaatcttagtcagtcagtcaggcgcatcgccgcaaacaggttctacattatatcgccgct

SEQ ID NO: 17505 - protein, 1348 aa, DROSOPHILA
MGGKPVSPTERLQRRELAQKRSPRQKQKTAKLPSSQATKSLKCNLQAAPKTETENTFGQLKLTIEELDLSYNLIRRIPEKAFDGLKDSLNELRLANNLLGDNLNPIFSTAELHVLKNLRLLDLSGNKIKLIEEGLLKGCMDLKEFYIDRNSLTSVPTNSLNGPSALRHLSLRQNQIGSLLADSFNAQRQLEIIDLRHNVIRSIDSLAFKGLQKIREIKLAGNRISHLNSDVFEKLQSLQKLDLSENFFGQFPTVALAAVPGLKHLNLSSNMLQQLDYTHMQVVRSLESLDISRNTITTITPGTFREMGALKYLDLSLNSLRTIEDDALEGLDSLQTLIIKDNNILLVPGSALGRLPQLTSLQLDYNRVAALSAEILGSLQAGDITTLSLSRNVIRELPPGSFQMFSSLHTLDLSGNSLAVINADTFAGLESTLMALKLSQNRLTGLGGAPWVLPELRSLDLSGNTLTELPSTIFEELENVQSLNLSGNHLTPLTGALFKPLDRLQVIDLSGCNIRQISGDLLAGLQDLKHIYLNDNQLQELQDGSFVNLWNISSIDLSNNRIGSIRSGAFVNVMKLQKLDLHGNQLSAFKGEYFNTGTGIEELDISDNQLSYLFPSSFRIHPRLREIRAANNKFSFFPAELISTLQYLEHIDLSHNQLKTIEELDFARLPRLRVLLVANNQLDMVSEMAFHNSTQLQILDLAHNNLDRIGERTFEGLVRLEQLNLEGNRLSELSDGVFERTKLQMLENINLAHNRFEYAPLNALQRQFFFVSSVDLSHNKIKELPGDDSIMVNIKRIDLSFNPLSSKAVHNVLNEPKTVRELSLAGTGIENLELLETPFLQFLNLSHNKLKNVKPEVFQRVTLLETLDLSSNQLESLEDLSMAWPQLQVLQSLDVSNNSFEIVSQSNFGKLEMLRSLRLSHLPQCTRIEKNAFKQLPNLVSLEAYDLPLLGYLDLQGILELLPGLEVLDIEVKDSSIGSEQIQPLKHPRLKSLGIRGDRLKSISSGTLAGLKSNDLSVQLRNTSLNALPPALLFPVPRSSHLSLNVEGSKITVLVPQFLNALEDRRASLQLQGLASNPIVCDCNARALRRWLPSSGMPDVTCASPAYLLNRKLIEVGDDELTCDARRMTSSTSRPTASVPHLLKTSSQLVTRSSSTTEEPLIIWSLEPTQPPSLKKMKTKAPLMKAQSPIISNDDTLIIGIVGGVVAFIAILIIIICIIRLRMSNAEYQQNATMIGIPAGMQMGAHNAAYNYKNGAGAALYAVPPYHATLPHKAASIHQSSQNLSQRQQQQQQQQQVAAAAAAYSTMSRMSYFSGAGGGNGDGAESLTHQHPHQHQPYIIYSDDKAYR

SEQ ID NO: 17506 - DNA, 5983 bp, DROSOPHILA
atgtggccgctctgttgactatgctgtccgccagtctctccaggtcgtccaggctctgctcgttgattttccgctcgaagtcggccataaactcattggtcatacgctcagctaggggctccgaatagtgcttgcggaatccccgcaggatgctgtcccttaaacagggctttatcaccaccagattgagtttggtgccctccttgatgttgggatatgacgcaattgtctgttcattgttaagcggtcgccccaacagcagtagcttttgatttgtagccgatatctgcagttccgcctcgatctggtgtttcacctccagaatcgtcgatgtcggcgccacctgtgtgaaatattaccatattagcgacctcacttgattttggcaaggttcattcttacctcgatggtgcagtccttgcccttcagcaccttgattgttatctgcatagcaattgccgtaaaatttattaaaaaattaaaagtcaaactcgagaagtcgagcgatataaacaatctgtctttggcgttgccacctgtattgccaccaagtgtcattaggccaagcggccctggtttgtaaaacaagtgccgcaatatttgctaatatataatttacaaaaatatttccttatattaatatatagtacatatatatgattcttgtaaattgccaaatgttatttaaaattattaatattttaatgcagctagcacaaattatgtacaagctatcgaaaaccactcgaagttattattttacaaaattaaagaataatgtgagatcaacaattaaataacagtttgtaaacattcggtttattataattaataatgatctttaagtctttcgcatttggcaataagacagtagaggagagtaaggtataaagatagtaaatataaataagtaaatagcataagcaaaagctcgttttagcttttaaacggagtcggtaaaatcttcctaaaagtaactatcgagggtcggctgggtcaggcaacgccgccgcacgcctgcagccctggtaactctattttctattgagcaccgacaacgttgcgtgtataagacagtttacataaattattatttacaattgcacagagcgttgatgttgtgcgttctaagcgaaaaggtgaacttgaccccggtgccgatagaccgccgagctattgggtgtgaaattcgcgagcgagccttgtggaattcgcacgcgaaaatcgaagcgaatcgcagcgatcgaagaaattgcagcgcaaataattcgtgtagcctcgacgactgaattttaacgcgagagcggggtgtgcgtgtgtgtgtgtgcgctgtgctgtgattctgtgtgcgtgtgcaagcgtttttgttagaattcgcattttacgcaaagaactagcttttatcagcagtgaacttgatgttggcgaacctatatcgcagcagggccaaattgaacaagttcttgcagcttctggcggtaaattggcgaaataagacccattaaaaacccccctctgaaaatataacccacaaattaacctcgccccttgacattcaaagttatatttgtttccccacttatatatgtgcacatatatatatataaatatatatatatttaataataattgtgtgtttgagtcttggaagtgcaactacaactattaatcgtgcctagtacacattttacttttacgctctcgactgtctccgtctctctccctctctgtttcaccccttccttgcaacaacaaaacttatgagtacttgctgggtgccccaacaatacttgtgttgatgattgcccatccttgcacctccaaaaagaaatgaaaaaaaaatttgaaaaacaccaacaccacccaaaagcgctcttccttccccatttctattggcatgtctggcaaccctggcaattggtcgacggccattgcttctcaacttgttgctcgtctcgcttgctctcctctctctctctactctcttttcaagtacgctctctctgcgccagtgttttggcatttttgttacttattttcgtttcgagtatagttttatgcgaaatgaacaatgccaaacaatgaaacgcctgaagacctgcataaagtgttgatgctaacatttaaatgggaatccgaaattccacatcaccgacaacacctgtccacttggaagttacagcactaatcggaggaacgctgcatgaacgtgttttcggtaccgtttagaaccggattttctatgctagagaatgagaatatgatcgcggttctgtggggacatcttgtgacaacttaggaactccgatacgaagcggttttccgccattaaggcatttccaattggaaagcgcgcagcgagagattcttaaaggttgctccgtttcccattggtaatgtgttgtttacagttatggttaagttaatagcagcgtgtttatgtaatatatagataattcgagttatgcacgttccactgtacagtgatcaaagggaaaagaaacagtattggaatttccatgaagttgcataacaaatgaggaatagtagtgatgagaagattcgtggtagatttcagtaaacccttaatttacgttgagcgcccctcgaatgcgaatgttaatgcgtgtgtgtgtgtgtgtgtgtctgcttgagtgtgttgttttgtggcttaattgcacggtgtgttgtgatgctattgttatttttcctttagttattgctacgttaatttttttctttcgaccctccacagtgcaaatataattttcagatagcaatcaactgagagcggtccagcccggcctgttgtatttgtttgtttgtccggttgtttacgtttttttctctcgttctcgctgcttttcatacgtattttatattttgtaaaaataaaaaatcgttataaaaaaccaaaaacacacatagaggagagcacatccaaagagccaaaaagagtcagaaccgattgcgtattatggataacgaggcgttagatccaacaataaaaagcagtacgtcggcagcgacgccaacagcagcagcatcagaaacgacaacaacagcagcatcttcagttgtggaaaccacaacaacaatcgcggcggccacagcctcagcggcagaatcaaaaaacgaaacaacggccacaaacaacaatagcaacacaagcggcagcatcagcagtagtagcagcaacaatatagtcataccggcatcggccactaacggtatcaaagagagtaacagtaacttaagtacaacaacaacagcagcagcagtagcggcagcaacaactgtagaaggagtagctccagcaataacgtccacaatcgtggtgaccggcggcactcctccattgagcagtttggtgagtagctctcccccaaaacactagccctccccaccacactccctcactcactctctttctcttgctgtctttaagccacagtctctctctgtttctgttacgatctctccctgtctttcacttgtcgccctatttgcatgcctaccgttattttggcgtaacgtaaacctcactcgtaatgcttacacgcacactgtgcatttgtgtgtgtgcctaagccttatcttatctaatcagtgctaatgatgtgtgttattgtatcgctgcttcaccttaccccgcacgattcaagttagattgaccaacaccaattagattcacaatgttgccaattgttaaatgagtgtatgtcgttcggataacaaatcgaatcgtaattgtatcgcaagtgcttgacaaaccgatattcactttcccccttttcctcatctccaatttgaccaattcgttagtccttagagagataaacttattagattttaatttttttaattttaaaaaatgattttttaattaatttcataagtttttttatacgaaatatgatgcatttaattatttctttaaatagaggaaatactctttatttaacaaacgatataaatagcatttaatgaccttgtaagtggtaacagtaatctagcaatctttattgcttttcaattttggtttacaaatcgttatcgtttcaattatattaccttgggttctactttctgataagacttttgcgattgaatgaatagattgccctaaatcctagattttatacgatttcccgaaagttttgtgtcaacaaaagacggagttgattatacaaatctttatactcacatgcctgttattaactagaagaacttttaatgaaaattttttacatttttgtctctccaacgacaaaaatattgaacatttgcaataaaacataaagtataaggcgagcactttgctttttgaaactgccaaaaaattgcccaatgaaatgctttaaaaaatacataaatgttagtgcctggaaaatatatacatatatgccaccacctgattccctggtagatgccagcaatataatcctatacgtgtatggagagcctacggaactccagcttcctgatcccagagcacatttcaatgttcggcattactaaactcagactaaaacacacccacaggcagctcaacttaggcgtcaaggattcgcacagtccaaggtaaaagcgatggccggccaaaatggcagcgagggaccatcccgaactgaactgctttgctctgattttgcaagtgctacgttttgagtatgctttttatttgaccgcatattgctttgcattcgttgttaaaattattttcatttactaagcataagccaaaccgttgacatgggaaaagataatcagataagtgtcatttatgcccctttgcaggctaacaaactcaaggacaacacaccaccgtacgatgcaccgccgcccacgccgatcagcaaggtcctgaacatcaccggcaccccgatcgttcgcaaggagaagcgccagaccagcgcccggtacaatgcctccaagaactgcgaactgacggccctcattccgctaaacgagagtgagtagccttggagtagatcctactacttagtatattactttataatacatgtactgccagctgttcagatcgatatctcttaagcctgcagatcggttgcatggggtagaacttggtcgtagccatgtcgtagcatacattttagggcagggttccgtttaggcgatataaaattacctttcttactgtctaccaacatcgtcaattaagtttttatgcaactatacactcaaaacagattgtataaatcgtagtaattcccattaacgatgcataattacatatattatgtcaattaactccggtaaatttccatgattataagttcagctttaacttacaagaggcattctctgtaaagtgtacctacgacctgcaagcttgttgggaatattgattggccggcgcttgattaatttcgctcagctgttgtaatttgtttattatttgttaaagttaaaggtcaagggagtgtcgtctgattaggtgggtggcaacactgacgcacggccactcacacatgtgaaccaagcagccgcatcaattcacacctctctccacctctctcactcaccggaatttcaacacatgcgctctctccgcagcctctcattacactgggagaaagcatcgttagaggatttctcagaccgtcttaaatttcatatatacaccggcatttctttatgacacaaatgtattcgattgatttaaacttgtgtatacaaataattagaaaaactgtatcctgcagggaattaatttaaaaaaaagcaaattcaatatttttgaaaatcatatatgtacatatctgcgcgtaatgattatgaaattgctacactttttttttctgtgcagcatgaatgtcatcgcattgcgttattcacatacctttctgctaattgcttgggcggtttcgactcacaaatcgaataaacaaatttcgcttgttcaatactattttattttattaggttttattgttattgtggctcgctcgcccac

SEQ ID NO: 17507 - DNA, 764 bp, DROSOPHILA
gcaacgccgccgcacgcctgcagccctggtaactctattttctattgagcaccgacaacgttgcgtgtataagacagtttacataaattattatttacaattgcacagagcgttgatgttgtgcgttctaagcgaaaagaggagagcacatccaaagagccaaaaagagtcagaaccgattgcgtattatggataacgaggcgttagatccaacaataaaaagcagtacgtcggcagcgacgccaacagcagcagcatcagaaacgacaacaacagcagcatcttcagttgtggaaaccacaacaacaatcgcggcggccacagcctcagcggcagaatcaaaaaacgaaacaacggccacaaacaacaatagcaacacaagcggcagcatcagcagtagtagcagcaacaatatagtcataccggcatcggccactaacggtatcaaagagagtaacagtaacttaagtacaacaacaacagcagcagcagtagcggcagcaacaactgtagaaggagtagctccagcaataacgtccacaatcgtggtgaccggcggcactcctccattgagcagtttggctaacaaactcaaggacaacacaccaccgtacgatgcaccgccgcccacgccgatcagcaaggtcctgaacatcaccggcaccccgatcgttcgcaaggagaagcgccagaccagcgcccggtacaatgcctccaagaactgcgaactgacggccctcattccgctaaacgagagtgagtag

SEQ ID NO: 17508 - protein, 191 aa, DROSOPHILA
MDNEALDPTIKSSTSAATPTAAASETTTTAASSVVETTTTIAAATASAAESKNETTATNNNSNTSGSISSSSSNNIVIPASATNGIKESNSNLSTTTTAAAVAAATTVEGVAPAITSTIVVTGGTPPLSSLANKLKDNTPPYDAPPPTPISKVLNITGTPIVRKEKRQTSARYNASKNCELTALIPLNESE

SEQ ID NO: 17509 - DNA, 5093 bp, DROSOPHILA
tggccgtttgtctgtttgccatatattttggcggagggccaagcaaaagcagcccatctaattgatgccctcgtgtgagattttatatatttgtctatggattgagttggtatatacccaataagggggatctgtcttcaatggacgacgtgttgatggagagttttgtgatgaatttcacaagtggatttcttcaatggacgagtattgctgttatatgtttactgagtttctccagtgttaagatatgaattatatgaatttgcatctcattttgagcctataagtaagtattcaagtgcgcatttttcccccaatgaatgtactttttccctgatccactgcaaaacaaacgaccatccttgacatttaccataccatgcaacggccaggaatttcattatccaatcataaaataattaagcctaatatacgtatgcaaatcaacaatgatgtaatgcagccgctccaaatgctgattagataaaatctactgttggaactgtgttttttccaaactctaaggaatccaggtaaccctgggtaacaggtgtaatggcgaaaaactacacacacaattatatcattctgggttatattgtacctgaactcttcgaaacattccggtgggcttgtcctgtttggatttgcaatagttccggatgaatttggggctcccgaggagcaggcacttgttaaggagcatttcacattactttcgcttcgaatgttgcccgcttttcggcgccagataatcgattttctttgctatgcgagtagtaagcggcagtggttttcgacttgacgactttcactttgggacacttttcacccagaactaggatattaacgcctgggcgctggtgtcccttatgcgaccttaacatgcacgcgatgaactcccaactgaaaggagtgtcacggtctaacagggctgaccacccttcgttgggaataactctcccgttttggtgtgccaaaaagctcctaacgaaagctcttattcttggctccaaattttgcaggcgagttcaatggctagttgctgaaggttattaactctaatttccccattgactagaacatattttacaaaatctcaccttaatgacggctgcattctcctccgttttgaccccatccacctccaatcgatttctcatcgccgacgcacccttgctttcttgatagtctatatctccggcctgcaaacgtttcatctccgccgaattgctagtggcctgctcggaactgaagccatcggtgaccaccttggtcttggactcggtcttcatgctcttctcctggaacttaatcgtgtcgattgtcttactcgacccgctcagcccactagcactcagctgggcggcggtgggatgggtaaggttgaggccgctgccaaaatggttatgcgggcagtcgtcgtcatccggcagggtcacgatcacattgctgtcatcgtggtccaccaggttctcgaacgaggcgcgaattctgtcgagagaaaatatttgagaaatgggttaacacagctgaagaaaaacaacagacgcttctgaggtcagggaatgtccaattaacgtcttaatgtgataaagatatttgaatatctaaggtatttcgaagaatactatgcggggatctagtaaattcataactattcattttcggtgtaattctcaagttcggaaccagtttttaatttataagatacacttggttcgcatatgaaataagttccagttaccaactgacaacatcataagaattttcccagcatgtgtcactatcaccgttgattgactatctaatagatagacagaactgaagtttttttttttttttttggcgactagtcattatttaattgtgcaaaattccgactcccccgaggcccacataatgatcacttactttttttgcagctgggtgattttgtcctgcctactgagacccctgagatcgtcgattgacggatgggcggatgtgagtttgggtgccagccggctcgtcgtcgtctgggacatcgtgctgggtgctgtgatcgccgaggctgaggtggtgctaatggatccaggtccgccggtgatccgctccttggccagatcgttgatttccgacatggacttctggatgtttgtgagatctcgcttgatttccgccgccttcatctctgatgaggtggacagagcctgggtggttgaagagctggaggatgaggaggttatgtggtggtgcaaacgctgagacttcttctccacccgcgtcgttgtgctgctgctgctgttgacaacctgcagtgcaaaacaacagacggatacaattatagaaagttgagttattttctggctaagattcataggcgaaaaaatgcgaggaatttgtggcgtacagagacatattttcccctcagctctgtgcaaatataatatagatattcgtatatgtatttttgtgaatatgctttaacgtctggcgctatctcccactcgcattttatgggcccggacgcttaacttggtctttataaatcaaatgagccatttgttttgggatcgacgtacaatatttgcctttcatggagcttacccctaaaaaatagatggatgggcctcactatctaaattcctcaattgtgataactaaccaaatgctttatggcgcatgaaaagaaatatatttgaatagggatttgccttgaaaaaggttcggcaagcattacttcattgatcagttcttagattggttatgaaaagccattgaccctaggtcagtaaacatggcgatgctctcatcaagacttaattagttagacatcacttcttaatattatgtattattagtttttaatatatattgattttattcaccaactttgacactcataactttctaggaaaaacccaaggtaggcgattttctatttatggttttgtttgctgaaaaggcgcagctcgaaacgttttgacaaatcttcgcgtattatgaatcaaatctaattttggccatgtttctggcgtctgccatcaagaattgagcgaagaagaagccccaacagtcaaacaagttgaacatttgaacgttgatatatacaagtgtgtgggctgcgatcggttttataaggcgttcttctggttgggcaataaaacatgtgcacacacataaatcgagagcgatttgaattggcgttacgcatacgacatgttggccaaagcgaacagcaaacatttcgcaccccagttgctcactactttccggctgacataaacttatcggtaaggtaacacattcaagtacccccctgatcaataaatatttttcccttacaagtgcgaagggtgaaggagttttgcttggacatgaaatcaaaagattagatatcacttgcgtttctcttttccgccgatttctgcgtcatttactaaattatcacaatgatgttttgttcgagaatcggtcggactaaccttcgtagatcgctggatcagagttggcaacttctttgaaaactccgtcgattttaattgaatttcatattacgtatacgcctccgttttgataaagcacttaactcggacatatacatacatataaacgtatgcgagcgtttatatgactgaagaatcagattgggatgagaggcttatcagacacagacacacacacaggctgtagaaaatatgtacaagtatattttcatatagactttactttctgccctccgcaattttcaacttgcaggacttttacttttttcactcactgactttttcacttttcgttggtattctctttactactttcgttgttcgttgtgtgattgggttttatttatttgtgcaatactgataacaaagagagttcgtttaattgttcgttaatgggcaaaaaaaaaacccacgattctttgctcattgatttcgtttcggtactcgcataggagaaaattattataaatttgatttgtattatatctttttttttcgacggcacacacgctagcaaaaaagaactacagcaaaattatttccgcctcggctgagtgtttttgctatagtatttcttggatttcttagcgcgccgctggttcgttcgtttcgttaactaaaataaaaatgagcgccgagcacgaaatttctagctccacaggcacgggcagcgtgggagcttggcagctcgagagctttttcattgcggtcgcgtcgctgccggcgtcgttttaaagtgcgatcgacgaaatgcactgagcgaaaaagtctgtatgcgccaatacttggatataaaatagaggtcctttttacatatgcctttagtgagcattaagccataaaaatgatcaaatgacttataaatcgttcgaaaaaataaagctctttaataaaattggtaccaattaattataaaaattataaaaaatatattacaatgtaatatgctatgcgaatttcaaacaaagttcgcaaatttgtgtaccgtgtaaaaagagagacagtgagtgaggaacagagacaactgagcagctaaatggcaacacatggtttagctttttagcgtatgagtttttgcggcagaggaattctaggaaatcaaattgtaaatacaagtctgggcggctctcccccagcttttttttttttgttgtgttgtgttcgtgtgtgtttattttcgccgtgtttcccttcgcttaatctttaatttatgccgtgaataatttgcatttccataattcaggctgccaagtcgggttcgattcgcgtttatgtacggatgcctaagcttttcaagcttaagcttctctaattaacgagttctcggcttgcggtcgatttgtagttcgttctttcggattttctgacttgagatactttgagattgtatctcgttctactcatttcaatttgcgatgtttacttttctgattaccacgggacgttttattgggagagcgagctaatgagctttgttttgcttttatttagtatctgaataattgggtgctaatatatgcataattattccgcaaatttgcttagcctttataatattttaattattattgagactgttgggcttgtctaataaaaataaatggg

SEQ ID NO: 17510 - DNA, 1348 bp, DROSOPHILA
aacgaaccagcggcgcgctaagaaatccaagaaatactatagcaaaaacactcagccgaggcggaaataattttgctgtagttcttttttgctagcgtgtgtgccgtcgaaaaaaaaagatataatacaaatcaaatttataataattttctcctatgcgagtaccgaaacgaaatcaatgagcaaagaatcgtgggttttttttttgcccattaacgaacaattaaacgaactctctttgttatcagtattgcacaaataaataaaacccaatcacacaacgaacaacgaaagtagtaaagagaataccaacgaaaagtgaaaaagtcacctgtgtgtgtgtctgtgtctgataagcctctcatcccaatctgattcttcagtcatataaacgctcgcatacgtttatatgtatgtatatgtccgagttaagtgctttatcaaaacggaggcgtatacgtaatatgaaattcaattaaaatcgacggagttttcaaagaagttgccaactctgatccagcgatctacgaaggttgtcaacagcagcagcagcacaacgacgcgggtggagaagaagtctcagcgtttgcaccaccacataacctcctcatcctccagctcttcaaccacccaggctctgtccacctcatcagagatgaaggcggcggaaatcaagcgagatctcacaaacatccagaagtccatgtcggaaatcaacgatctggccaaggagcggatcaccggcggacctggatccattagcaccacctcagcctcggcgatcacagcacccagcacgatgtcccagacgacgacgagccggctggcacccaaactcacatccgcccatccgtcaatcgacgatctcaggggtctcagtaggcaggacaaaatcacccagctgcaaaaaaaaattcgcgcctcgttcgagaacctggtggaccacgatgacagcaatgtgatcgtgaccctgccggatgacgacgactgcccgcataaccattttggcagcggcctcaaccttacccatcccaccgccgcccagctgagtgctagtgggctgagcgggtcgagtaagacaatcgacacgattaagttccaggagaagagcatgaagaccgagtccaagaccaaggtggtcaccgatggcttcagttccgagcaggccactagcaattcggcggagatgaaacgtttgcaggccggagatatagactatcaagaaagcaagggtgcgtcggcgatgagaaatcgattggaggtggatggggtcaaaacggaggagaatgcagccgtcattaagcaactagccattgaactcgcctgcaaaatttggagccaagaataa

SEQ ID NO: 17511 - protein, 230 aa, DROSOPHILA
MKAAEIKRDLTNIQKSMSEINDLAKERITGGPGSISTTSASAITAPSTMSQTTTSRLAPKLTSAHPSIDDLRGLSRQDKITQLQKKIRASFENLVDHDDSNVIVTLPDDDDCPHNHFGSGLNLTHPTAAQLSASGLSGSSKTIDTIKFQEKSMKTESKTKVVTDGFSSEQATSNSAEMKRLQAGDIDYQESKGASAMRNRLEVDGVKTEENAAVIKQLAIELACKIWSQE

SEQ ID NO: 17512 - DNA, 3604 bp, DROSOPHILA
aactacttgattaataataaagacaataaacgaaaaatctataaggatcaggtgaaacggaaatataaatatcaaaatgaagattgtgaaacctaacatttctgtactcctattatttacatatgtattacttaatgaaataatttcaaccacatacttgaaacttacgctgggggagtcatgtatacccttacataccctcttattagattaagttatgttagaatacacatggcgctaagctttttgtctgagcttagctttatttttagtcagtagacaagaagacctcgatctgtacacatcattgaataaaccctcaatttgttaagcgaaacctttcgttttgttttaacccctctttaatcgacaaagaagtcgatgggtgcttaactgaggagttcaaccttcaacctacagacgacaacgaagtcgtttctggaggcaacgatcttttggacacaacggtctctgctcggaaggccctatcaaccttccacataactatattagaaataaatatgaatcatgcactaaaaaagatattaacataatattataattacctgtagactgcaaaaaaaatatgcaagatttttaggggtcacgtattaaaaagcaataaaccataaattgctttagggtaaattgagtactgaaagttttaatttatttaatcggcgttatcagaaagaaagcaaagctcgtggcgataagccggccgcgcgtctaaataccataacaaataatatctcgagctaatatttgcttatatgtatgtttaggaaactatttaaattttatgctttctgatttcagctaacatcggtggagttggttcgcacatatatcgaacgtatcgaagcagttaataagcatttgaatgctctgatcgaatctcgttttacggctgctctggaggaggccactgaaactgatgacctcatagccagttgccaaactgcagccgaggtggagaagctcttcgaagaacgtccattgctgggactgcccgtgaccatcaaagaatcatgtgccctcgagggtatgacctttgcagtgggcagtctgtccagaaagaatataaaagccgaagccgatggcgaagcagtaaagcgcttgaaattagctggagccattcctctcctggtttcggccactccggaatattgctttagcattgagacggacaccttattgaatggaagatgcctgaatccctacgattctgaacggacatccggcggaagttctggtggcgaggtaagatggccgtttttaaggtttctaattaattatataattagcgattttaaatatatttccagggttctttgaatggagcaggcgcctctctattcggcattggctcagatattggaggttctattcgcattcccagcttgtattgcggcatcttcggtcacaagccaagtggaggagtggtctccgtcaaaggacactttcccaactcattagatccgaatatcggacactatcttgtggagggacctataacccgattcgcagaggatctgtccgagttacttcaagtaatggcgggcaaggaaaattcatccaaacttcgattgaatgaacccgtccaactgaatcagattaaagtacaatatgctctggctttcgaaggtatcaatggatggatgcatatggcggtggataaggacatcacaggtgctatttgcaaagccacaactcatttgaagaccctcggcttgaacgtgaagaaagtgaaactacccaatctcgagaattcagttgaaatggctttatctgggatcgccggacaggatttaatggattatctattgacggatgaaaacccagagggttcaggcaaagtgcgtgagactgtctgggagattgttaaaagtgtacgaggtcactcgaaatacacaaccaacgccctgatctttgaacttatgcgacgcacaggggcctttatgtcgcaatcgaagattaatcaatatatgaaggaaacacgcgaattgatcggggagttcgaggtaagtggtctactatttaacacgcaaaccttgctattcttatataaaacaagagtttttcattgccgaattcgcggcttaaaccggtaataataactttaattacatcgacaataatcttcataatcgtttttatattcacattgacctttgtagccagccgctacaaagtggtatatagtcgttagacaattttaagttataaatccatttctttgttaacacacccttgctaattgcttacatacattgtaataatttgtaatataattcttgtttccctgtttagaatttacttggagataacggagtgcttctgtttcccactttgaatttacctgctccgagacacaagtggtccatcctatcactctggggcgtggactataccctgatgtttaatgttcttggactgcccgtgacccatgtgccaatgggtctaaatgaacggggacttcccattgggctttctgtgattggggcgccaaatcaggatcggttgtgcctccgagtggccgtggagttagagagagccttcgggggatggaagccacccgtgccgcacgacctggatgactagctgtagttttttttttttttgtgtagccttttatttattatttaaaatctgtcctagtggacaataattaaattttttggagggaaacattaacttaaggggagtacatcaagtgtacttgggtaggggttaagtatgattaagtatgttgagtaaggtcaagcgggtgcgttctctgcaggcgtcttagggattggctgtggtctagaaggttgacggccaggtggttgtggtggttctccagtctgctagcatatctcacgctgtgtctgtagatttcgtcgtctacccatggaatcccgagctcctcgtggatggcggaattttcgtggtagggatgggcgttggagactattctcaaacatctgttttgaaatcgctggatcttccttctatgtgatgtgcaagcagtgccccacagctgaattccggtacggtccagattggcttgagaatagtcttgtagacgagaatctttagtttctcacgcagcttggactttttaccgatgagccagtggagttgctttaggcgtatgttggcctggatacgcttactgttgatgtgggggccccaagtcagccttctgtctagggtcagccctaaatatttgggggtgctggaggtagggattgtgagaccggggggcattctcctctgcgcagagagaaggtggtgtgggaggatttatcagcgttgatcatgatgttccagcgtttcagccatggatccagtgcatccagttgcctctggatgatggctgatgctaattgaggtagcgagagggtatgatagggaggtctgctgtaaacagggtgtagaggatgggaccaaggacgctgccttgaggtactccggctcgtataggccttgtcgtgcttgttgaggaaccgcatcgcacttggaactctcttccttcagtatacgatttgagtagggcatagtgggaactgggaaggtgggacttgagtttgtagaggagtccaggatgccacactct

SEQ ID NO: 17513 - DNA, 1563 bp, DROSOPHILA
atggcgctaagctttttgtctgagcttagctttatttttaaagtcgatgggtgcttaactgaggagttcaaccttcaacctacagacgacaacgaagtcgtttctggaggcaacgatcttttggacacaacgctaacatcggtggagttggttcgcacatatatcgaacgtatcgaagcagttaataagcatttgaatgctctgatcgaatctcgttttacggctgctctggaggaggccactgaaactgatgacctcatagccagttgccaaactgcagccgaggtggagaagctcttcgaagaacgtccattgctgggactgcccgtgaccatcaaagaatcatgtgccctcgagggtatgacctttgcagtgggcagtctgtccagaaagaatataaaagccgaagccgatggcgaagcagtaaagcgcttgaaattagctggagccattcctctcctggtttcggccactccggaatattgctttagcattgagacggacaccttattgaatggaagatgcctgaatccctacgattctgaacggacatccggcggaagttctggtggcgagggttctttgaatggagcaggcgcctctctattcggcattggctcagatattggaggttctattcgcattcccagcttgtattgcggcatcttcggtcacaagccaagtggaggagtggtctccgtcaaaggacactttcccaactcattagatccgaatatcggacactatcttgtggagggacctataacccgattcgcagaggatctgtccgagttacttcaagtaatggcgggcaaggaaaattcatccaaacttcgattgaatgaacccgtccaactgaatcagattaaagtacaatatgctctggctttcgaaggtatcaatggatggatgcatatggcggtggataaggacatcacaggtgctatttgcaaagccacaactcatttgaagaccctcggcttgaacgtgaagaaagtgaaactacccaatctcgagaattcagttgaaatggctttatctgggatcgccggacaggatttaatggattatctattgacggatgaaaacccagagggttcaggcaaagtgcgtgagactgtctgggagattgttaaaagtgtacgaggtcactcgaaatacacaaccaacgccctgatctttgaacttatgcgacgcacaggggcctttatgtcgcaatcgaagattaatcaatatatgaaggaaacacgcgaattgatcggggagttcgagaatttacttggagataacggagtgcttctgtttcccactttgaatttacctgctccgagacacaagtggtccatcctatcactctggggcgtggactataccctgatgtttaatgttcttggactgcccgtgacccatgtgccaatgggtctaaatgaacggggacttcccattgggctttctgtgattggggcgccaaatcaggatcggttgtgcctccgagtggccgtggagttagagagagccttcgggggatggaagccacccgtgccgcacgacctggatgactag

SEQ ID NO: 17514 - protein, 520 aa, DROSOPHILA
MALSFLSELSFIFKVDGCLTEEFNLQPTDDNEVVSGGNDLLDTTLTSVELVRTYIERIEAVNKHLNALIESRFTAALEEATETDDLIASCQTAAEVEKLFEERPLLGLPVTIKESCALEGMTFAVGSLSRKNIKAEADGEAVKRLKLAGAIPLLVSATPEYCFSIETDTLLNGRCLNPYDSERTSGGSSGGEGSLNGAGASLFGIGSDIGGSIRIPSLYCGIFGHKPSGGVVSVKGHFPNSLDPNIGHYLVEGPITRFAEDLSELLQVMAGKENSSKLRLNEPVQLNQIKVQYALAFEGINGWMHMAVDKDITGAICKATTHLKTLGLNVKKVKLPNLENSVEMALSGIAGQDLMDYLLTDENPEGSGKVRETVWEIVKSVRGHSKYTTNALIFELMRRTGAFMSQSKINQYMKETRELIGEFENLLGDNGVLLFPTLNLPAPRHKWSILSLWGVDYTLMFNVLGLPVTHVPMGLNERGLPIGLSVIGAPNQDRLCLRVAVELERAFGGWKPPVPHDLDD

SEQ ID NO: 17515 - DNA, 3567 bp, DROSOPHILA
actacttaaccagttgcttataatgtgaactatagtttctgaaatctcagtcttagccattttcgctggtttgatttagttatgttcatgttaaaagcactattattttagtttcatttgcttagttaatacacattacggcctgtataaaaaattatgaaacactttgcaaataagtgcctaaatttttatctattttaaaactataaaaccatctgttttagattttatttattaatttaaaagctatgtaaggtaaatacttcatatggctttcttacttttccaccagctggctggatttattaaaataatatttggttcagtaaaataatttatagaattttaagatattagctgcctaataatttgtcataatgtaagcaagtggcatacgtgattatattatgtattgtagttcgaatgctcgacttgaagtaggcagctacgaagaaatatttttggttagacccattaaagtattgtttagtttttggctaacgattccaaacaatcccatgacccaactaacctacttacactaaaaagttggagtttacggttgattgtttccgaatgatttaaattctaaacaaatcgttcgtttaaacaatgagttgagatgggaatgggtttagtatgtaaacccattcggaggactgtacccaaaatgtggaagacaaaacaccgaggagcagttagcgggctataaacaataaacaggatgcatgcactccccgcgtgttaaggcgcaccatacaagtacgtggcagcaaccgtagccatttacgaccgactttgtttacgcacttgagaggaaactcaaaggctctccagctaggtttcggatccaccaatggcaggagtcgaatgccagtttccacccccacggatgccggcgagccacttgagtacggcgcacatttccactccgtgagaccgagtgaatctcgccggggatctcggctactatttaaagacagcccggagcgcccagttgaagcacattcgctgcgcagccctcgagtcgtgaagatcggaaaatcaatagaaatccgtagtgaacaagtgtcggaaaggccaaagacaatacctatatatatatatccgaaatattcagaaaattcgaaaaatgctgaatatggaaagcgcgggtgtcagtgctgcgatggcgggtctgagcaaatcgctcaccacgcccttctccatcaacgatatcctaacgcgcagcaatccggaaacacgtcgcatgtccagcgtggactccgaaccggaaccggaaaagctgaaaccctcctccgatcgcgagcgatcgatctccaagtcgccgccactctgctgccgagatctcggcctctacaagctgacccaacccaaggagatccaaccaagtgccaggcaacccagcaactatctgcagtattatgcggcggcgatggacaacaataaccaccatcaccaggcaacgggcacatcgaactccagtgccgccgactacatgcagcgcaaattggcctattttggatccaccctcgctgctcctttggacatgagacgctgcaccagcaacgattccggtaagtaacctgcacgaaattaacgccattcaggctctaatggactctgaaaagaacgctacttattcattggccttttgtataggatgtatgctaacttttggtaattttccctttacagactgcgactcaccaccgccattgagcagttccccctcggagtcgccgctatcccacgacggcagtggattgagccgcaagaagcggtcgcgtgccgccttcagccacgcccaggtcttcgagttggagcgccgctttgcccaacagcgctacttgtccggtccggaacgcagcgagatggccaagagcctgcgcctgacggagacccaggtgaagatctggttccaaaaccgccgctacaagaccaagcgcaagcagatccagcagcacgaggccgcccttttgggtgccagcaagagggttcccgtccaagtcttggtgcgagaggatggcagcaccacctacgctcacatggctgctcccggtgctggacacggcctcgatcccgccctgatcaacatctaccgccatcagctgcagctggcctacggcggacttccgctgccacagatgcagatgccattcccgtacttctacccgcaacacaaggtgccgcaacccataccgccaccaacccagagttccagctttgtgactgcatcctcggcgtcctcatcgccagttcccatccccatcccgggtgcagtgcgtccccagcgaacgccgtgtcccagtcccaatggccagatgatgagcgtcgagagcggagcggagagcgttcactcggcggcggaggatgttgacgagaatgtggagatcgactaggttgggagtgaccatgtctcggaggagaaccggggctacgtttttgtgatagccgtagaaattgtgttttagcctctatgtgtaaccaatagatgtcccatagctttagtagcattaagttgtagtcgtatctacccgagagctaaataaaattatgaattaaataaaacttggtttttgttttgagttttctgcttcacttgaatttcttcacttcatgcagttaaaacaatgcagttcgaaaaacgataatcaacttatcctggaagaagtacaaaggtttatagtgatttattgtgtgttttataacaatacatgttcatatatttcaacgagatatattaactgattcttctttgaagtcgccttattatatagttagcaattgattgggtttgtttttcctttttcacaaaggaatttacaattatttacgttaaactattcacgttaaggttcatttttaattttaatatgttggcaaaggaaacaaaccacgaagtatcaatctacaataaatagaggtgggatctcattgctagattttaaaatgtatttagtattttaaaagagatctgctttctgaaaagaatacatcaaaaggcgcttagccactaaacgattgttacataaattaataccacatgacctcaattcgcatcagcgggcgggaaggcgagaggcttctcagacccttcagaatgacagcgatctggcggatgagggcctcgagatgagatccgctgaagtggaatgcgtgtggccggagccttgcgaaagccgaaagccgctgatgatgaccgactatgacgagcccactcaatgacgacatagaagtgcttcaatgtgtcagaaaggtcgggccggacgtctgcgacccacaaaccactgacttacatacgatgtttcccgggcgcttttgcacaatatcgtcccgggtgggatggaggaggaggaggaggaggagtgggaacgggattgggatcggaattaggatcggaattgggaacatagacatgtccttagcggcacagttggtggctgacgacacaaggacctgcctcaagtgcccggcggcgacaattctaacggccggccgacctgttgatgtttataaacaaacaaacaaatagaatcaccaactgacgcccaggatcggaaaagg

SEQ ID NO: 17516 - DNA, 1446 bp, DROSOPHILA
aagcacattcgctgcgcagccctcgagtcgtgaagatcggaaaatcaatagaaatccgtagtgaacaagtgtcggaaaggccaaagacaatacctatatatatatatccgaaatattcagaaaattcgaaaaatgctgaatatggaaagcgcgggtgtcagtgctgcgatggcgggtctgagcaaatcgctcaccacgcccttctccatcaacgatatcctaacgcgcagcaatccggaaacacgtcgcatgtccagcgtggactccgaaccggaaccggaaaagctgaaaccctcctccgatcgcgagcgatcgatctccaagtcgccgccactctgctgccgagatctcggcctctacaagctgacccaacccaaggagatccaaccaagtgccaggcaacccagcaactatctgcagtattatgcggcggcgatggacaacaataaccaccatcaccaggcaacgggcacatcgaactccagtgccgccgactacatgcagcgcaaattggcctattttggatccaccctcgctgctcctttggacatgagacgctgcaccagcaacgattccgactgcgactcaccaccgccattgagcagttccccctcggagtcgccgctatcccacgacggcagtggattgagccgcaagaagcggtcgcgtgccgccttcagccacgcccaggtcttcgagttggagcgccgctttgcccaacagcgctacttgtccggtccggaacgcagcgagatggccaagagcctgcgcctgacggagacccaggtgaagatctggttccaaaaccgccgctacaagaccaagcgcaagcagatccagcagcacgaggccgcccttttgggtgccagcaagagggttcccgtccaagtcttggtgcgagaggatggcagcaccacctacgctcacatggctgctcccggtgctggacacggcctcgatcccgccctgatcaacatctaccgccatcagctgcagctggcctacggcggacttccgctgccacagatgcagatgccattcccgtacttctacccgcaacacaaggtgccgcaacccataccgccaccaacccagagttccagctttgtgactgcatcctcggcgtcctcatcgccagttcccatccccatcccgggtgcagtgcgtccccagcgaacgccgtgtcccagtcccaatggccagatgatgagcgtcgagagcggagcggagagcgttcactcggcggcggaggatgttgacgagaatgtggagatcgactaggttgggagtgaccatgtctcggaggagaaccggggctacgtttttgtgatagccgtagaaattgtgttttagcctctatgtgtaaccaatagatgtcccatagctttagtagcattaagttgtagtcgtatctacccgagagctaaataaaattatgaattaaat

SEQ ID NO: 17517 - protein, 382 aa, DROSOPHILA
MLNMESAGVSAAMAGLSKSLTTPFSINDILTRSNPETRRMSSVDSEPEPEKLKPSSDRERSISKSPPLCCRDLGLYKLTQPKEIQPSARQPSNYLQYYAAAMDNNNHHHQATGTSNSSAADYMQRKLAYFGSTLAAPLDMRRCTSNDSDCDSPPPLSSSPSESPLSHDGSGLSRKKRSRAAFSHAQVFELERRFAQQRYLSGPERSEMAKSLRLTETQVKIWFQNRRYKTKRKQIQQHEAALLGASKRVPVQVLVREDGSTTYAHMAAPGAGHGLDPALINIYRHQLQLAYGGLPLPQMQMPFPYFYPQHKVPQPIPPPTQSSSFVTASSASSSPVPIPIPGAVRPQRTPCPSPNGQMMSVESGAESVHSAAEDVDENVEID

SEQ ID NO: 17518 - DNA, 2948 bp, DROSOPHILA
gtgaaaatcgcccagtagggccaatctgggataaggcattcgattagactaggctactaggccaattataaggttaatgccctacaataaatcttgttcagtaattaaaaatctaaatatttagcttagataagttatttaaaatagcgagagaactaatatcctcgttaagtgaccaaatttggatgatcctctatggtcagacgatttcttcgatattgctatatccaatctcatgatctgcttgctaacccttgtatacaataaatctggactattctctagaagaagcgatggtgcaccgtacacatatttgtgtatgggtcgtatatgcttgtattgttatatgattgtattttcttgcatccccgtgctattttaattctgggtgacgttgtgtattccagaactgccacagaaaagtacccaccaatgtagttgtcgaggcgcaaggcgaagagcgtgacaaagatgaacaggctgcagtggacgatgaacttgctgaaagggaacatggtcgattatgttttagattgggaacccatgtgatccggtcgtccgcagtcggaggcttctcaccagggattgaagtcgcggaacagagattccagattcatgttgctgaggacaccatagagctatgtcactggacacttggtacctggacactagttgctcgtgggcacccgccgcaccgcgtccgctccacgaagcgatcttcgcccgaacaaggctgtgtgttatgatggagtgggggggcgggggcagttagtactctacgcctggcgccgatctttcacccctttccctgtagatattctgttctttgttttatttacacacttttttgactggcatttctgtcccgagattcgatatcgataactcttgcctgctctggcgattggcttgactaaggactagccagatgtctggctacaattcgccagatttccggctacgctagcctgctatcgatagcctcgataggcacaggaaaatgttatcttatttggaagatttgaaggaaaacgaggaccagctgcgggattcagactgctgcggcaatggctgcaccaactgcatcctcgacaacaagccacggccaagcaaacgcgtcctgctggctggcaaacgcaacgtgatcctgagctacacgaagttccgcctgttgcggcgggaagcgctgggacccaatggacagttgctgctcctgcactttgctcatgcagcagaggagggggacggcgatggagcggtggacacggtgcttgacatcccgcccggccaccatgtgatgctgcgcgtcggctccctgctgcgtccgtattcgccctattggagcgactttgtggccaaagagttccgtatcctggtgaagctgcagccggaggggccaatgtctcggcacctgcaagccgtacagcccgacgatctgctggaattccgtggtcccatcgggcaatacgtacacgaaccgcagccggccaagtgcatctatattatcgcccagggagttgctattgcacccactctgccgctggttcggcaggtgctggacaacgaggaggatatgagtcgcctgtggcatttggtgtgcgctcacgacctgctgcatgtctacttccgcgaggagatgctcgagttcgcccagttctggaactacaggagctgcctctacctgccgcatcagcagtgtgactcctccgcttgccaggaggcgggccactgtgcccagcagtgccctcagctccgggacaatctacgctacaaggagacggcaaaggtgtcccgattagatgccaccgaactggccacccacctcaatcccgcgattcccggacagcgtgtcctcatcgtggctggagattcaagttttcaaaagaacatcgcccaaatagcaacacaatcattggacgtagatccggcaaacatttatatgttgtaaatgccgggaaaaactgtagttgcttataaatatttgaatattgttaatgaatttgtgatcgtactggttataccgagggttttatattttttataccctagattcgttgaaaagtatgtaacagacagaagatatacatatattctagatctggatcaatagccgagttgttctggccatgtccgtctgtccgtatgaacgtcgagatcttaggtactataaatgctagaaggctatcacgcccactctaacgcccacaaaccgcacaaaactgccacgaccacacttttaataaatgtgttgatattttttcacattttgattagtcttcattaatttctatcgacttgcaaacaacgttttgctacgtccactcgaacgcccaaaactgccacgcccacatttttgaaatatttttaaattattttataagtcgtgtaagtttctatcgatttaaaaaaaactttggcacgcccactctaacgccctaaaaccgcccaaacctgccgcgcccacatttttgaaattttttttggatattttttaataattttattagtcgtgtaaatttctatcgatttacaattttttttttgccacacccagtctaacgccctaaagcggccataactgccacgcccacacttttgaacaatttttattccccaatatctatcgatataccagaaaaattcagaaatttcgcgttcgcattcacactagctgagtaaagggtatctgatagtcggggaacttgactatagcattctctctagttggcatttgaaacttttacatgttttctatacttccaattaagcatttgagtgtaccgaaaatggaatgtgtacttccataaaggaggaggagttcacttcttcatcatcagtaatacaggtaactccaactacttctactgttttgcccacacttgctacttttaattggttatagggcatctatacttatcgctgctaaatgaacatatggttttggccat

SEQ ID NO: 17519 - DNA, 948 bp, DROSOPHILA
atgttatcttatttggaagatttgaaggaaaacgaggaccagctgcgggattcagactgctgcggcaatggctgcaccaactgcatcctcgacaacaagccacggccaagcaaacgcgtcctgctggctggcaaacgcaacgtgatcctgagctacacgaagttccgcctgttgcggcgggaagcgctgggacccaatggacagttgctgctcctgcactttgctcatgcagcagaggagggggacggcgatggagcggtggacacggtgcttgacatcccgcccggccaccatgtgatgctgcgcgtcggctccctgctgcgtccgtattcgccctattggagcgactttgtggccaaagagttccgtatcctggtgaagctgcagccggaggggccaatgtctcggcacctgcaagccgtacagcccgacgatctgctggaattccgtggtcccatcgggcaatacgtacacgaaccgcagccggccaagtgcatctatattatcgcccagggagttgctattgcacccactctgccgctggttcggcaggtgctggacaacgaggaggatatgagtcgcctgtggcatttggtgtgcgctcacgacctgctgcatgtctacttccgcgaggagatgctcgagttcgcccagttctggaactacaggagctgcctctacctgccgcatcagcagtgtgactcctccgcttgccaggaggcgggccactgtgcccagcagtgccctcagctccgggacaatctacgctacaaggagacggcaaaggtgtcccgattagatgccaccgaactggccacccacctcaatcccgcgattcccggacagcgtgtcctcatcgtggctggagattcaagttttcaaaagaacatcgcccaaatagcaacacaatcattggacgtagatccggcaaacatttatatgttgtaa

SEQ ID NO: 17520 - protein, 315 aa, DROSOPHILA
MLSYLEDLKENEDQLRDSDCCGNGCTNCILDNKPRPSKRVLLAGKRNVILSYTKFRLLRREALGPNGQLLLLHFAHAAEEGDGDGAVDTVLDIPPGHHVMLRVGSLLRPYSPYWSDFVAKEFRILVKLQPEGPMSRHLQAVQPDDLLEFRGPIGQYVHEPQPAKCIYIIAQGVAIAPTLPLVRQVLDNEEDMSRLWHLVCAHDLLHVYFREEMLEFAQFWNYRSCLYLPHQQCDSSACQEAGHCAQQCPQLRDNLRYKETAKVSRLDATELATHLNPAIPGQRVLIVAGDSSFQKNIAQIATQSLDVDPANIYML

SEQ ID NO: 17521 - DNA, 2989 bp, DROSOPHILA
atgtatggtcttacgaaaactttccatcaatcgatattttaaggtcatgcaggtgttgaagccaataggaaacattttaacaaagtaattatcaaaattgaaaacgactaccaaaaatttagcatgattataatcttctaaagaagtctgtttggaattaaaattctccatgcacttctgcggatctaaagtctgcgaaaagtttgtttattgattaacaatcaagtgatttttaagtgcattgagtgatttatgaatgatatctcgactggggtatttaaaggtcttacgaatggatctattaataaaaaaatccagacgattaacacctgatggctagtcaaatactctcttaacgaattattggctttaaagttaacgccagtcctagcccaatatgtttatcaataagtagtttacccattgtgttagttccccttgtaaaatcgtaatcagaatagcaataaatcactttttagtacgcctttaaggttctaaagagtacaaaaaagccactgaagctctgaagacaaaagaatttacccccactgagtgatacgaatcggtcatccagtgtaatccgccgacacctgcatggagtggttgacgcagttttacccccggtagaccagttatttgtgtataatccagatcgcaatgataggcaatatatattctttaagtgatattgacaatcgattggccaattggacgtcgagattaggccaaaacaagccactcaggcgaaacaagtgctccctttttttacaaaccacttgccgaatgatttgattccttcgtttttaaatcggaagcctatcgtgaattgggcgttatgttcatggcagctccgctaatcaaaagtagcgattagcatttgtatttgttaacctggttaagtgatcccttcccttcccctcggcttgcccttcgaatccgctagctttgctataaaagccactgaccggctgggacaatcaatcaggtggctggctatacaatgaaagctatcgtttgtgtttttgtgacccttttggcctgcgtagcggcctacgatgtggagctgctcaccgaggagcaatgggaccagctggtggcgcgtaatcgtaagtgtcttaagccatccatcacctgaccaaacagaggactaattgcaatgtgattccccgcaaacagccgccaagcccgatactcagggtctgatcttgaacggatcggtgaagaaggccatcaatggactgctgaaccaaatgccttgtggttggccccaatatggaattccaccactggatccctacaccaatgctgatctccgcatccacttggccgagtcggttgtcgagtgagttataattaattggagtgattgtatcagtggatctaatagtcatccttagtaccctgctgcagttcctgcgcttccgtttcgatggcctggaaggcatggagatcaagaagatgaaggtcagctacacctttagcaagaaggtcaagttccacttcaacttcccagagctgaaggccagtgcccactatttggacaccaacacctttgtgaatctgctgaaggaactgggattgtcggtgcgctacgagagctcgggcccattgtccttcagcctgcagaatctgtcgattcagggcgagttcaagtacaagatgcccttcatctttggctccatcaagatctacaagttcagttgcgccgtcggcttgggcggtgtatcctcgaacattggcggtgtaatgggaaatggaaggatcaatgagttcatcaacgacatgctcgacaaggagatcccggccttcatcaatggcaaccaggaacagatcagcgccaagatcgaggagatctttgtgccgctggccaatgcgcatctcacgggtcacaagatctggtatctctttagcttgctgtccgccaccactggcagttgcaatcccactcccgctccctggttggccattgagtccaggaagctagactaaggcaacaccagccaataaaaagcaattcaaacgagtccacgatctacgttttaattagtccccattccgtctgctatcttcgctcaatatcaccttctacgcgttatcgtctgctggggattttggtatataagactctggccgggggttggccatttcagtagcaagttcagttgctaaaagtcacaatcaagcatgcgtttcctggtagtcttagcctgcctggtggccgtttgtgccgccggcactctgcccaacgaggtggagcagcgtctgttggagctggcggatcagaatggtgacatcgatctggtcgcggagccccaggagggagttgaaggtgagactcggtgaaacttttcaatgaatcctggtatttaattgattctaataacaaacgtaattcgtggcaattagtggctttctgaaatattatcgatttaaatttaaatattaccaactcaaaatcgaaacccattctttagttgccccccagtttattgtgtcctggcaggcgcgtcgcttcatccgcaagctccagaagcagatggagtgcggatggccccagtatggcattcccgtgctggctcctcttcgcatcaacgaattcgacctagactacaaaaagggcattttcgagaccttgaaccatgtgttccgcctgaagatcgccggtctgaatgacttcaatatccagaagttcaagctgaacgtgatcaccagcaagattaccttcgattttctgttcaagaacatcgataccaccgcccagaagtacgacactgatacgctgatcgatgccctgcgccagttgggtctgtccgtggagtacgagggatccggagagctgttgttcgatttggtcaacctgcgtattgctggcactctgaagtacaagcttcccatgctgtggggttccgccaagatcacctcgctgaagaccaccatctcgttggagtctgtgacttcggacatcactggattcatgggcaacggcaag

SEQ ID NO: 17522 - DNA, 864 bp, DROSOPHILA
atgaaagctatcgtttgtgtttttgtgacccttttggcctgcgtagcggcctacgatgtggagctgctcaccgaggagcaatgggaccagctggtggcgcgtaatcccgccaagcccgatactcagggtctgatcttgaacggatcggtgaagaaggccatcaatggactgctgaaccaaatgccttgtggttggccccaatatggaattccaccactggatccctacaccaatgctgatctccgcatccacttggccgagtcggttgtcgataccctgctgcagttcctgcgcttccgtttcgatggcctggaaggcatggagatcaagaagatgaaggtcagctacacctttagcaagaaggtcaagttccacttcaacttcccagagctgaaggccagtgcccactatttggacaccaacacctttgtgaatctgctgaaggaactgggattgtcggtgcgctacgagagctcgggcccattgtccttcagcctgcagaatctgtcgattcagggcgagttcaagtacaagatgcccttcatctttggctccatcaagatctacaagttcagttgcgccgtcggcttgggcggtgtatcctcgaacattggcggtgtaatgggaaatggaaggatcaatgagttcatcaacgacatgctcgacaaggagatcccggccttcatcaatggcaaccaggaacagatcagcgccaagatcgaggagatctttgtgccgctggccaatgcgcatctcacgggtcacaagatctggtatctctttagcttgctgtccgccaccactggcagttgcaatcccactcccgctccctggttggccattgagtccaggaagctagactaa

SEQ ID NO: 17523 - protein, 287 aa, DROSOPHILA
MKAIVCVFVTLLACVAAYDVELLTEEQWDQLVARNPAKPDTQGLILNGSVKKAINGLLNQMPCGWPQYGIPPLDPYTNADLRIHLAESVVDTLLQFLRFRFDGLEGMEIKKMKVSYTFSKKVKFHFNFPELKASAHYLDTNTFVNLLKELGLSVRYESSGPLSFSLQNLSIQGEFKYKMPFIFGSIKIYKFSCAVGLGGVSSNIGGVMGNGRINEFINDMLDKEIPAFINGNQEQISAKIEEIFVPLANAHLTGHKIWYLFSLLSATTGSCNPTPAPWLAIESRKLD

SEQ ID NO: 17524 - DNA, 3650 bp, DROSOPHILA
ctgctgtcataatggctcaatcaggcaacaggactaaggacattcgttcgggactaacggtacacccatggtcctgcattctggccctctgttgacacaatgtctggcggacagaggaaacggcattgctgcggtcactgaaatgtcatccatccgaggatgtggacaaaaaagacatctacacggcgacagcttcgacgtcggctaacttaaaaaggatccttcaatgtatttgcctaacggtctctgcgacagtcctttctgcggatgggttaacggtgagaactgcgcaggacactaccgaaacgactttgattcggaccgacaattcgggttgaggatccaacaacaactatgaactgtgtctgtaataaaagtttgatattatatagcttgcaatcagagatatttacattttgtgcccatatgcgtttcatcttcagcgaataagcaatcgaaaaaaaccaaacaaaccaagctcgtgatttgcaatcgcacttgtgatcagaactgatcaatacgtatttaagtcccagttctttaaagaagatacttccccttgtgcaagaactcaattttcttagctaattttcggcagtcacccagcaggattcccaaaaaggaccaactactacatcgattttccattgaacttcgtagctgtgaagagtgggcgtattggagtgccgcccatttcagctaacgattatttggcagaaaatttgcaattctgttaaaaagcaaacaggattcatgcaaaaggatttgccagctaaagcgtaaaatgccgtttaagaccattttcccctgagagacccggctattcttaggtaaagatgatgcgacagcctattgacttaagattacgagaatgcagccaaccgaaaggagatcctgactgagcccgttcacttgtcactactcactcacttacctcttaagccggctgagctgcataattttccataaaaaacaaacaataataagaacgacgcatccgtctgttgattgtgaagcaatgcatttgaacaacgtgattaggaagtggttattaactattggctcttcttgacgacgtgcgccaagtcgtagactccgcgcacagccttcagcttaacgccgggcacgtcctgcagacgccccacgcggcacagtacaatgttgtgctcttgcaggttgtgcccgatgccggggatgtaggccaccatctccttgccggtggagaggcgcaccagcacgcactttcgattggccgagttcggcttcttgggcttctttatcagcgtcttcaggacaacgcccttggcgaagggctttccatccagcggctggcgcggcggacgcgtctttatgtgcggtccgctgcggtgcatctgctgcagcgatgccattccacggacggcggtctcatagctgcactggatggctggcaaagaagtgaaagagttagatatgtcgcttaaagaaaaccagtacaacaaaattaactgctccaagtttgagattgcaatcatgatcatttttagaggtaacactcctagttgattatgagaaagtggctagactataaacacacaagggttcggccatcgatcgactcgattgagaatgcaatgatgggagcgaaagagatcgctcgaaatcaataaagcacgactgtaccggcttcgaaatgcggacaaaagggtcacttccacggacagttggtcagtgattgacaatgcccgctggttctgtgctggctcctttgtcatacggctaatctctgtggaaatcgagaattgtggaacggagttggcggctggcgacaataattgcggccaaatgacgcgcaagcatggaagtactcgctccgaatcctgtcaagcctttttggccagaaacaaagcgacgtagcagcgttttcaattataaatatgccaaatgccacacacaacacaagcggcaggtaataatttccatatgcaggattgccggacaaacaaatccggcacctattgtctcctaaactgcgaccttttttttgcggttgaacatttccattgtttccgcgcttttccttctttttcggggtgacaggttttcaattatttttccaatctaaagcgggggagctgcggaatgtgcatgttgatgtgcatgtgaaactggcaatgaaaatattcgcaggcgaaaagtgcggccgccacgcgcggccaactcaaaaagagttggtaaaacctgggggaaatgcacgaaagtcggggggaaaacaaacacttatgcgctcccggtttatttggttttcgcttcgcagcggaagggtggctaaatgcgccaagtcacggactcctgagggccagttcctgcttaggagcagctaatggccaccaaatcaattaaaatattcgatttttaaggtatttaacttggtttagttaagcttaccctgcgaagccaactgtttcgtaatgccaaaggattgccgcagaaaattcatgctcttggagttttgttcagtagttttttgttcagtttgtagtaccagccgtcgctcggattggtggcgcttgctcggaagctatttagtcggccttttgtgttataaaagcgctaaaatatttaataatctaattccaattcaattctaatgtgacaatcagctgttgctgtcctagagctggcacaggtgtcgatagtcacgcatggcagtcacgtatggtaggtgcactcgctaaaacatggtgggtgcatccgccagtgagagttgccagatgaaggcgggatttttaaaaatggtatttaagaatatgaaaatcccagtattttgaatgacagcacttaaatttcccatcattaaaacaaaaatacgttaaaaaatatgtttaaagattcactttttaatttcaggactcgcatattcgtttaaaactgccgcctatgagcttaaatcgagtttaggatgcttctctcttgggttttgtgtattagtcacatctagaaatgtattaacttaatgctatatagttggtttgacttaaacgtacattaggttgcttgttaattgaactaatcaatttgagttgctgacgcctgacgtttacactgcaataaataaataacgctatgctacagggcttattcgagataaaatttggcccccgaaatagttctatcaataataaaaaaaaaaacttaacattagtaattctactgactatctggccggcagcaacgaaaaaagtcttacattaccaattccttatactaaagtttgtatattttcaaattcaatatttaactaaaacaaaacgaagcagcattaacgtttaacgacttagctgcttagctgtttttttcttttaattaaacgttctgctcgaaatacattttaatgagctcaaaatgaaaacaaaacttgattactagtgttttagcacaaagttactcgagcatttgaaacgacagaaacttctgttaatggcaaattccctagttctaagcttaatgattggccaaattaattggttttttggaaaactaaacagtaccgggtgccttaaagctaatattcgagggtttcgagctgctctgccgacctgtcctacgattatctcaataatacacatctagtttcggatccttaagtctacttgaaactgtctgttttt

SEQ ID NO: 17525 - DNA, 649 bp, DROSOPHILA
agcaacagctgattgtcacattagaattgaattggaattagattattaaatattttagcgcttttataacacaaaaggccgactaaatagcttccgagcaagcgccaccaatccgagcgacggctggtactacaaactgaacaaaaaactactgaacaaaactccaagagcatgaattttctgcggcaatcctttggcattacgaaacagttggcttcgcaggccatccagtgcagctatgagaccgccgtccgtggaatggcatcgctgcagcagatgcaccgcagcggaccgcacataaagacgcgtccgccgcgccagccgctggatggaaagcccttcgccaagggcgttgtcctgaagacgctgataaagaagcccaagaagccgaactcggccaatcgaaagtgcgtgctggtgcgcctctccaccggcaaggagatggtggcctacatccccggcatcgggcacaacctgcaagagcacaacattgtactgtgccgcgtggggcgtctgcaggacgtgcccggcgttaagctgaaggctgtgcgcggagtctacgacttggcgcacgtcgtcaagaagagccaatagttaataaccacttcctaatcacgttgttcaaatgcattgcttcacaatcaacaga

SEQ ID NO: 17526 - protein, 140 aa, DROSOPHILA
MNFLRQSFGITKQLASQAIQCSYETAVRGMASLQQMHRSGPHIKTRPPRQPLDGKPFAKGVVLKTLIKKPKKPNSANRKCVLVRLSTGKEMVAYIPGIGHNLQEHNIVLCRVGRLQDVPGVKLKAVRGVYDLAHVVKKSQ

SEQ ID NO: 17527 - DNA, 3058 bp, DROSOPHILA
cccgcaaacagccgccaagcccgatactcagggtctgatcttgaacggatcggtgaagaaggccatcaatggactgctgaaccaaatgccttgtggttggccccaatatggaattccaccactggatccctacaccaatgctgatctccgcatccacttggccgagtcggttgtcgagtgagttataattaattggagtgattgtatcagtggatctaatagtcatccttagtaccctgctgcagttcctgcgcttccgtttcgatggcctggaaggcatggagatcaagaagatgaaggtcagctacacctttagcaagaaggtcaagttccacttcaacttcccagagctgaaggccagtgcccactatttggacaccaacacctttgtgaatctgctgaaggaactgggattgtcggtgcgctacgagagctcgggcccattgtccttcagcctgcagaatctgtcgattcagggcgagttcaagtacaagatgcccttcatctttggctccatcaagatctacaagttcagttgcgccgtcggcttgggcggtgtatcctcgaacattggcggtgtaatgggaaatggaaggatcaatgagttcatcaacgacatgctcgacaaggagatcccggccttcatcaatggcaaccaggaacagatcagcgccaagatcgaggagatctttgtgccgctggccaatgcgcatctcacgggtcacaagatctggtatctctttagcttgctgtccgccaccactggcagttgcaatcccactcccgctccctggttggccattgagtccaggaagctagactaaggcaacaccagccaataaaaagcaattcaaacgagtccacgatctacgttttaattagtccccattccgtctgctatcttcgctcaatatcaccttctacgcgttatcgtctgctggggattttggtatataagactctggccgggggttggccatttcagtagcaagttcagttgctaaaagtcacaatcaagcatgcgtttcctggtagtcttagcctgcctggtggccgtttgtgccgccggcactctgcccaacgaggtggagcagcgtctgttggagctggcggatcagaatggtgacatcgatctggtcgcggagccccaggagggagttgaaggtgagactcggtgaaacttttcaatgaatcctggtatttaattgattctaataacaaacgtaattcgtggcaattagtggctttctgaaatattatcgatttaaatttaaatattaccaactcaaaatcgaaacccattctttagttgccccccagtttattgtgtcctggcaggcgcgtcgcttcatccgcaagctccagaagcagatggagtgcggatggccccagtatggcattcccgtgctggctcctcttcgcatcaacgaattcgacctagactacaaaaagggcattttcgagaccttgaaccatgtgttccgcctgaagatcgccggtctgaatgacttcaatatccagaagttcaagctgaacgtgatcaccagcaagattaccttcgattttctgttcaagaacatcgataccaccgcccagaagtacgacactgatacgctgatcgatgccctgcgccagttgggtctgtccgtggagtacgagggatccggagagctgttgttcgatttggtcaacctgcgtattgctggcactctgaagtacaagcttcccatgctgtggggttccgccaagatcacctcgctgaagaccaccatctcgttggagtctgtgacttcggacatcactggattcatgggcaacggcaagatcaaccgcgccatcaacagccagctggagaacatcgtggtaaagggaatcaatggcaaccaggacgccatttccgagaccattgagaacgccatcgtgccgcgagtgaacaagatgctgaagggcaaggacttctggaccgtcgtggacctgatcctggccagcagcgacggtgagagcgaggacgatccgattgtcgttgattgcgatccctccgccgatccctgggcctaaactatgggacagccgtgaataaacacttgtcgatatattcaattattggtctacttttggggtttttatttgtggaatcccattggactctcatttcctgctccaatatccacaatcaatctataattatatgctctgaattcactgaatgtggtttgcctaaacaaagaaaccttttatagctattataattgcggttggacttaaaaacagaataacttatatttattataatgttttgatacatttctgactcgaaacgaatgtgggaacacatcgattatctcttttgcacctgcctaatccaatcttatctattttcgctacttaagtggctaatcgttatttgttgattaggcaagggaaaaaactacttgtactgtttaaacagttagcagttcctatttggcactcgcgatgagaacttcttgtgtaatttttgtggcccttctgtgctgctccttgggctccgccaagctcttcgatgatgagctgcgcgaactgacggagttcctgcgtttgcagatgcgatgtggctacccggccagaggggttcccattttggccccggctcagatggcctacaaggaaattggcatcagaactgagaactttgggtgaatataaacaagaacttcacaaataggagctattcttaatggaaccatactgaaccgcagttgcaatggaaacttcaccgatctgattatcgagggattggatgggtacgagttctccaagctggagtggaacaacattttgcataccattaagttcgacatgaacttccccaagatttccctgaagagcacaaactataaactaaatctcctggctcgtctatttggtgccgatttctccctgtggggtgacggtgccctcagtctggagttgatcaatttccgagcttacggcagtttcgttattcgcccaaagtcggccaccagtggtgtgtacgccaagagctggaaggttaactgggaattggaggaggctaagt

SEQ ID NO: 17528 - DNA, 913 bp, DROSOPHILA
ctaaaagtcacaatcaagcatgcgtttcctggtagtcttagcctgcctggtggccgtttgtgccgccggcactctgcccaacgaggtggagcagcgtctgttggagctggcggatcagaatggtgacatcgatctggtcgcggagccccaggagggagttgaagttgccccccagtttattgtgtcctggcaggcgcgtcgcttcatccgcaagctccagaagcagatggagtgcggatggccccagtatggcattcccgtgctggctcctcttcgcatcaacgaattcgacctagactacaaaaagggcattttcgagaccttgaaccatgtgttccgcctgaagatcgccggtctgaatgacttcaatatccagaagttcaagctgaacgtgatcaccagcaagattaccttcgattttctgttcaagaacatcgataccaccgcccagaagtacgacactgatacgctgatcgatgccctgcgccagttgggtctgtccgtggagtacgagggatccggagagctgttgttcgatttggtcaacctgcgtattgctggcactctgaagtacaagcttcccatgctgtggggttccgccaagatcacctcgctgaagaccaccatctcgttggagtctgtgacttcggacatcactggattcatgggcaacggcaagatcaaccgcgccatcaacagccagctggagaacatcgtggtaaagggaatcaatggcaaccaggacgccatttccgagaccattgagaacgccatcgtgccgcgagtgaacaagatgctgaagggcaaggacttctggaccgtcgtggacctgatcctggccagcagcgacggtgagagcgaggacgatccgattgtcgttgattgcgatccctccgccgatccctgggcctaa

SEQ ID NO: 17529 - protein, 297 aa, DROSOPHILA
MRFLVVLACLVAVCAAGTLPNEVEQRLLELADQNGDIDLVAEPQEGVEVAPQFIVSWQARRFIRKLQKQMECGWPQYGIPVLAPLRINEFDLDYKKGIFETLNHVFRLKIAGLNDFNIQKFKLNVITSKITFDFLFKNIDTTAQKYDTDTLIDALRQLGLSVEYEGSGELLFDLVNLRIAGTLKYKLPMLWGSAKITSLKTTISLESVTSDITGFMGNGKINRAINSQLENIVVKGINGNQDAISETIENAIVPRVNKMLKGKDFWTVVDLILASSDGESEDDPIVVDCDPSADPWA

SEQ ID NO: 17530 - DNA, 6398 bp, DROSOPHILA
cattttagggcagggttccgtttaggcgatataaaattacctttcttactgtctaccaacatcgtcaattaagtttttatgcaactatacactcaaaacagattgtataaatcgtagtaattcccattaacgatgcataattacatatattatgtcaattaactccggtaaatttccatgattataagttcagctttaacttacaagaggcattctctgtaaagtgtacctacgacctgcaagcttgttgggaatattgattggccggcgcttgattaatttcgctcagctgttgtaatttgtttattatttgttaaagttaaaggtcaagggagtgtcgtctgattaggtgggtggcaacactgacgcacggccactcacacatgtgaaccaagcagccgcatcaattcacacctctctccacctctctcactcaccggaatttcaacacatgcgctctctccgcagcctctcattacactgggagaaagcatcgttagaggatttctcagaccgtcttaaatttcatatatacaccggcatttctttatgacacaaatgtattcgattgatttaaacttgtgtatacaaataattagaaaaactgtatcctgcagggaattaatttaaaaaaaagcaaattcaatatttttgaaaatcatatatgtacatatctgcgcgtaatgattatgaaattgctacactttttttttctgtgcagcatgaatgtcatcgcattgcgttattcacatacctttctgctaattgcttgggcggtttcgactcacaaatcgaataaacaaatttcgcttgttcaatactattttattttattaggttttattgttattgtggctcgctcgcccaccagcccactttctctctctttattttctctctgtctgctgctcaccaaatttctctccatttcattctctctcgatatcgatttttccgattggcgcagcagtcgaagcaacaaaaaaaaaaccgtttcaagaccgtgaacgtcgtgtgccccgaaaactttaatattagttgaaaatattcgtttcccaagttaattgctctcctatcctattccctcatttgttcccattcgaaccgtaagtttttccacgtaattatggccatttgtgaggcaaaagaagaattttagcagaggcgttgtcatttccattttcatttccaattgcatttcatttcgttttgtgttaccatcagcgcataatcgcatttggcgttaatctaaaccattatctatattgcaattccattacagattctatagtttcatacttagcgtgcccaaattgagtttctagtgtagtctttctcatgtgttgttgttggtcggcgggggcggctggtaaaaaaaacaagcgttccgtatcaagattaaaaccgagtgccatttgctccaagtgccggcactaatgagatggtcttcggtgctatgttgctgacgggcaacgggctcaaaggtcccaaacagcagcaacagcaacatcagcaggagccgcagcagcagcagcagcaatcgcaacagcagcagcaagagcaaaagaaaccggcgcccattaaatcctccagcaaggagcaggaaacgcagcccattgcagccgggtattatgccctcggcatacgcatacccaaatctccatcgtttcacagcggcctagatcagctggccgacgacgagttggacgatcaggtgcaggatcagcagcaggagcagcaacagaccggcagccgattcaggtttagcagcgtggaggagctaaaggccaagttcgaggggcggaaaacgcccctctcaccgccagaggcagcagcaggaggagcagccggatccggagcacccaccacatcctcctcaccatcgtcctcgtccaccagctccaattcgtcggcctcggccctgtcctcgctttcacaggcggcctcatcctcgctagcctcggcggctgctaactcctcggcctcatcctcggccgccacatacggtggtggagcgaattcggctgcagctgcactgattgcctcctcgccatttggatcgcagtcctccacttcttcgctctcgctatcctcgaatgccggcatgtcgaagaacgcggcaggagcaggatctggatctggatctggaacaacgtcaacgggcgctgctagcggcagcaattcacttgtgtccactttggcacaacatttctcggcggccacatccgccgcagcatcggcggcagccgctgcggcatcctctgcctcggcggcgtcctcctcgtcagcttcctcctcatccaccgccaccaacaacgcagccagcagctccatcgccgccagcaaggtttgcagcttggtcttgtccacatacacacacacccagcgatctgaaaacccaaaacataaccacatcaccacctccaagtacaaaccacaaattttacactttcttccaaactttcactaattgtgttagctttttggataacgataactaagtttcaaagaaaaaaataacaattcaagtaccttgttaatcaaagttttatttacattgtacgctagaagctaatacatttagtagcatctcacacactatccaccaacactaactccatcccaattgaacaaaccgaaatttgataaaccaaaaccatactctgctctcatttcatcgcttcctcatcatccagtcacctgtgagcgcggccgcggccataaagaacatactgaatgccaccaagagtgtgggtactagtgctgcggcggcggcagcagcggcggccacctcctcctcatcatccccatcctctgcggcggctgtgccgtcgtccgccgccaccgccgtcgccgctgttcccaccaccagcgatgtgcccgcagaggagatgcgtccgacggtggcccagaatctggtgggcggcattagcatctcattgggaattggccagcgcaatggcggcgcagcacctgcgtcatcagcagtaatggtgacacctaacgccaccatggtggtgaccacatcgagcctaagcatccggcagaacggtgacatactgccgggtcatccggcgggtcttcagccctcgccccagacgctccaacagctgacgggcagtccgggaagggctcgcgaccggaatctattctacacgccacccaccgcttcggttgccatggcgctgcctgcactgcgaggttgctatcccgaatggatccgggccaatggcgatggatggagccattccagccattgcccttgggcctgaggtcctccggctacttgatcctttcttccgatcttcattatgttcgttttgagtttcgcttgcctgcttttggttggtcgtttttgtagttgtaggttttttttttttaattttatattaaggtcaattttatatggcttacattttgtttgatatatctatcacttatattatatatttaaaaaaattaatgatgatttcatttgtatttccatagagaccgccgccagtgaacgtgaggagctgttcatacagaagatccagcaatgctgcacactgttcgacttctccgagccgctcagcgacctcaagttcaaggaggtgaagcgggcggctctgcacgaaatggtcgatttcctcaccaaccaaaatggcgtaataaccgaagttatttacccggaggcgatcaatatggtaagctactaatttacatatttaaaataatatcacatgcttttaccacaacatacttatctgttctcatcagtttgctgtcaaccttttccgaactctgccgccatcgtccaacccgaatggtgccgaattcgatccggaggaggatgagcccacgttggagtcctcgtggccgcatctgcaactcgtttacgagctgttcttgcgcttcttggagtcaccagattttcaaccaagcatggcaaaacgttttatcgaccatcaatttgtattacaactattggatttattcgattcggaggatccacgtgaacgtgatttcctgaagactgttttacatcgcatctatggaaaatttttgggcttgagagcatttattagaaagcagatcaacaatgtcttttacaggtgagctcgtcattggaatatctataaggttaatgcctcacattactaatcgcattccacatttagatttatttatgaaacggagcatcataatggcatagccgaattgttggaaatcctgggtagcattatcaatggctttgctctgccgcttaaggaggagcataaacaatttttacttaaggtattgctgccattgcacaaagccaagagcctctcggtctaccatccgcagctcacctattgtgtggtgcagttcctggagaaggatcctagcttatcggaggcggtcatcaagtgagtaaagaattccttattttgcgcattttctaattagcctatcgctgccatatttcaatattcttgcagaagcctacttaaattttggcccaagacgcacagtcccaaggaggttatgtttttgaacgagctggaggagctgttggacgtaattgagccggccgagttccagaaggtgatggtgccgctgttccgccaaatagccaagtgcgtctcttcgcctcatttccaggtggccgaacgtgcgttgtactattggaacaacgagtacattatgtcgctgataacggataactcggcggtgatattacccattatgttcccagcgctcaatcgcaactcaaagacgcactggaacaagaccatccatggtctgatctacaatgcactcaagctgttcatggagatagatcagcggctttttgacgagtgcagcaagaactacaagcaagagaagcagatgtatgtgttaactttagttgataattaacttccatgggacgatgcactcacgttttattactttgtactaaacattggcgttttttttttttttttgcattgcagggagcgtgagaagctgtcgcaaagggaggagctctggcaacaggtggagagcttggccaagaccaacccggagtggacaaaggcgcgccggtttaacgactgcctgccggtcagcgacagccgggccctgtgcgatcaatatagtgagaacagcgattcagcgtatgatcagagcgagcagagggcgcgccagccgccgcctccgctgccgccacagaaacaggcgcaccaggagccccgagaggtgagacaggcacttgccacattaacaacactaaacaactactaatccgccacgtgtgatcctggcgtcgctgtgagctgtgcccagctaaggcccactctgtttcaactctaattctaatcgaacgaatgtctgttaaaataatcacactcatgtcatttaaaaaaaaaaaaatacatatttgtatatctttaactttgtctatttatttattaattatttggtaacctcactgtctgccaaaccaaacgcatccatgcaaattcatccacgacacaacaacttttctcctgcacttttggttaaccgcatacgaattgggcggaattaatatgtagtttatcttacttagatgttaattacactttggtccatcttttaactcatttgtggtcattttaatgagagaacgcgttccttttgtaacatcaatatgattctcatttattaatttgaacacttaacataattttcctcaagtgaatcaccatttttaagcatgaatcccagttagagtaaaatctgtgcacataactattaaaaactagtgtcaaatgtatcatgttgttaacaactcagaaccagaaaccatacaacactcctcgatctcagacctttgtaacacaattcgacattcgggtgtagatgtatatatatatcgtagtcgtgtgttgtccaactggtggtcatcgagtttccatccagcaccacagcactcgatatcgtaacgcaatcatcccgcaccaccgtgtaacttcacccgcccagtgtgtgtgtgtgtgtgtgctgcgatgccttagtgtcagaagcgggtccattttctattgccaaaccccccttcccgttccacacagattcgtggcgaacggaacaaggacaagccgctgctgcgccggaaatcggacctgccatcggacagtggaaccgtgaaggcgctaaacgagcacaagcggacggatgagtacctcacaacgccgccgccggatggaaactactaggagagagctggccagccgacgccaccaatattcgtagctccaatgaggaggatagtcaaaccacagaacttacccaaatagacctacacactccagactaaggccagaaagcatacatatatagaagcacaagtccaagtccagagatgaaggatagaatccgcacaactagagaacaaacaattttgaacgatg

SEQ ID NO: 17531 - DNA, 3349 bp, DROSOPHILA
accgtgaacgtcgtgtgccccgaaaactttaatattagttgaaaatattcgtttcccaagttaattgctctcctatcctattccctcatttgttcccattcgaaccattctatagtttcatacttagcgtgcccaaattgagtttctagtgtagtctttctcatgtgttgttgttggtcggcgggggcggctggtaaaaaaaacaagcgttccgtatcaagattaaaaccgagtgccatttgctccaagtgccggcactaatgagatggtcttcggtgctatgttgctgacgggcaacgggctcaaaggtcccaaacagcagcaacagcaacatcagcaggagccgcagcagcagcagcagcaatcgcaacagcagcagcaagagcaaaagaaaccggcgcccattaaatcctccagcaaggagcaggaaacgcagcccattgcagccgggtattatgccctcggcatacgcatacccaaatctccatcgtttcacagcggcctagatcagctggccgacgacgagttggacgatcaggtgcaggatcagcagcaggagcagcaacagaccggcagccgattcaggtttagcagcgtggaggagctaaaggccaagttcgaggggcggaaaacgcccctctcaccgccagaggcagcagcaggaggagcagccggatccggagcacccaccacatcctcctcaccatcgtcctcgtccaccagctccaattcgtcggcctcggccctgtcctcgctttcacaggcggcctcatcctcgctagcctcggcggctgctaactcctcggcctcatcctcggccgccacatacggtggtggagcgaattcggctgcagctgcactgattgcctcctcgccatttggatcgcagtcctccacttcttcgctctcgctatcctcgaatgccggcatgtcgaagaacgcggcaggagcaggatctggatctggatctggaacaacgtcaacgggcgctgctagcggcagcaattcacttgtgtccactttggcacaacatttctcggcggccacatccgccgcagcatcggcggcagccgctgcggcatcctctgcctcggcggcgtcctcctcgtcagcttcctcctcatccaccgccaccaacaacgcagccagcagctccatcgccgccagcaagtcacctgtgagcgcggccgcggccataaagaacatactgaatgccaccaagagtgtgggtactagtgctgcggcggcggcagcagcggcggccacctcctcctcatcatccccatcctctgcggcggctgtgccgtcgtccgccgccaccgccgtcgccgctgttcccaccaccagcgatgtgcccgcagaggagatgcgtccgacggtggcccagaatctggtgggcggcattagcatctcattgggaattggccagcgcaatggcggcgcagcacctgcgtcatcagcagtaatggtgacacctaacgccaccatggtggtgaccacatcgagcctaagcatccggcagaacggtgacatactgccgggtcatccggcgggtcttcagccctcgccccagacgctccaacagctgacgggcagtccgggaagggctcgcgaccggaatctattctacacgccacccaccgcttcggttgccatggcgctgcctgcactgcgagagaccgccgccagtgaacgtgaggagctgttcatacagaagatccagcaatgctgcacactgttcgacttctccgagccgctcagcgacctcaagttcaaggaggtgaagcgggcggctctgcacgaaatggtcgatttcctcaccaaccaaaatggcgtaataaccgaagttatttacccggaggcgatcaatatgtttgctgtcaaccttttccgaactctgccgccatcgtccaacccgaatggtgccgaattcgatccggaggaggatgagcccacgttggagtcctcgtggccgcatctgcaactcgtttacgagctgttcttgcgcttcttggagtcaccagattttcaaccaagcatggcaaaacgttttatcgaccatcaatttgtattacaactattggatttattcgattcggaggatccacgtgaacgtgatttcctgaagactgttttacatcgcatctatggaaaatttttgggcttgagagcatttattagaaagcagatcaacaatgtcttttacagacatttagatttatttatgaaacggagcatcataatggcatagccgaattgttggaaatcctgggtagcattatcaatggctttgctctgccgcttaaggaggagcataaacaatttttacttaaggtattgctgccattgcacaaagccaagagcctctcggtctaccatccgcagctcacctattgtgtggtgcagttcctggagaaggatcctagcttatcggaggcggtcatcaagtgagtaaagaattccttattttgcgcattttctaattagcctatcgctgccatatttcaatattcttgcagaagcctacttaaattttggcccaagacgcacagtcccaaggaggttatgtttttgaacgagctggaggagctgttggacgtaattgagccggccgagttccagaaggtgatggtgccgctgttccgccaaatagccaagtgcgtctcttcgcctcatttccaggtggccgaacgtgcgttgtactattggaacaacgagtacattatgtcgctgataacggataactcggcggtgatattacccattatgttcccagcgctcaatcgcaactcaaagacgcactggaacaagaccatccatggtctgatctacaatgcactcaagctgttcatggagatagatcagcggctttttgacgagtgcagcaagaactacaagcaagagaagcagatggagcgtgagaagctgtcgcaaagggaggagctctggcaacaggtggagagcttggccaagaccaacccggagtggacaaaggcgcgccggtttaacgactgcctgccggtcagcgacagccgggccctgtgcgatcaatatagtgagaacagcgattcagcgtatgatcagagcgagcagagggcgcgccagccgccgcctccgctgccgccacagaaacaggcgcaccaggagccccgagaggtgagacaggcacttgccacattaacaacactaaacaactactaatccgccacgtgtgatcctggcgtcgctgtgagctgtgcccagctaaggcccactctgtttcaactctaattctaatcgaacgaatgtctgttaaaataatcacactcatgtcatttaaaaaaaaaaaaatacatatttgtatatcttt

SEQ ID NO: 17532 - protein, 661 aa, DROSOPHILA
MVFGAMLLTGNGLKGPKQQQQQHQQEPQQQQQQSQQQQQEQKKPAPIKSSSKEQETQPIAAGYYALGIRIPKSPSFHSGLDQLADDELDDQVQDQQQEQQQTGSRFRFSSVEELKAKFEGRKTPLSPPEAAAGGAAGSGAPTTSSSPSSSSTSSNSSASALSSLSQAASSSLASAAANSSASSSAATYGGGANSAAAALIASSPFGSQSSTSSLSLSSNAGMSKNAAGAGSGSGSGTTSTGAASGSNSLVSTLAQHFSAATSAAASAAAAAASSASAASSSSASSSSTATNNAASSSIAASKSPVSAAAAIKNILNATKSVGTSAAAAAAAAATSSSSSPSSAAAVPSSAATAVAAVPTTSDVPAEEMRPTVAQNLVGGISISLGIGQRNGGAAPASSAVMVTPNATMVVTTSSLSIRQNGDILPGHPAGLQPSPQTLQQLTGSPGRARDRNLFYTPPTASVAMALPALRETAASEREELFIQKIQQCCTLFDFSEPLSDLKFKEVKRAALHEMVDFLTNQNGVITEVIYPEAINMFAVNLFRTLPPSSNPNGAEFDPEEDEPTLESSWPHLQLVYELFLRFLESPDFQPSMAKRFIDHQFVLQLLDLFDSEDPRERDFLKTVLHRIYGKFLGLRAFIRKQINNVFYRHLDLFMKRSIIMA

SEQ ID NO: 17533 - DNA, 4420 bp, DROSOPHILA
ggagttgttcgagtggaaataacccgagcattgtgtgctccggatgcagcaggatgtggttggtgactctagtccctgtgggaataaattgagtcataattgaattgattgccagcgggggcggccacttgcaagtgtcggaatggagggccttggaacggctgtgatgccagtgaagtggccgccaaattatttgacataattgcgccttgatgaagcgctatctgctgggaaagagtggaaagggtgaagccactccaatcgggtgctcaagtactcattgaactccattggagctgtgatcgctgcttttcggtagtttgttgacctcggagttgtggttaaaaacttggcacttctcgacattgtaatctttagcagcgatccaatttgtgttgtttttttgataaaattatcaagaaatgttaaaaatgggtggcaagtggtaagtccattaagtatcattatgtcaaaattgtgtctatttgttgtcgtaataatttgtttaaatgaaattatttgaaatatattagtttaaaaaaatcgaaatctaagtataagcaggcgtcgaaaaatgtcattgctgaaatgtcacttgcacaggactaaatttgccattaactcgattattctcaagctgagtggttcgaatatttcgtattaacgaaaaataattttttcggaaaagttcggtcaaacacatttaaggcagcagtgaaatagcagtgctacaatttggttaaaaacggtcaaatatcaaggtgaatatctgcctccgttttctttataccttttatgcaatgcggtaaaggagacatatttattcttcatcgttatcagtatctgacttacatttactttcatgaagaacttctgaagtaattatgtgattatgtgactaattccatttttttgcgtattcgaaataattttccttccgcagccactctcaatcttggttagctccttggtccttttactcaaaacgaagaacaagacgatgggccgtcgtaagcgtgaagactcctctgacgaggagggagacgactgtcgccagaagaggactgccgagacgacggtgaagaccgtggagcagctgatgagagagcttagtttcccggggcacactccgctcgaattgaagctggggaacctgggttacctgctaggcaaagggatgagtgttgacctgaaggagaacctcataaatgagctagtaatatgtctgggctattatcccggacaggccagtgcctatgccacacttgtgggcctaattaatgtcgcagactttgaattcggctccgagtgcctgttgttcatggcgcacaaggtgggagagtccgtgcacattcgcgattggaacaggtgccgtggagtggttcactgcatggtggatctgtatcactgccaggtgctcccgtcgtcctatattctaaaattgctcgcagccttcttgaaggactgcgaggctctgaaggatccggacgatctggtgggcgtcacaccgcagatacgacgcgattttcttgcctactgtgtactatccgccatgccccttattgggcgcgatttggagggggagacggcgtttgataagctgatagtctcactccagatttacattaagaagcggtccgctctgcacaccaacatgttgagtgtgtggccggatttcaatcagagggactacctggagctgttgtggcagcaggtggacggtatgaggcagaaccattgggccgaaccggagcatcagttgatcccccgaccttacaagtccttctctgagaccttgagccacggccgaatccaccagctaagggattatgatttggccgcccatgaggagcgatgtcggtatccgctgccgcgtgtatgttttcgcatcttctcctgcgactctgtcggcgagatccctaatatgcccccgccggtgagcatcgaaaggcatctgctggaggcccatattctggacatactgatctcttttcataaggagagaaaaatctgtgccgatagcctcttgatgtacgccgcctccaagccccagttgccggtctattactgcattgtggaggtgatcttgggcgagatgctgcggctgcccaccgccaattggagcaccattgcctacggatccattctggtggagctgtgcaagcgccaaccggacaagataccccaggtggtggcccaggccttggatataatctataatcgactgaactccatgagcgtagcttgcttcgaccgcctggtcaactgggtgtcgcatcacatcagcaacttcgggtttaactgccagtggagcaagtgggctcagggtcttccatcgccaatcgatccgagtgccaccaatctgcagccaaaggtggttttcctgagggaattgctcaagaagtgcttcaggtgcgtaacatttctgttttcagttgccaataatatgaaatacatactactttatcttccaataattagactttcgtaccaccaaagaattaaagatgtagtgccggatatactggccgattttcttccgccgccggtactgccgcacttcaagtttgtcgacgaaacccttcctggtgccattttgtccaaggatctgctggaggcgatgcgcagcccgcaagcaagccccgaaatgatctctgaaattattaaatccagcacgggaatcggtccgctgctcaagatcaacgtgttcacccagaactgtcttcatctgggatccaaatcatttagccacactttcgggatacttcgaaaatatcactctgtcttcaaggtgagtttgttgattcgtattaagttatatttactataccctcttcttcatcaatttctatatcatttacgtttccattttgtttttaggatttggttgcaggagatccagagaggcaggccgcggtcttgaacggaatcttcgatgtgtgggtcgccagcgatcagtacaaatttgtggtgaccgaaaagctggtcacggggttgataattgagcccattagcgttgtgcgttggatcttcggcccatcgatgcgcaaggagctcaccaagatatacatttgggagctgctccactccgctctccgccacctgaagcgtgtccaacaaaagatcgaagtcgtggatgtcgatgatccaagtgcatgcgatcctgtagtcaaaggcattctgttcaccattgtgcagcgttttgtgaagactctttgcggtgctccgtttgcagacgagggaacagaggagcattactggttccagtgggttctgggcagactggaggagacgctctttatctatgcggatgactttagggtgatcaataacaagttgattaaaatgtccgaggatgcatcagatctcaggcctgaaatctcaaaaaccattgcggcttttgtggcttgcgtcatgtaacttctgttgaagatttcattcccgactctcgatttacgaatttgacaaccaactggtgatttacttattcaacggacaaactcaatatacactcccaaaaaaaaaatgtgtacaaaaaacactatacaattttaataattttttattactttgggagaaataatactgctatcaaagaaacttcagtggtgctttttatttatatacttttagtggttaggtctttagcttttattaattttcagaggaaacgctttttttttattggtgctagtatttttcgccacagtgtatgactgcaatttttaatttaatacatcgcaatttgaaaaagaattgcgcgctaatctctgctatgtttttagtattttcgcagcctattttgaagggatgtgtatcgataatatcacagaatactttattatcgactacaatcgaatatgtcggtgtagaaatagcttaagatattgacagtaaaaaaaatgtaaaatatgaaaaactttctttgtatggcatactggtatactgtacgaaacggcgcgcctttcaaatgaaatgaccagtgacatgtgaaggtattgccatggataaatacatttgatgtttatctaaccccactgttgaaaatatgttattactagtcagaatcgttcgtttcactagcggcttacatgtacatagatgaaatgaatggaaagtacaattataattatatatcattaattaggaacgtgcaaacattatgatggctaatatagtgtgactatacatttaaagatcagattaatgaaaaaaacccatatcttccttgtagattcatatcatacgcgtgtcaaataataattattggcatttttatatatttcacgtgtgtcgcttgagtgctatttaaggttaagcgagacgcaaaatcaaattactaaaaaagtgaaatatggggtgcgaaacttcagtattatgcacgttgctgattttcttccaaattattggtcggtcattt

SEQ ID NO: 17534 - DNA, 2244 bp, DROSOPHILA
atgggccgtcgtaagcgtgaagactcctctgacgaggagggagacgactgtcgccagaagaggactgccgagacgacggtgaagaccgtggagcagctgatgagagagcttagtttcccggggcacactccgctcgaattgaagctggggaacctgggttacctgctaggcaaagggatgagtgttgacctgaaggagaacctcataaatgagctagtaatatgtctgggctattatcccggacaggccagtgcctatgccacacttgtgggcctaattaatgtcgcagactttgaattcggctccgagtgcctgttgttcatggcgcacaaggtgggagagtccgtgcacattcgcgattggaacaggtgccgtggagtggttcactgcatggtggatctgtatcactgccaggtgctcccgtcgtcctatattctaaaattgctcgcagccttcttgaaggactgcgaggctctgaaggatccggacgatctggtgggcgtcacaccgcagatacgacgcgattttcttgcctactgtgtactatccgccatgccccttattgggcgcgatttggagggggagacggcgtttgataagctgatagtctcactccagatttacattaagaagcggtccgctctgcacaccaacatgttgagtgtgtggccggatttcaatcagagggactacctggagctgttgtggcagcaggtggacggtatgaggcagaaccattgggccgaaccggagcatcagttgatcccccgaccttacaagtccttctctgagaccttgagccacggccgaatccaccagctaagggattatgatttggccgcccatgaggagcgatgtcggtatccgctgccgcgtgtatgttttcgcatcttctcctgcgactctgtcggcgagatccctaatatgcccccgccggtgagcatcgaaaggcatctgctggaggcccatattctggacatactgatctcttttcataaggagagaaaaatctgtgccgatagcctcttgatgtacgccgcctccaagccccagttgccggtctattactgcattgtggaggtgatcttgggcgagatgctgcggctgcccaccgccaattggagcaccattgcctacggatccattctggtggagctgtgcaagcgccaaccggacaagataccccaggtggtggcccaggccttggatataatctataatcgactgaactccatgagcgtagcttgcttcgaccgcctggtcaactgggtgtcgcatcacatcagcaacttcgggtttaactgccagtggagcaagtgggctcagggtcttccatcgccaatcgatccgagtgccaccaatctgcagccaaaggtggttttcctgagggaattgctcaagaagtgcttcagaattaaagatgtagtgccggatatactggccgattttcttccgccgccggtactgccgcacttcaagtttgtcgacgaaacccttcctggtgccattttgtccaaggatctgctggaggcgatgcgcagcccgcaagcaagccccgaaatgatctctgaaattattaaatccagcacgggaatcggtccgctgctcaagatcaacgtgttcacccagaactgtcttcatctgggatccaaatcatttagccacactttcgggatacttcgaaaatatcactctgtcttcaaggatttggttgcaggagatccagagaggcaggccgcggtcttgaacggaatcttcgatgtgtgggtcgccagcgatcagtacaaatttgtggtgaccgaaaagctggtcacggggttgataattgagcccattagcgttgtgcgttggatcttcggcccatcgatgcgcaaggagctcaccaagatatacatttgggagctgctccactccgctctccgccacctgaagcgtgtccaacaaaagatcgaagtcgtggatgtcgatgatccaagtgcatgcgatcctgtagtcaaaggcattctgttcaccattgtgcagcgttttgtgaagactctttgcggtgctccgtttgcagacgagggaacagaggagcattactggttccagtgggttctgggcagactggaggagacgctctttatctatgcggatgactttagggtgatcaataacaagttgattaaaatgtccgaggatgcatcagatctcaggcctgaaatctcaaaaaccattgcggcttttgtggcttgcgtcatgtaa

SEQ ID NO: 17535 - protein, 747 aa, DROSOPHILA
MGRRKREDSSDEEGDDCRQKRTAETTVKTVEQLMRELSFPGHTPLELKLGNLGYLLGKGMSVDLKENLINELVICLGYYPGQASAYATLVGLINVADFEFGSECLLFMAHKVGESVHIRDWNRCRGVVHCMVDLYHCQVLPSSYILKLLAAFLKDCEALKDPDDLVGVTPQIRRDFLAYCVLSAMPLIGRDLEGETAFDKLIVSLQIYIKKRSALHTNMLSVWPDFNQRDYLELLWQQVDGMRQNHWAEPEHQLIPRPYKSFSETLSHGRIHQLRDYDLAAHEERCRYPLPRVCFRIFSCDSVGEIPNMPPPVSIERHLLEAHILDILISFHKERKICADSLLMYAASKPQLPVYYCIVEVILGEMLRLPTANWSTIAYGSILVELCKRQPDKIPQVVAQALDIIYNRLNSMSVACFDRLVNWVSHHISNFGFNCQWSKWAQGLPSPIDPSATNLQPKVVFLRELLKKCFRIKDVVPDILADFLPPPVLPHFKFVDETLPGAILSKDLLEAMRSPQASPEMISEIIKSSTGIGPLLKINVFTQNCLHLGSKSFSHTFGILRKYHSVFKDLVAGDPERQAAVLNGIFDVWVASDQYKFVVTEKLVTGLIIEPISVVRWIFGPSMRKELTKIYIWELLHSALRHLKRVQQKIEVVDVDDPSACDPVVKGILFTIVQRFVKTLCGAPFADEGTEEHYWFQWVLGRLEETLFIYADDFRVINNKLIKMSEDASDLRPEISKTIAAFVACVM

SEQ ID NO: 17536 - DNA, 4052 bp, DROSOPHILA
cactcttttacaaagtctggaataatggcggttagaatcccctggtgccttagatctttcggcaatgcggtgagtacttcaaaaaggagtatttttaatactaaagaaaataaatttttaattctacgaatagagtattttatattttgatttaacatttcatattattagcattattcgacttcaaagttctccctgtcagatacggaattcaagtcctcgacaccctcatcttggtccgaatcctcatagattggttgcaccgatgaatgatgaccaccaaaaccaggtctagtggtcctgtgatagctcccatttcgaattggggctgggttactccaagcagcatggtttatctcatgattcacaaaaatgttcccattttcatcgggacttgtccttcttaagctatagattcctggctcgtccttgagggcaatcaaacattaaagcaatggcaaattaaaattttaagcacttacggaaatttcaatttggttttccataggattgtcagtctgcgatggaaatgtaattgacggggctcagcacataatgcattatttttgtactcactctatgttgtcttcgaagcctaaaaatattacccatttcaatggttgtaattgcaaggttgattaagttgattaaaatgcgaagatttcagctgaagtgccgatagacgtaggatattctatcgcttcgcagagtgcccatttgtcttagatatcgattttgagtcaagctaacgtcaatataacgttgttgcaggtcagctttagagggactgtacacaaaactaaaaagttatattgatctatcgaaaaatgttatggaaataaaaaaaaaaaaaaacactccaatataaacaaatattggtggtcatttattaaacgaagttcactttaatcttcacaactatattagcactttaaacaaaatttaacctttaaccttaaatggaaaactgagcaggtacccccgatcctcgcttggtgtttcatgtgtcatgtggtaccggtggcacccagccgtgaaaaacggcctccagttcggcggcgaccttcaggcagagtttgtcctgatattgggcggccaccacctgcaaccctatgggcattccccgttgatttgtgcccatgggcacatgggtggcgggcagaccaaggatgttgaacagcagcagattgtcgatccccgtcacgtttaacagcgaggtgtgaaaacatagggcgctagtgtggaaggtgggcatgatgaggactccttgggtaccaagcaattgctgtgatgggttttaaatggtcagtataacttcaagaatgatttaattcgcttacattcagatggctctttattttctgggcctcaactcggtattcttccatgtttccagtggccataaggccgttgaatcgcttcatcacctccagtaccatggcctctttggtgaagattgagtgacctatgatgctgttgaagagttccaccatcagcaaacgcatcgatggatcacgatccgcccgctgtgttacgatactgggcagacccttcaagtccaccagggaaaccagggcaatctcgagagagtttctcaggaatttaagatccaactgattggcaaaatagcattaggtcgagaaactctacaaagttgtacttaccttcttggactgcacacctcctctttccaagcacgtgacagctttggtgatggccagttttatgtcgaagtccaccacgggatgggtgaggcagttaaagccggagtatccaaaggcatagtatacctaagcgaaaataagctttgactattatacatttcctagtttgggaaatctcaccttcatgtccttcagggcaactggttcagacattttcagtttgtgttttttatcgcccgccattatttccaacagcaagggcaaatccctggcgaatcttgtgatgggaccgatctgcagcatctcggagaatttcttgtccgtcaacgagtaggggaagtgacccttgaccgacgtaagcccgccagtgggcttgtggccaaaaacgccgcagaacagagccggcaggcgaatggaaccactgatatcggagcccacaccaaaagttgtggctccacagccattcaatgatgcctcgccgccagaagatccggcggaagttcgttgcagatcatatggattcaagcaacgtccttggatattattgctggtttcgaaactcatgcaaaactctggattggcagacaccaaaaggggtatgccaccagcagcacggaccagttcaaccacatcgccgtcctggggggctttcatatttttgcgagcaagactgcccacggcaaaggataatcctattaaccagtgaaaaatataagtttctgctatatttttagtgattttgagtatctgaaacatacctttaagaccacatgactccttgacagtaaacggtacacccagtatgggatacttggtgtacagggccacacgatcgaactcagagctcgccttttcgatgaactgatctgccaattttgcatcttggagggcagcctcgaatcgatcctcgacaacggcattcagagaaggattcacttcctgcacacgtgctatataggcgctaaccaactccaccgaggtgatctggaatcgaaccccgacatatatgacttgcaaatgtcccacacgaatgacgcgattggacttggagactcacctcgccgcgtcgcaattgggtgaccaattcaacgacggacttcttcagcaggggattacgaatgcccgaaaatttgggtttctgacggggcaatacaaaatctagaatcttattcaccaacatgccaaaggcattcagaatgaaggccagcagtcgtagaatgatctccatgtcgagcaggcgttcgggtcacaaaaggttggggtattcaaatcactggactttgatcggacctcagcgtaagtgggttaactatagctgacgttggtttgcctaggaggtggtatggggatcgggaactgctgctgcacctggaacaccaccgaacacttcgactgcggatcgtggactacgcgtggcgattgacactcgcacttatcgtcccttgttttccatttcaatttgaatttaatttcaaagttagctcgggttggcattaaccaacactatataaactttggatgttctcgttttcgaaaatcattttgaaaaaaaaaaatacttaaagaaaaaatagctctggcttttaactcaaattaatttaaagaattcaattaacaataatttaaaaccaattgaaagtagtcgctacacttctaaaaataaaatcattacttacctaaaaaaagcgtcacccttcgtatcataaaaaatgcaattattcattcatttatttatttagtaataattttagttattgttacacttatcacttacgtgctaaatggaaacgttcaacaaaagcaaaaacttgtttagcacattactcactggaaaacgaatcgaatcggctaacgaaacggttaacaaataacaaagtacttcaaccgagaacaaagattttcagaatgagagtgaactcagttaggcaacttggcaaaggcgctaaggagacgtctatatatccgtataagtataagttgctggcttgcgcaaaaattgacatctatgtagctatatgtatgtatcttcgtatgctctacactcatgaatattcaaacaaaactcttcaacttgtctggcatatatccatagacaattacgcgggtatgtatgctgggttttgtgttcttaaaatcgtatatctgctgcaggattgacatcgaactgcttaaccccacgacggcaaccattcgtcgaaaaagtttgaacacagtttatatttttgcaatattctaagtactataacctaccaaaataactgtaaaagaaagtttctatgaacgtttgaaatcaaaattaggtccgattttgcgtagttttcgacaaagtgtcaccgtcaaaagggcttcgactggcatatccctcaaagggttaacatgcttttcttt

SEQ ID NO: 17537 - DNA, 1753 bp, DROSOPHILA
agtgttcggtggtgttccaggtgcagcagcagttcccgatccccataccacctcctaggcaaaccaacgtcagctatagttaacccacttacgctgaggtccgatcaaagtccagtgatttgaataccccaaccttttgtgacccgaacgcctgctcgacatggagatcattctacgactgctggccttcattctgaatgcctttggcatgttggtgaataagattctagattttgtattgccccgtcagaaacccaaattttcgggcattcgtaatcccctgctgaagaagtccgtcgttgaattggtcacccaattgcgacgcggcgagatcacctcggtggagttggttagcgcctatatagcacgtgtgcaggaagtgaatccttctctgaatgccgttgtcgaggatcgattcgaggctgccctccaagatgcaaaattggcagatcagttcatcgaaaaggcgagctctgagttcgatcgtgtggccctgtacaccaagtatcccatactgggtgtaccgtttactgtcaaggagtcatgtggtcttaaaggattatcctttgccgtgggcagtcttgctcgcaaaaatatgaaagccccccaggacggcgatgtggttgaactggtccgtgctgctggtggcataccccttttggtgtctgccaatccagagttttgcatgagtttcgaaaccagcaataatatccaaggacgttgcttgaatccatatgatctgcaacgaacttccgccggatcttctggcggcgaggcatcattgaatggctgtggagccacaacttttggtgtgggctccgatatcagtggttccattcgcctgccggctctgttctgcggcgtttttggccacaagcccactggcgggcttacgtcggtcaagggtcacttcccctactcgttgacggacaagaaattctccgagatgctgcagatcggtcccatcacaagattcgccagggatttgcccttgctgttggaaataatggcgggcgataaaaaacacaaactgaaaatgtctgaaccagttgccctgaaggacatgaaggtatactatgcctttggatactccggctttaactgcctcacccatcccgtggtggacttcgacataaaactggccatcaccaaagctgtcacgtgcttggaaagaggaggtgtgcagtccaagaagttggatcttaaattcctgagaaactctctcgagattgccctggtttccctggtggacttgaagggtctgcccagtatcgtaacacagcgggcggatcgtgatccatcgatgcgtttgctgatggtggaactcttcaacagcatcataggtcactcaatcttcaccaaagaggccatggtactggaggtgatgaagcgattcaacggccttatggccactggaaacatggaagaataccgagttgaggcccagaaaataaagagccatctgaatcaattgcttggtacccaaggagtcctcatcatgcccaccttccacactagcgccctatgttttcacacctcgctgttaaacgtgacggggatcgacaatctgctgctgttcaacatccttggtctgcccgccacccatgtgcccatgggcacaaatcaacggggaatgcccatagggttgcaggtggtggccgcccaatatcaggacaaactctgcctgaaggtcgccgccgaactggaggccgtttttcacggctgggtgccaccggtaccacatgacacatga

SEQ ID NO: 17538 - protein, 530 aa, DROSOPHILA
MEIILRLLAFILNAFGMLVNKILDFVLPRQKPKFSGIRNPLLKKSVVELVTQLRRGEITSVELVSAYIARVQEVNPSLNAVVEDRFEAALQDAKLADQFIEKASSEFDRVALYTKYPILGVPFTVKESCGLKGLSFAVGSLARKNMKAPQDGDVVELVRAAGGIPLLVSANPEFCMSFETSNNIQGRCLNPYDLQRTSAGSSGGEASLNGCGATTFGVGSDISGSIRLPALFCGVFGHKPTGGLTSVKGHFPYSLTDKKFSEMLQIGPITRFARDLPLLLEIMAGDKKHKLKMSEPVALKDMKVYYAFGYSGFNCLTHPVVDFDIKLAITKAVTCLERGGVQSKKLDLKFLRNSLEIALVSLVDLKGLPSIVTQRADRDPSMRLLMVELFNSIIGHSIFTKEAMVLEVMKRFNGLMATGNMEEYRVEAQKIKSHLNQLLGTQGVLIMPTFHTSALCFHTSLLNVTGIDNLLLFNILGLPATHVPMGTNQRGMPIGLQVVAAQYQDKLCLKVAAELEAVFHGWVPPVPHDT

SEQ ID NO: 17539 - DNA, 5818 bp, DROSOPHILA
gagacaaccaaagacgtggatgacattgatgagtcggagctagaggagggcgaagtcaagcctaagcaggcgaaagagatgagcgtccgctttgtaagcctcaacgaacaggaagagacggagccgctggagaatcatcatcagacgctgatggacctgcaccaccagggcaacgccgtggaagccgtcagcttccaggccaacgagagcggtgaactgcactaccagaccacaccaacccaaagcacgggcagcagctcagtgcacgtaatgcccacacgaatcattaagatccagcggcgggacacgtcgagtgggcaggaggatagctactttgaggagcacacgcaactgcatccgccgccggtcaaacgcatgtactacgaagccagtccagcgtcgcacaacaccacctccattctgtcccccgcactggaaagcagtgccaatggcacagccagcagtgtgctgaccacctcgcccggaataaccatgagtaacttgcgcttgcccaaggtgaacacgccgcccaaaccagcccaggcccaagccatccccagtccacctccgcccaccattgtcagcctgccgccagcgcgcgacgagtttgcaacgtatggagagtacgtggccaacgagatgcgcgccatcagcaatcgggaggtgcttgtcgccctcaagcaccgcatcaacacggccatcttcgaggctagcatggccgaaatagccccgaaatagattgatcacttagctagagctattaactacaactttaggtttaaggcctttgtctctgtgctttttataggcctcgtcccccgtgacttgtattctcatttgaatttgtacatttaacatatatatgtatgtaacgatttaaatactaagccaaatataaaatttagtggaatttcaaaaataagttcaattggcagcaggcccgtttaattctgtttcgagtttgggggaaatttatttcattgtttcgttggcactcaagatgcagaatcccatttgtgaaccgttcaccagttggccggtaaagttcgacatcaaccagctcatcaaggagttccagcccgaggagaaggggcgccaggtagatgaggataagtcgccgcgggactttctccacctacccgacaacaactgggtggtcctgcccagttttaagtaccaattcgagcacttgaccccgtatctttcctgccgccagagcaaatatatgcggtgccgctttcagaagtttttagataatgttcccagcagctatgtgaccatctccttgtatggctccaatgtgagcaagtgggttatcttcttaaaaatgtattagaaagcacttcgtgaaataacaatcctcttctagcatgcccaagccgaggcgaaagagtctgaatggccagttctacggggtggataacaaactggctcctgttccggcggtcgcagatcctcgctctcctccgcaccgaaagtagtgatataaattaacaagcaatttaaaatttttggtggaattactgcttagataaatataatattctttttgttctatgcctacatttttcaaaaaagaatttcaatttaaattcaaatcagcgatattgccggactgtcgtattttaacagaacctctggactaccgttatttcgtcagctgtacgtttctaacggttaagtggacggttacactgcaaacggtaaaaatcaataatgcagaaatagcgggcgaaaaaaaatgtttacaaaatgcattagttgctgtggcctcgcaataatctcggtttttttcgcctgccttttcgtcgagaattgcggtgagcacagaaatagaccataaaaagcaaggatcttgataaagtgtcctttttctttccgttagcggccctgcaaaagacgctgcgccactacgaaatttttcacaaggacgatgtggtgcacagggtggtgaaaaggggtgccaagcacagcacgaatcccttcaacaccatcaaggaagtggagttcaccacgctgggcaagaacttccggctgatcctgcatccgcacagggatgtcctgcacagcaaattcagggcctacgccgtggatgcggatggcaacgaaacggtggtgcatatgggtaagatctattgtatatatagatccatagcaaatttctaagcacttaatctccgcagatcacgatagcttctattcgggtcgggtgtttggcgaactggagtcctctgtgcgtgcccacatcgaagacggtaccatgaccatgtccattcatttgccggaggaaacctatcacattgagccctcctggcgacacctgccggaggccaagaaggacaccatggtggcttacaaggcctcggatgtgaaagtgcacaagaatgaggcgggtgccacccccaaaacctgtggctacatcaaggagggtctcgagctggaggacaaggagcacggtgatactctggacaatgagctgcacacgagggagaagcgtcagtccgatcagtacgagtacacgcccaccaaaacccggtgtcccttgctcttggtggcagactatcgattctttcaggaaatgggtggtggcaacaccaagaccaccattaactacttggtgagtttcttaaagaatccacgttctatcatctagtaacttttaatctttagataagcctcatcgatcgggtgcacaagatctacaacgacactgtgtggcaggaccgctcggatcaggagggattcaagggcatgggctttgtgatcaagaagatcgtggtgcactcggagcccacgagactgcgaggaggcgaggcacactacaatatgatccgtgagaagtgggatgtgcgcaatctcctggaggtgagttgacttcatcatagccccgtcacttttcgtgtagctgctctacctcatggtcatctaactcttgtatctctcactttaactccgactcctccgtggccatttcaccggctaggtcttctcccgggagtacagccacaaagacttttgccttgcccatctctttaccgatctcaagttcgaaggcggcattttgggcctggcctacgtgggctccccccgtcgcaactccgttggcggcatttgcactccaggttgctacacccagttgactctcatatttgtccttttcatttggcttatagactttcgtttccttggtttcctttttctttagttttcagcttgttttttaggggtgctatagaagtcccaagagggtttcttgcatacccttaagttgtgtatcccaaactaatttattttcgtttcgtctccaagaatacttcaaaaatggttacactctgtacttgaactcgggtctgagcagctcccgcaaccactatggtcagcgggtcatcaccagggaggctgacctggtcacggcccatgagtttggacacaactggggctcggaacacgaccccgacattccggagtgctcacctagcgcctcgcaaggaggcagtttcctcatgtacacgtactccgtcagtggctacgatgtgaacaataaggtatggttctcctgtacctccaccaatagaattttttaacgcctttccattccttaacagaaattctccccctgctccctgcgttcgatccgtaaggtgctgcaagccaaatcgggcagatgcttttcagagcccgaagagtccttctgcggcaacctgcgagtcgagggcgacgagcagtgtgatgctggtcttttgggcaccgaggacaacgactcatgctgcgacaagaactgcaagctgcgccggaaccaaggagccatgtgcagcgacaagaattcaccgtgctgccagaactgtcagttcatggcctccggaatgaagtgccgcgaggcgcagtacgccacctgcgagcaggaggctcgctgtaccggcgcccacgccgagtgccccaaatcgccggccatggcggacggaaccacctgccaggagcggggtcagtgccggaatggcaaatgcgtgccgtactgcgagacccagggtctccaaagctgcatgtgtgatatcatcgcggatgcctgcaagcggtgctgtcgcatgagcatcaatgagacttgcttccccgtagagccacctgatgtcctacccgatggcacaccctgcatcacaggattctgcaacaaggtatgcttgtggattgactccttacattgcccataattatgctaagctgcgatttctttcagggcgtatgcgaaaagaccatacaggatgtggtggagcgcttctgggacatcatcgaggagataaatgtggccaagaccttgaggtttctcaaggacaacattgtcagtaagtattgcaatcttaaatattacattctgaagatccccactaagccacacttgctcaatcatattttcagtggccgttgtcctcgtcactgcagtcttttggattcccatcagttgcgtcatatcttacttcgaccgcaagaagctgcgccatgaaatgaagctgattgagtggagccagaaactggaccttatacatcccagtgacgagaggcgtcgagtgattcacatacggtaggcgctcagcctcctactttataattatatactgataaccaaccaccaatctatactttcagagtgccacgccagaagatttcggtggcccgagcctgtaattagcacaaaaacccagtgggttccttttgttttaatcttccgtgagcattcttcttaaaactgccacaattcgtttacattaagtgacatatttgaacatacgcaacacagaatgaataaaattccatataatatagaccaaaaacaaaaggtcattataattggatggtttctttacattattaaagtcgtattgaagtttttatttttttcggatcatttagttagcttactggagtgtaatgtgtttctacttcttcttattactcttgccgttcgtctgaggagctgcttcttcgtcgaattccagttcgctatcctcctcctcgtccgaatactcctcgtaaatctgaccgtcgtcaaactcgccaaagttcatctcgacctgagggtacggcaatttgttaggaacaggaacccaaagtagatagaaagatagatagatggatggatggatggatggagctcaccttgccgcatacgtgtacgggtccacttccctgcaccagtttgaaggtcactgatccattggggaactcgacatttggtcttaagctacgggtctcgccgaccttcaacacggcaatggggatcttcaaggttttcttctcgccatcgtcgtttatgttcgtctccgcctggaagcgaaacattaaatttgtgtgcattttatcactgtataatttccgagtttttcgcgaaatatgatatgagttaaatcagccatgtcgcctttaaatttacgacctgcgacgcggggcagattgccggtatcgaggctcacctgtacaacgttgaattcgccggtcttcgcttctgggccgagggaaatctgtttgatgatgagcttgtgcgagtggacgatgtactcctcgggtacatctgggacctcgaactgtgcgatggcctccttctcgctgagtgtgacacctggaagtggacgaacggcgagaagggttggatttccgactgctttttgccggctggaggggagctgctcgcagcgtggctatgggatggctattggagcgctcttccagcccaaatggcaatggtactcaccataaaacgactcggactccatttgcaggccttggaacacagatgtacagtcaattaataaaagaaccttttgtactc

SEQ ID NO: 17540 - DNA, 2733 bp, DROSOPHILA
atgcagaatcccatttgtgaaccgttcaccagttggccggtaaagttcgacatcaaccagctcatcaaggagttccagcccgaggagaaggggcgccaggtagatgaggataagtcgccgcgggactttctccacctacccgacaacaactgggtggtcctgcccagttttaagtaccaattcgagcacttgaccccgtatctttcctgccgccagagcaaatatatgcggtgccgctttcagaagtttttagataatgttcccagcagctatgtgaccatctccttgtatggctccaatgtgagcaacatgcccaagccgaggcgaaagagtctgaatggccagttctacggggtggataacaaactggctcctgttccggcggtcgcagatcctcgctctcctccgcaccgaaattgctgtggcctcgcaataatctcggtttttttcgcctgccttttcgtcgagaattgcgcggccctgcaaaagacgctgcgccactacgaaatttttcacaaggacgatgtggtgcacagggtggtgaaaaggggtgccaagcacagcacgaatcccttcaacaccatcaaggaagtggagttcaccacgctgggcaagaacttccggctgatcctgcatccgcacagggatgtcctgcacagcaaattcagggcctacgccgtggatgcggatggcaacgaaacggtggtgcatatggatcacgatagcttctattcgggtcgggtgtttggcgaactggagtcctctgtgcgtgcccacatcgaagacggtaccatgaccatgtccattcatttgccggaggaaacctatcacattgagccctcctggcgacacctgccggaggccaagaaggacaccatggtggcttacaaggcctcggatgtgaaagtgcacaagaatgaggcgggtgccacccccaaaacctgtggctacatcaaggagggtctcgagctggaggacaaggagcacggtgatactctggacaatgagctgcacacgagggagaagcgtcagtccgatcagtacgagtacacgcccaccaaaacccggtgtcccttgctcttggtggcagactatcgattctttcaggaaatgggtggtggcaacaccaagaccaccattaactacttgataagcctcatcgatcgggtgcacaagatctacaacgacactgtgtggcaggaccgctcggatcaggagggattcaagggcatgggctttgtgatcaagaagatcgtggtgcactcggagcccacgagactgcgaggaggcgaggcacactacaatatgatccgtgagaagtgggatgtgcgcaatctcctggaggtcttctcccgggagtacagccacaaagacttttgccttgcccatctctttaccgatctcaagttcgaaggcggcattttgggcctggcctacgtgggctccccccgtcgcaactccgttggcggcatttgcactccagaatacttcaaaaatggttacactctgtacttgaactcgggtctgagcagctcccgcaaccactatggtcagcgggtcatcaccagggaggctgacctggtcacggcccatgagtttggacacaactggggctcggaacacgaccccgacattccggagtgctcacctagcgcctcgcaaggaggcagtttcctcatgtacacgtactccgtcagtggctacgatgtgaacaataagaaattctccccctgctccctgcgttcgatccgtaaggtgctgcaagccaaatcgggcagatgcttttcagagcccgaagagtccttctgcggcaacctgcgagtcgagggcgacgagcagtgtgatgctggtcttttgggcaccgaggacaacgactcatgctgcgacaagaactgcaagctgcgccggaaccaaggagccatgtgcagcgacaagaattcaccgtgctgccagaactgtcagttcatggcctccggaatgaagtgccgcgaggcgcagtacgccacctgcgagcaggaggctcgctgtaccggcgcccacgccgagtgccccaaatcgccggccatggcggacggaaccacctgccaggagcggggtcagtgccggaatggcaaatgcgtgccgtactgcgagacccagggtctccaaagctgcatgtgtgatatcatcgcggatgcctgcaagcggtgctgtcgcatgagcatcaatgagacttgcttccccgtagagccacctgatgtcctacccgatggcacaccctgcatcacaggattctgcaacaagggcgtatgcgaaaagaccatacaggatgtggtggagcgcttctgggacatcatcgaggagataaatgtggccaagaccttgaggtttctcaaggacaacattgtcatggccgttgtcctcgtcactgcagtcttttggattcccatcagttgcgtcatatcttacttcgaccgcaagaagctgcgccatgaaatgaagctgattgagtggagccagaaactggaccttatacatcccagtgacgagaggcgtcgagtgattcacatacggagtgccacgccagaagatttcggtggcccgagcctgtaattagcacaaaaacccagtgggttccttttgttttaatcttccgtgagcattcttcttaaaactgccacaattcgtttacattaagtgacatatttgaacatacgcaacacagaatgaataaaattccatataatatagacc

SEQ ID NO: 17541 - protein, 863 aa, DROSOPHILA
MQNPICEPFTSWPVKFDINQLIKEFQPEEKGRQVDEDKSPRDFLHLPDNNWVVLPSFKYQFEHLTPYLSCRQSKYMRCRFQKFLDNVPSSYVTISLYGSNVSNMPKPRRKSLNGQFYGVDNKLAPVPAVADPRSPPHRNCCGLAIISVFFACLFVENCAALQKTLRHYEIFHKDDVVHRVVKRGAKHSTNPFNTIKEVEFTTLGKNFRLILHPHRDVLHSKFRAYAVDADGNETVVHMDHDSFYSGRVFGELESSVRAHIEDGTMTMSIHLPEETYHIEPSWRHLPEAKKDTMVAYKASDVKVHKNEAGATPKTCGYIKEGLELEDKEHGDTLDNELHTREKRQSDQYEYTPTKTRCPLLLVADYRFFQEMGGGNTKTTINYLISLIDRVHKIYNDTVWQDRSDQEGFKGMGFVIKKIVVHSEPTRLRGGEAHYNMIREKWDVRNLLEVFSREYSHKDFCLAHLFTDLKFEGGILGLAYVGSPRRNSVGGICTPEYFKNGYTLYLNSGLSSSRNHYGQRVITREADLVTAHEFGHNWGSEHDPDIPECSPSASQGGSFLMYTYSVSGYDVNNKKFSPCSLRSIRKVLQAKSGRCFSEPEESFCGNLRVEGDEQCDAGLLGTEDNDSCCDKNCKLRRNQGAMCSDKNSPCCQNCQFMASGMKCREAQYATCEQEARCTGAHAECPKSPAMADGTTCQERGQCRNGKCVPYCETQGLQSCMCDIIADACKRCCRMSINETCFPVEPPDVLPDGTPCITGFCNKGVCEKTIQDVVERFWDIIEEINVAKTLRFLKDNIVMAVVLVTAVFWIPISCVISYFDRKKLRHEMKLIEWSQKLDLIHPSDERRRVIHIRSATPEDFGGPSL

SEQ ID NO: 17542 - DNA, 2918 bp, DROSOPHILA
gaaccatgtgttccgcctgaagatcgccggtctgaatgacttcaatatccagaagttcaagctgaacgtgatcaccagcaagattaccttcgattttctgttcaagaacatcgataccaccgcccagaagtacgacactgatacgctgatcgatgccctgcgccagttgggtctgtccgtggagtacgagggatccggagagctgttgttcgatttggtcaacctgcgtattgctggcactctgaagtacaagcttcccatgctgtggggttccgccaagatcacctcgctgaagaccaccatctcgttggagtctgtgacttcggacatcactggattcatgggcaacggcaagatcaaccgcgccatcaacagccagctggagaacatcgtggtaaagggaatcaatggcaaccaggacgccatttccgagaccattgagaacgccatcgtgccgcgagtgaacaagatgctgaagggcaaggacttctggaccgtcgtggacctgatcctggccagcagcgacggtgagagcgaggacgatccgattgtcgttgattgcgatccctccgccgatccctgggcctaaactatgggacagccgtgaataaacacttgtcgatatattcaattattggtctacttttggggtttttatttgtggaatcccattggactctcatttcctgctccaatatccacaatcaatctataattatatgctctgaattcactgaatgtggtttgcctaaacaaagaaaccttttatagctattataattgcggttggacttaaaaacagaataacttatatttattataatgttttgatacatttctgactcgaaacgaatgtgggaacacatcgattatctcttttgcacctgcctaatccaatcttatctattttcgctacttaagtggctaatcgttatttgttgattaggcaagggaaaaaactacttgtactgtttaaacagttagcagttcctatttggcactcgcgatgagaacttcttgtgtaatttttgtggcccttctgtgctgctccttgggctccgccaagctcttcgatgatgagctgcgcgaactgacggagttcctgcgtttgcagatgcgatgtggctacccggccagaggggttcccattttggccccggctcagatggcctacaaggaaattggcatcagaactgagaactttgggtgaatataaacaagaacttcacaaataggagctattcttaatggaaccatactgaaccgcagttgcaatggaaacttcaccgatctgattatcgagggattggatgggtacgagttctccaagctggagtggaacaacattttgcataccattaagttcgacatgaacttccccaagatttccctgaagagcacaaactataaactaaatctcctggctcgtctatttggtgccgatttctccctgtggggtgacggtgccctcagtctggagttgatcaatttccgagcttacggcagtttcgttattcgcccaaagtcggccaccagtggtgtgtacgccaagagctggaaggttaactgggaattggaggaggctaagtcccagaccacgggctttatgaacagtcgtctgtacacgaagttcatcaacgatctgatcgtggagtatctcgatatcatgatcaatgacaaccccacggaagtttcccaattcatggaggagctcattgttccgcccatgaatttggttctggataatctggcctggtatgagattaccgctatcattttgggcctggccgagggaattttgccggtggagccaatttgctgaagtgctgacaaaaacgattgccaggtgttccctgtgcttaaatgtaaaaataatcattaataatcatttgataagaaattaaaaggaactacttgtattttacaattgttttattgttagaaactttctacattcatagctacaagatctaaaatcagtataatagagagcctttaacctaacaataatttgtaggtgactaaatatctatttaaaaaacagtttccttaattataattaaagcattaataaatcatttttttattctactctctttacaggtaagctcgattagatttcccgttgattggcagtgagtatatgaaatattcccggctttcatcatcaattactatttttggggacctccattaagtgttctaatcactttcgaccataaattattgttgatctttgtgcgccgtgaattccctcaatcgaaagcaaagtccctaatcggattgggaaatgagaaaaccgctgccgagcagcaacagcaggacatctcaatcgccgggctgaaaagcgaagcacgagtcctgtcgcagcaggacttcaacgggtggtcctttgattttcggtccaacactttctagcctcagatttgcgagtggcgttgccagccagcagctgcttgatgtttttttttgtcactgttttttttcatagacttttccgatttcgttgagattattttttagattgcggtctaatgtcatcatttgttgttaattagttcagagtgctgtagtgtgaatctcctggatttttttttgtggtcccactcaaaactctctgctcaaaatcctcggcattctttcaccgcaatggaattcgttttggctcatttcatttgcaatttacgagccatctttctcttttctatgtgtgtcttcaggacacaccttgcgtctcataatgcaaaaataaacaaaaagccgctttgggttttgtcatgagtacgtgctcggtgctcggtgcccatctgtgggatgtcctgctggttgtggcattgtctgaaaggaagttttacgacctaccagacagtctgttgcattgagcattgtccttgcctactagcagactttttggccac

SEQ ID NO: 17543 - DNA, 855 bp, DROSOPHILA
ctcgcgatgagaacttcttgtgtaatttttgtggcccttctgtgctgctccttgggctccgccaagctcttcgatgatgagctgcgcgaactgacggagttcctgcgtttgcagatgcgatgtggctacccggccagaggggttcccattttggccccggctcagatggcctacaaggaaattggcatcagaactgagaactttggttgcaatggaaacttcaccgatctgattatcgagggattggatgggtacgagttctccaagctggagtggaacaacattttgcataccattaagttcgacatgaacttccccaagatttccctgaagagcacaaactataaactaaatctcctggctcgtctatttggtgccgatttctccctgtggggtgacggtgccctcagtctggagttgatcaatttccgagcttacggcagtttcgttattcgcccaaagtcggccaccagtggtgtgtacgccaagagctggaaggttaactgggaattggaggaggctaagtcccagaccacgggctttatgaacagtcgtctgtacacgaagttcatcaacgatctgatcgtggagtatctcgatatcatgatcaatgacaaccccacggaagtttcccaattcatggaggagctcattgttccgcccatgaatttggttctggataatctggcctggtatgagattaccgctatcattttgggcctggccgagggaattttgccggtggagccaatttgctgaagtgctgacaaaaacgattgccaggtgttccctgtgcttaaatgtaaaaataatcattaataatcatttgataagaaattaaaaggaactacttgt

SEQ ID NO: 17544 - protein, 250 aa, DROSOPHILA
MRTSCVIFVALLCCSLGSAKLFDDELRELTEFLRLQMRCGYPARGVPILAPAQMAYKEIGIRTENFGCNGNFTDLIIEGLDGYEFSKLEWNNILHTIKFDMNFPKISLKSTNYKLNLLARLFGADFSLWGDGALSLELINFRAYGSFVIRPKSATSGVYAKSWKVNWELEEAKSQTTGFMNSRLYTKFINDLIVEYLDIMINDNPTEVSQFMEELIVPPMNLVLDNLAWYEITAIILGLAEGILPVEPIC

SEQ ID NO: 17545 - DNA, 7876 bp, DROSOPHILA
ctaaaaattaggtttgtacagcatgttttgttgtaaaaattttgcattaagtaaatttcgattatacgtagtttaaatatcacttatgtaaatattttcgttttaagccacacgggttaattttaaattttgcaatttttagtttacgttttgcggacggttacaagaacatgttgcattcgcgaaaaatgtacaaatttttaaacatattatttataaatagcattttaaatatagagtgttttcgctctccaatatatttttgtttcttgtagtgtttagaattagatggtttctgttttgtgttctataaattaggtttcgtatttatgcagtcgttaattgtatttttcttttcataaattagttttcgcaatttaaattcgcttacttatttttcaataaaaaaataattatcaaaatcaacaactaatcacaaggcaaatagagtttgaagatatagaaattggcgggggaggggcgttcgtatatattttttgggcaacgcaggcgagttttagtggatgcttagcgaaacgagtcaacgagtggcgagtaaaaatagcgaacgagtaccaacaccagagaaagagaagtagagtcagcgagtggaggtagaaaggttgtaagggtccccagggggtggatgaatgcgtgattggatgagattctttttagatggcacaaatgcagcgagtggcgagaaacgggttaacaggcacttagtgggcgattggcgagtaactagaagcaccttttcacaatctgatttctttcgaagtaacatctgaaatcttttatccgaagcgttaccagttaaatttagatgaagaaacttagtggtgaaatcagatcgtgaaatgatggataacagtaatattgagcagatagcgagtgacgagcgacgagtggggacatcgagtcccggtccatctcgtctctctgcctcctcgttatggcttacttttttatcagcgagcggaccttcttcatcgttcgattaaatatcgtcttgttgtttcctccggcactaaagttggagcccagtgaggagttggaggtcttgttgctggtcaaactggctccccgatgaaccgaggcagatgccctctgttggttgccatgtcgcagacattcttctggctgatcctcccgctcgctttccgtcgcactcacaccctcaggactctggcgttcccttaccctttccatcgctggttgcggaggtctttcgggagtgggggatttcgaggaggagctggtgtcccttcgttggggctgcggggtcattggaatggccaggttttgcatactttgcgttccatctgcgagttcgctactcggtggaagcagctctgctaaagtctgtttgctgagaatatgatccagacttcgggactttctgtgctgctgtacatttcccggtggggataaagtatgcttgtcacgccgggtcaccgagtcattgagggcggcatccgtcacctcttcttcgggctgcagagtgcttgtggaactggcgttcgttagagctgtactacccgctgtcaccttggccgcagctgctgctattctttgctctggagttgagcccgcctgatctagaagcccatccacactgtgcgatcgatagccactgcccatgccggaaccagatccatgacctaatcccgcggcggaactcctccgcggaggcagatacgccaatggcatcatattctgcatggacgcggaacccgctccggttttgtggagcagggctgcctgttgggtgcgatacggggtgaggatttgggagcgtttcgagggcgcccgagaataaccactcaactgcgaggtgctgcccctttggcgggccggtgagggagattggcggtacctatttgcctggtgattagctgcgcatgagacggcgtttcaagcgatttcgagtgtgtggcaatcagaattaaatcaattattaattggtaagagtaaagagtaatggatagtgtagttgtaatgggttgcttgagttgagtgagaaagtagtaggtgtatgggtgggggtagaaagtgagagagagttgtactagagagtgtgacttgaggatctctgcttaagcctagaacatattcgagttggctagctctgtaaatcgttagcataacttggctcactctacgctggagccgctgggggactctggttagagcttgagcttgaatttgagttgggagtagaagaagtagtagatgtagtactcgttggcccaccttgtccgctgccattggccgccaccatcaggccatccaccacactgcccgtaacgccgccaccacctcctcctccagttcctgctcctgatccggcgcctgctcctccgctctggtagtcggagtcgttgctgtgcattctttggtatgagaccgaaccgggggtgccgggcaccatcgccgcaatgcgatcgatattcttttcgccgcgcaaaaatctgccgcatcagaagaatgggaatcgtttaagtgtttagttgtgaagtattctgggttattcaggcttaaggtaatcggtaatggagttatccatcgtcctagtcccaggctaatccagatctaaatgcgtcgcttaatgtacctttcgagcttatcgatgcatgcgtcctggtagtcgtggatccaattaacaccgttaaaatgggccacactgcgcatgtcctcgggaagtcgctccacctcgggccaatcgaattgctggtctatgatgggtataatgttgcagttcgagttcagggcagccacgatttcctgcgaaacgagtatccccttatgagtacctattggttaaaggtcgatcggcaaatgcggtactcacgcgatgcacccagtccttgcagtcctcgtcgttaatgcagcggtgcagggcatcgggagttaatactaagacaaagttctttgcctgtcgaatactgttcaataggccgttgtcaaatttgcccgcctccaggcgctccacgtcgatgaaaacggagaaaccacgaagctgcagatgcacctgtaacgaatgggatcttgtaagtggttatgcccttctcaaccacattaagtatacgcaccttgagaagactggctagttgggagccgtttgatcgcctatagctaacgaaaacatctagcgtcttggccatgttctcctccgacgagctgggcagcgaattctccaagtttttgaccgcattgagaattctcagacgatggatcgagttgtggatgccacactctgtcatcagcatatcctcattgacatgcggcagtgcacacttgtcaattccagcattcagcatggcatacgtgtaggtgcagtaatcagtaccgatctccgagagaaattggtgcatcttggccgtgtccttggatgagtagtcagccatacgcttgagattttgcagctcgcgttcaaaacgctttagaagtattccattaccgattccaatatcagcccggaggttatcctgattgagcttcagtaaaagatccccgtccacctgggactcgttgaacttgtcgatgtagtcattgaaaccgatttgctttacccactcctgcacatcctccacggaccacaagggaacctgttgggacagcttgtgcggaactgtctctccaatcaatctcagagcctgagcggcgaacttggatgcaatggcatttggacagctggccacatttttcaaagcttcaatagcgttgatctcgcggaagatgtcggtgttaccctgctccctcttgatgcccgcctccatgcaaaaatggaaggcagccagattgcgggcctcttcgcgattggaactcaaaactggaaccaatcttttcagccaatgtttgctttgcccgtgggcatgtgccagattggatctcgcaaaagccgaggggtcgtgggaggtgacaaagggttccaccaaatccaagcatccagacttcagcacctcggcttcaatctccttgttggctaccagcactgcaatggccaagcaggcatagtacttgatgttatcatcgttgtggaaggccaatgggaacaaccacatgggcaccttgcgtaggatcatctcctcctgattctcggctccaccatatagagataaatttgccagtgcactagcgcagtgtcgcagagtttccaaatcactggtgcggcactcaaagagcacggcatccagaccacctagccttatcacatccgaacaggtgccctcggagtgtttgaacagatgctccaggatgccagtgcccacgcgggagtgctccatattggaattctttgtgcagacacaggccacattgaccaccttatccagaccattatccaccacatgtttgcggttctcggtggttaggcactgctcaagaagctgtgcggaggaaaactggagatcgggcttaacgcagttcttcatgagaagatcgaggccgccactttggcgcagggaattgcacaatgagtagcccagctcgtggccatgtgtgggcactgcccaagctcgacgaatgacttcgttgatcttctccaggtactgagacttcttgccaccaacatcgtggacggttatggcactaccacctcgctcatcttcttgcagggagctcactattgaggtcagcatattggaatacttgttgatggtctgctcgatctcctgctgcccactgccagctgtcagcgacttgaggtcatccaacttgagatcggcgagcttcagcatctggccattcatcgcggacatttgcgaggagctggtgatcatgctactgccggtactggaaacgcccttgtgcgacatcgagtagttggcctgcgaggcggaggatacatgtttctcctgactgatgatcccgttggaggtcatcgtctgcgattgctgcgactgggatatcgccttcttgtccgcggagaaattctcactttgcaccgtaatactggaggccgccacattgttgctcgcctgctgtgtgatgtcgccggtgcggagtgagagggcttcctggatattatggtgaggcgttatgtgggaaaagggtgaaacaattagtaaggatgcagaaaatataaatcattcgattttgtaatgcagtaacaaacataaaactgttatacactacacaatttacactcatcaggggtcgtggggaaaacaatcatttgaattgggaactttaaaactgcatgtataaccgttttgaaactgtcatacaaactgtcatacacaagctatacctcgctagaaactcataatcacatcatcgtatagcctcaatatctccactaaatctaaactaaagcttaacaaacgcgccccccattctctgttataccttgctctgctccacctcaatgggaatttcgcgtacatttctcatttgattgcagttgtggttattgttgtgattgggtgttgtaattgctgagtggttggtgttgttgatgggcgttggaggtggcagttgttgtggtagttgttgttgttgctgtggtggtggtggtggtggtggcgacagtggacaactggtaattggctgtgggggcgggttagaacttttacgtactctggtgtgcgaactagaactcgacgaggtttgcgacgagcactgcgacgacgaagaagaggaggacgaggatgaagtggaggcagctgcaccagacactctggcagcggacgcagtggacatggtagtggctgtcgttgaacccgccaccacttgaataggctgcggcggtggggagagcggtgaattgattccaaatctattcgagggcgtggccaccggcggcggggataatggcatctccacaatgggactaggcgatcgggttggcgtgaaatccgactgaccgctcgagcggaagatgcccttgcgaacgggccagggtgcctgattggacattgtttctctcgcaaagaggtggcaggtatttcaatgccaaagtcggctcggtagttgctgattatttcgttccgtatataacttgtgtatgtgtacttatatatgtgaatactgatgtttcgtccgcgtattttttgcctgcctatatacttcgtattttatttattttcattcacataaaaatagcgcacaaattggctacgtcgacgtcgccgtcactttctctgtgtgcggtgttgtttctctttttgtttcagtgtattcgggtgttgttgtgctttttttttcgtatctgtgtgtgacactgaccgacaaatagaacttgtaataattctacagcttgatggcaattaacaaggcacttgacacagcttcactgtacaaaacgatgattctattcacattgcagggcatgaaatgaccgaatcgaacacttgttgagccaattttgcatatggaattgggaaaaacttaacgaaggcattggtaaaagctcacatagcgtcgaaagcggtaggccatctgtctttaggtttccgactatccgtttttgatagatacttctttcactttttaaacagatttcattaaatttttattcgttttgtatcttttgtaacctttcagtgaacttttctttagaaccacttgtttctccaaattgaatttcaccactgagtctattcagtttgtaacaatttcaatattcgaaggtcggtttctataattttcgttgagcgttccacctgcgacaatattcccattggtaaacaaaatcgctgtatgcttattttgtgctttaattaggaagtctttgtcacttgcgctctatttgtatttagtgcgatatagccacagtcacacatcagtttcttatatatgcaaatgattatacggttccgatctattgtataattcaactacatatatttcgatttgctgaaacgctcacgacgctcgtctgtctgctactgaggtccgcctatagctctgaggcgttttattcaaaataatttcgaaaataaaataaagagagcacgtccgttttgtttttgccatagaacatacgaaaattcggagcgttaactcgtgggaaataaatcaaaaataagggagaagattgagaagatgggggtgtatgtagtacgacttctaaacgattcttctcccattcttcatttacttctcggaaataaatttgtgcgtgccgttccatgcgattcttgcaattgacgcaaatgtccaaagactatttggattattcgccaatccataaaagcagtatcaaagtattttcattggattttttatgaatgtttaaaaccaggcacttgttggcggcacatggagcgtggccgtttgtctgtttgccatatattttggcggagggccaagcaaaagcagcccatctaattgatgccctcgtgtgagattttatatatttgtctatggattgagttggtatatacccaataagggggatctgtcttcaatggacgacgtgttgatggagagttttgtgatgaatttcacaagtggatttcttcaatggacgagtattgctgttatatgtttactgagtttctccagtgttaagatatgaattatatgaatttgcatctcattttgagcctataagtaagtattcaagtgcgcatttttcccccaatgaatgtactttttccctgatccactgcaaaacaaacgaccatccttgacatttaccataccatgcaacggccaggaatttcattatccaatcataaaataattaagcctaatatacgtatgcaaatcaacaatgatgtaatgcagccgctccaaatgctgattagataaaatctactgttggaactgtgttttttccaaactctaaggaatccaggtaaccctgggtaacaggtgtaatggcgaaaaactacacacacaattatatcattctgggttatattgt

SEQ ID NO: 17546 - DNA, 4231 bp, DROSOPHILA
tcgtgagcgtttcagcaaatcgaaatatattgtcacacacagatacgaaaaaaaaagcacaacaacacccgaatacactgaaacaaaaagagaaacaacaccgcacacagagaaagtgacggcgacgtcgacgtagccaatttgtgcgctatttttatgtgaatgaaaataaataaaatacgaagtatataggcaggcaaaaaatacgcggacgaaacatcagtattcacatatataagtacacatacacaagttatatacggaacgaaataatcagcaactaccgagccgactttggcattgaaatacctgccacctctttgcgagagaaacaatgtccaatcaggcaccctggcccgttcgcaagggcatcttccgctcgagcggtcagtcggatttcacgccaacccgatcgcctagtcccattgtggagatgccattatccccgccgccggtggccacgccctcgaatagatttggaatcaattcaccgctctccccaccgccgcagcctattcaagtggtggcgggttcaacgacagccactaccatgtccactgcgtccgctgccagagtgtctggtgcagctgcctccacttcatcctcgtcctcctcttcttcgtcgtcgcagtgctcgtcgcaaacctcgtcgagttctagttcgcacaccagagtacgtaaaagttctaacccgcccccacagccaattaccagttgtccactgtcgccaccaccaccaccaccaccacagcaacaacaacaactaccacaacaactgccacctccaacgcccatcaacaacaccaaccactcagcaattacaacacccaatcacaacaataaccacaactgcaatcaaatgagaaatgtacgcgaaattcccattgaggtggagcagagcaaggaagccctctcactccgcaccggcgacatcacacagcaggcgagcaacaatgtggcggcctccagtattacggtgcaaagtgagaatttctccgcggacaagaaggcgatatcccagtcgcagcaatcgcagacgatgacctccaacgggatcatcagtcaggagaaacatgtatcctccgcctcgcaggccaactactcgatgtcgcacaagggcgtttccagtaccggcagtagcatgatcaccagctcctcgcaaatgtccgcgatgaatggccagatgctgaagctcgccgatctcaagttggatgacctcaagtcgctgacagctggcagtgggcagcaggagatcgagcagaccatcaacaagtattccaatatgctgacctcaatagtgagctccctgcaagaagatgagcgaggtggtagtgccataaccgtccacgatgttggtggcaagaagtctcagtacctggagaagatcaacgaagtcattcgtcgagcttgggcagtgcccacacatggccacgagctgggctactcattgtgcaattccctgcgccaaagtggcggcctcgatcttctcatgaagaactgcgttaagcccgatctccagttttcctccgcacagcttcttgagcagtgcctaaccaccgagaaccgcaaacatgtggtggataatggtctggataaggtggtcaatgtggcctgtgtctgcacaaagaattccaatatggagcactcccgcgtgggcactggcatcctggagcatctgttcaaacactccgagggcacctgttcggatgtgataaggctaggtggtctggatgccgtgctctttgagtgccgcaccagtgatttggaaactctgcgacactgcgctagtgcactggcaaatttatctctatatggtggagccgagaatcaggaggagatgatcctacgcaaggtgcccatgtggttgttcccattggccttccacaacgatgataacatcaagtactatgcctgcttggccattgcagtgctggtagccaacaaggagattgaagccgaggtgctgaagtctggatgcttggatttggtggaaccctttgtcacctcccacgacccctcggcttttgcgagatccaatctggcacatgcccacgggcaaagcaaacattggctgaaaagattggttccagttttgagttccaatcgcgaagaggcccgcaatctggctgccttccatttttgcatggaggcgggcatcaagagggagcagggtaacaccgacatcttccgcgagatcaacgctattgaagctttgaaaaatgtggccagctgtccaaatgccattgcatccaagttcgccgctcaggctctgagattgattggagagacagttccgcacaagctgtcccaacaggttcccttgtggtccgtggaggatgtgcaggagtgggtaaagcaaatcggtttcaatgactacatcgacaagttcaacgagtcccaggtggacggggatcttttactgaagctcaatcaggataacctccgggctgatattggaatcggtaatggaatacttctaaagcgttttgaacgcgagctgcaaaatctcaagcgtatggctgactactcatccaaggacacggccaagatgcaccaatttctctcggagatcggtactgattactgcacctacacgtatgccatgctgaatgctggaattgacaagtgtgcactgccgcatgtcaatgaggatatgctgatgacagagtgtggcatccacaactcgatccatcgtctgagaattctcaatgcggtcaaaaacttggagaattcgctgcccagctcgtcggaggagaacatggccaagacgctagatgttttcgttagctataggcgatcaaacggctcccaactagccagtcttctcaaggtgcatctgcagcttcgtggtttctccgttttcatcgacgtggagcgcctggaggcgggcaaatttgacaacggcctattgaacagtattcgacaggcaaagaactttgtcttagtattaactcccgatgccctgcaccgctgcattaacgacgaggactgcaaggactgggtgcatcgcgaaatcgtggctgccctgaactcgaactgcaacattatacccatcatagaccagcaattcgattggcccgaggtggagcgacttcccgaggacatgcgcagtgtggcccattttaacggtgttaattggatccacgactaccaggacgcatgcatcgataagctcgaaagatttttgcgcggcgaaaagaatatcgatcgcattgcggcgatggtgcccggcacccccggttcggtctcataccaaagaatgcacagcaacgactccgactaccagagcggaggagcaggcgccggatcaggagcaggaactggaggaggaggtggtggcggcgttacgggcagtgtggtggatggcctgatggtggcggccaatggcagcggacaagctaatcaccaggcaaataggtaccgccaatctccctcaccggcccgccaaaggggcagcacctcgcagttgagtggttattctcgggcgccctcgaaacgctcccaaatcctcaccccgtatcgcacccaacaggcagccctgctccacaaaaccggagcgggttccgcgtccatgcagaatatgatgccattggcgtatctgcctccgcggaggagttccgccgcgggattaggtcatggatctggttccggcatgggcagtggctatcgatcgcacagtgtggatgggcttctagatcaggcgggctcaactccagagcaaagaatagcagcagctgcggccaaggtgacagcgggtagtacagctctaacgaacgccagttccacaagcactctgcagcccgaagaagaggtgacggatgccgccctcaatgactcggtgacccggcgtgacaagcatactttatccccaccgggaaatgtacagcagcacagaaagtcccgaagtctggatcatattctcagcaaacagactttagcagagctgcttccaccgagtagcgaactcgcagatggaacgcaaagtatgcaaaacctggccattccaatgaccccgcagccccaacgaagggacaccagctcctcctcgaaatcccccactcccgaaagacctccgcaaccagcgatggaaagggtaagggaacgccagagtcctgagggtgtgagtgcgacggaaagcgagcgggaggatcagccagaagaatgtctgcgacatggcaaccaacagagggcatctgcctcgtgccggaggaaacaacaagacgatatttaa

SEQ ID NO: 17547 - protein, 1298 aa, DROSOPHILA
MSNQAPWPVRKGIFRSSGQSDFTPTRSPSPIVEMPLSPPPVATPSNRFGINSPLSPPPQPIQVVAGSTTATTMSTASAARVSGAAASTSSSSSSSSSSQCSSQTSSSSSSHTRVRKSSNPPPQPITSCPLSPPPPPPPQQQQQLPQQLPPPTPINNTNHSAITTPNHNNNHNCNQMRNVREIPIEVEQSKEALSLRTGDITQQASNNVAASSITVQSENFSADKKAISQSQQSQTMTSNGIISQEKHVSSASQANYSMSHKGVSSTGSSMITSSSQMSAMNGQMLKLADLKLDDLKSLTAGSGQQEIEQTINKYSNMLTSIVSSLQEDERGGSAITVHDVGGKKSQYLEKINEVIRRAWAVPTHGHELGYSLCNSLRQSGGLDLLMKNCVKPDLQFSSAQLLEQCLTTENRKHVVDNGLDKVVNVACVCTKNSNMEHSRVGTGILEHLFKHSEGTCSDVIRLGGLDAVLFECRTSDLETLRHCASALANLSLYGGAENQEEMILRKVPMWLFPLAFHNDDNIKYYACLAIAVLVANKEIEAEVLKSGCLDLVEPFVTSHDPSAFARSNLAHAHGQSKHWLKRLVPVLSSNREEARNLAAFHFCMEAGIKREQGNTDIFREINAIEALKNVASCPNAIASKFAAQALRLIGETVPHKLSQQVPLWSVEDVQEWVKQIGFNDYIDKFNESQVDGDLLLKLNQDNLRADIGIGNGILLKRFERELQNLKRMADYSSKDTAKMHQFLSEIGTDYCTYTYAMLNAGIDKCALPHVNEDMLMTECGIHNSIHRLRILNAVKNLENSLPSSSEENMAKTLDVFVSYRRSNGSQLASLLKVHLQLRGFSVFIDVERLEAGKFDNGLLNSIRQAKNFVLVLTPDALHRCINDEDCKDWVHREIVAALNSNCNIIPIIDQQFDWPEVERLPEDMRSVAHFNGVNWIHDYQDACIDKLERFLRGEKNIDRIAAMVPGTPGSVSYQRMHSNDSDYQSGGAGAGSGAGTGGGGGGGVTGSVVDGLMVAANGSGQANHQANRYRQSPSPARQRGSTSQLSGYSRAPSKRSQILTPYRTQQAALLHKTGAGSASMQNMMPLAYLPPRRSSAAGLGHGSGSGMGSGYRSHSVDGLLDQAGSTPEQRIAAAAAKVTAGSTALTNASSTSTLQPEEEVTDAALNDSVTRRDKHTLSPPGNVQQHRKSRSLDHILSKQTLAELLPPSSELADGTQSMQNLAIPMTPQPQRRDTSSSSKSPTPERPPQPAMERVRERQSPEGVSATESEREDQPEECLRHGNQQRASASCRRKQQDDI

SEQ ID NO: 17548 - DNA, 6551 bp, DROSOPHILA
ttacgtatgtttttccgtcaaacttggccaagtgtatgtatgtgcttgctaattatcattttccctcatcagcagcaggggcaaggatttgtggaataacttcagaaattaaggttgagtttagtcagcatgggaagtatattatttcaattatattattcggcttatacattaaaaattaaaaattcagttccattccattaattaatcaattcattaaaaggtatttgttaaatatcctaatgctgctaccagtttaattgtatctacccgtactgcttttcttttgataccaagccttttcgttggggaaataaaagcaaataagaacgttcgttggaagcgcctaatttaagacaatcagaacatctacgacagaaatatcgcgaaaagtactcgggcaatctgtaagtacgcagtgtgtattcgcccaattacgaactggcgacattaaatggggcttgacatttccgggcagattgtggggtctgcgttttcgtaaggatttcggcattttagcaatacttttcaccgatatgatactgattaagggaaatcatacaagagctcttttaattaatgtaaactattgccatttgatcactcatttatctttattctctaaaatcaacttagtcactgtttaaaattggcgcgcttttatttgaatttaagtgtttggcaaacatatacacagtggcgccatctggagcagtgctgccactctcgtatttggcaccattttagagcactgtttaatggcttagcaaatccgcgctataagaagccgcttcaagcttgcttagacagttaacaatttttgagaattgtatttatttttacttattaccctatatttagagggttttacagactaaaattagttttcatgtcacgatttgtgtgatcgatatactccaacagcgccacctaaaatgattagctcatccctaacggaatgttatgttataaacacaatgtaaagcaatgtaaacactttcaaaacaaaatgtagatcgtcgtgcagtagttgttatcaaaagattgctgctatcatggatgtgaattggatggacgatgacgaagacctagtggcggccttggctatgcacgaagagcagaagagcgaggtatttacttgtatttactcctgcgagcgcagagtctctcacagtttggatcctcaggatgccgatggaacacgttgggaacattgcgacgaagcctgcgatggtttcgatatggccacaggacacaactggatttatccaaacaacctgcccctacgatcctatcaacaaaccatcgtccaatcggcgctgttcaaaaacaccctggtggtgttgcccacgggattgggaaagaccttcattgcggcggtggttatgtacaacttttacaggtggtatccaaagggaaagattgtgttcatggcacccacaaggcccctggtctcgcagcagatccacgcatcccagaagatcatgccctttccatctgaagacacggtgcagctaacaggtgagttcaaatgtgaagacttatttacaaatgcttaccgggttatatgactaaaagaacctggatgtgccgactgccttacaagtcctgaatccaaaaaataagctccagtcccatttttattccaggccaacttcctcgacccaaacgagctgagctgtgggcctccaagcgggtcttcttcgctacgccgcaggtggtgcactcagacatgctggaagctgatggcgaatgcagctttccctttgggtccatcaagttgatagtggtggatgaggcgcaccgggccaaaggtcgctatgcctacacccaagtggccgactgtctgatggcacgtaacaggtatttccggatgcttgccctgtccgctacaccaggaagaaccatggaggatgtggcagctgtgtgccgaaacctatacatttccaatctgcaagtgcgctgggacacctcgatcgacgtgcagccctacatacacaggcggacgattcgaaccatagtggtctccctgaaggagagaatcaaggagccgagagaacgattgctgcagatcatcgaaccatacctacgccagcttatggaagctgagatttttaaaggcaacaagggaaccgtgagcagaaatagtttgctctttgagcagaaaagcttcgtcgaacgatcggcgcaaggccagcggcatccggatcacaacataataatgggcaacttcgccatgtgcatcagcatgtaccactcgctggacctaatggagcgtcacggtcttcgcgtcttcgtgaacaatttcgatgcagacgacgacgggcgagagaaatttgtactggccagagatggtaatctaaggaatttggtggagcaggtccgccaagaactcggtgccaatcccctagattacaccacgcatgccatgacgaatggagaagtgccgcctttgccatctgatctagactttggacatgccaaatatgagaagttgcgacaggtgttggtgcaacactttcaggtaggggcaaaaaatcaaaaaaaaagaagttttcatataattttcatgaaaccgataaacatattcccttgttaatataaatgttttctttaataggcaaaccccgattcccgcgccattgttttctgcgagtaccgtgaatccgtaatgctgattcaccggctactccttcaacacagaccggtgctccgtccgcgctgttttgttggccagggcagcacagttggagcaagctatgctctcacccagaaacagcagctgcagataatgaccgactttcgatccggcactagcaacgttctggtggccacgtcgatcggagaggagggcttagacgtcggcgaggtggagatgattgtgtgcttcgacatttgcagcactaatcccactagatttattcagcggattgggcgcactggaaggaagaagaatggagaggtggttatgctagtgaccgaaggacgagaacagcaggtgcttaaggatgttctggccaacaaggatcaaatcaacaagaagctattgaattcgtccgttgttaaattgtcgctttatgagcaaaatcctcgaatggtgccatcaaaatttcaaccaaaatgcgaggagaaacacatggagccagttgctgaggagaaacccaagccgaagtcggcagccaagacgaaagaatccaggaagcggaagcaaccagttgcacagactggtagcctaaggaaatacttcaaagaaagtcctccaacggagagtcagcaaggaatattgcagggaataaaaccctaccaaatgagcgaagcttcacagcaattggttaagcagcaagttctacggcgcagcgtaactctgaagaacttctttggggaatctcaggccagctcaacgttaaccagcagtcaggaagatgtgcaacgcctccgaaaacttactcgccttctgcagtcaagcaagccatttgtttcggactccaaggatcttatgagccatctgcaggacgatcacttacccaggcaaataaagctctacttactcaaaagtaatcccgaatttctgagggaaacccatttgaagatgcaagtccagagcgagttgaatatagctgatgatcgcttaaatagtcggcagcgacgcactaaaaataattatcaactgcttctggacatttgcgacggaatggaccagatgaatgagcttcttcaaggggataatagtggagcagagattagcttcagggatgaactaaatcctatttataatcaaagtcccaaaaagttcgataccatttgtgaacagattttcgatggtctgaatgagcatggcctaaactcgaacaattttgaactgaagcaagatcttttagagaaacttgagcttcgcaatctggaaaccacagtaaacgagcaactgggtggcattgaagcttcctggtcagaagaggagtgggaccaacaggaggaagacgtgaaatttgagtctatgtacctaagccagcaattgaacttaccagacgcgaatgttgtcccccatagctcaacgccgctcagggtcaaacccttgagcaaattaatgtttaaaaccctgcagggcgatattgaagaggagtatcattccgggatggaagctagtgaattgggggacaacttaggtcgcctaaattcactgatgaacgcaagtgaatcgaagattaaagcgactgaaagaattgcacctattcctgtagtagactctacaattgagacaaatcactttccagccgtggaagaaagtcaaagatcaactcctatttccattgcagattcttcaggtgaatcaaatcactgtgctgttaataaaaatagtgagatatatccaatgagcatagatgagacgaaagtagaagttaagtcctctttaaatctgaaaatgcacgcagaatccattgtagaagatttggatatcgacttggatgattttctagagccaatggacaaggaactggaattagcctcccagacaaaagggaagtcgcaagagaacatcgtagatcaccagatggaaaaattggagaaaaactgcgagcagaaagaaacagcacacaacaatgaccttgatctaacggacgaggacttgaaagaatttctagagccgatggtggaggaagtggagttgatgagccaaaaaaaggcgaatgacttcaaggattttctcgagccaatgccagaggagttagagctaatgagccagcagaagaaaaacatactgcttccaagtacagaaacaattaaaaactcagaaaataaaaactcacatgaggatggctcaagaaccgtttcgccagatatctttggatctgactccatgtcacctttgaagccccaaggaaaaagtctggccgcaaaattggcagccaaggcagcagcaaaggttttgccttgcccaccgccgaattcagtaggtcttaattcgccggagaaccggaaacgtaccaatccttctatccaggaaaagtctccaagtatctttgatctatatttaaatcgaatgcggggtcgtggtcgtcttgctaaagctgcggagaatcttcaccgtataacttcaacgaatcctacaatctcagtacctaaagacgaagaggattctcctattgcgcggcgtccatccaaacgaaagattgttataagttccgatgaggaagaggagcagaagccacagattgcggaaacccaagtggattgcgagtccgatgattacgagagaattcttgacacgcaaatggtatatatccctaagtttagaatttgatcaatacatctaatatatgacatatataactttcagcctgatcctcgtaagactccaacgagacctcgacacaaacgcagtaaattcaattcctttattttggatgaggctgaaaaaagcggatcggaccatgaggaggaaggggagactaccataggcacatatctgaaggactccatgatcgtttcaagcgatgatgaggaccataacgacacaaacactcatgctatttaccttcgtgcactcaagtaagtcgagggtgaattataaatgcgtctaactaaacaatatctcgttgctaggagccccattcaaaggccaggtgccttcaagatgccccctccacgagtttttcgcgacgaatcgcacatattttctcagccagtggaagacgattcctcgcagtacatgcaatgctcatttatcgttgatgacgaaagctccacgattgaaagagggcatgatgtctccgaatgtcctcttgagaaagcggaacgtattctaaaggagcgaagaaagcaacgtcgactaggtaaggtgccttccgctccggttaataaacgacgccgattacaaaccataagcacctctagcgatgaagatgatgttgttttaattgattaaacgctacgtcacttcccagtgccattgcattaaatagtttgtgatttgttaaaatgtttccgattttatttcgtttaataatcttgtagatttatgtgaatacgtgatacagatctttataagtccaattgattgttaatatttttaactcaagcgaatacaataatttaactaggttacattgttttagatacaaataataaaattaacgaaatatctaaaattttatatgttgcgtttctctatttgttatccttcctaacgcatttatacattcaatcatggagtaattatggagctcccaagttcttgcgagtatcggtcttctatagtgaacctgcttaaataaatactggtaactattagctgcatgaatcaagaatctatttaaatctcctgttcaataacttaaattctcggtggtttttaagatgcgtacccaatgttaatgaccaatgtcaatcgatttttctgcacgagttttgcatattgaggtatatccaaaaaaaattttccaaaacactttttagaacataaaattctggtatcgctgatttcgtacagttttatctggcagccctataaattactcgttgtctggtgctgccagactatgaatatattacaa

SEQ ID NO: 17549 - DNA, 4207 bp, DROSOPHILA
caaaacaaaatgtagatcgtcgtgcagtagttgttatcaaaagattgctgctatcatggatgtgaattggatggacgatgacgaagacctagtggcggccttggctatgcacgaagagcagaagagcgaggatgccgatggaacacgttgggaacattgcgacgaagcctgcgatggtttcgatatggccacaggacacaactggatttatccaaacaacctgcccctacgatcctatcaacaaaccatcgtccaatcggcgctgttcaaaaacaccctggtggtgttgcccacgggattgggaaagaccttcattgcggcggtggttatgtacaacttttacaggtggtatccaaagggaaagattgtgttcatggcacccacaaggcccctggtctcgcagcagatccacgcatcccagaagatcatgccctttccatctgaagacacggtgcagctaacaggccaacttcctcgacccaaacgagctgagctgtgggcctccaagcgggtcttcttcgctacgccgcaggtggtgcactcagacatgctggaagctgatggcgaatgcagctttccctttgggtccatcaagttgatagtggtggatgaggcgcaccgggccaaaggtcgctatgcctacacccaagtggccgactgtctgatggcacgtaacaggtatttccggatgcttgccctgtccgctacaccaggaagaaccatggaggatgtggcagctgtgtgccgaaacctatacatttccaatctgcaagtgcgctgggacacctcgatcgacgtgcagccctacatacacaggcggacgattcgaaccatagtggtctccctgaaggagagaatcaaggagccgagagaacgattgctgcagatcatcgaaccatacctacgccagcttatggaagctgagatttttaaaggcaacaagggaaccgtgagcagaaatagtttgctctttgagcagaaaagcttcgtcgaacgatcggcgcaaggccagcggcatccggatcacaacataataatgggcaacttcgccatgtgcatcagcatgtaccactcgctggacctaatggagcgtcacggtcttcgcgtcttcgtgaacaatttcgatgcagacgacgacgggcgagagaaatttgtactggccagagatggtaatctaaggaatttggtggagcaggtccgccaagaactcggtgccaatcccctagattacaccacgcatgccatgacgaatggagaagtgccgcctttgccatctgatctagactttggacatgccaaatatgagaagttgcgacaggtgttggtgcaacactttcaggcaaaccccgattcccgcgccattgttttctgcgagtaccgtgaatccgtaatgctgattcaccggctactccttcaacacagaccggtgctccgtccgcgctgttttgttggccagggcagcacagttggagcaagctatgctctcacccagaaacagcagctgcagataatgaccgactttcgatccggcactagcaacgttctggtggccacgtcgatcggagaggagggcttagacgtcggcgaggtggagatgattgtgtgcttcgacatttgcagcactaatcccactagatttattcagcggattgggcgcactggaaggaagaagaatggagaggtggttatgctagtgaccgaaggacgagaacagcaggtgcttaaggatgttctggccaacaaggatcaaatcaacaagaagctattgaattcgtccgttgttaaattgtcgctttatgagcaaaatcctcgaatggtgccatcaaaatttcaaccaaaatgcgaggagaaacacatggagccagttgctgaggagaaacccaagccgaagtcggcagccaagacgaaagaatccaggaagcggaagcaaccagttgcacagactggtagcctaaggaaatacttcaaagaaagtcctccaacggagagtcagcaaggaatattgcagggaataaaaccctaccaaatgagcgaagcttcacagcaattggttaagcagcaagttctacggcgcagcgtaactctgaagaacttctttggggaatctcaggccagctcaacgttaaccagcagtcaggaagatgtgcaacgcctccgaaaacttactcgccttctgcagtcaagcaagccatttgtttcggactccaaggatcttatgagccatctgcaggacgatcacttacccaggcaaataaagctctacttactcaaaagtaatcccgaatttctgagggaaacccatttgaagatgcaagtccagagcgagttgaatatagctgatgatcgcttaaatagtcggcagcgacgcactaaaaataattatcaactgcttctggacatttgcgacggaatggaccagatgaatgagcttcttcaaggggataatagtggagcagagattagcttcagggatgaactaaatcctatttataatcaaagtcccaaaaagttcgataccatttgtgaacagattttcgatggtctgaatgagcatggcctaaactcgaacaattttgaactgaagcaagatcttttagagaaacttgagcttcgcaatctggaaaccacagtaaacgagcaactgggtggcattgaagcttcctggtcagaagaggagtgggaccaacaggaggaagacgtgaaatttgagtctatgtacctaagccagcaattgaacttaccagacgcgaatgttgtcccccatagctcaacgccgctcagggtcaaacccttgagcaaattaatgtttaaaaccctgcagggcgatattgaagaggagtatcattccgggatggaagctagtgaattgggggacaacttaggtcgcctaaattcactgatgaacgcaagtgaatcgaagattaaagcgactgaaagaattgcacctattcctgtagtagactctacaattgagacaaatcactttccagccgtggaagaaagtcaaagatcaactcctatttccattgcagattcttcaggtgaatcaaatcactgtgctgttaataaaaatagtgagatatatccaatgagcatagatgagacgaaagtagaagttaagtcctctttaaatctgaaaatgcacgcagaatccattgtagaagatttggatatcgacttggatgattttctagagccaatggacaaggaactggaattagcctcccagacaaaagggaagtcgcaagagaacatcgtagatcaccagatggaaaaattggagaaaaactgcgagcagaaagaaacagcacacaacaatgaccttgatctaacggacgaggacttgaaagaatttctagagccgatggtggaggaagtggagttgatgagccaaaaaaaggcgaatgacttcaaggattttctcgagccaatgccagaggagttagagctaatgagccagcagaagaaaaacatactgcttccaagtacagaaacaattaaaaactcagaaaataaaaactcacatgaggatggctcaagaaccgtttcgccagatatctttggatctgactccatgtcacctttgaagccccaaggaaaaagtctggccgcaaaattggcagccaaggcagcagcaaaggttttgccttgcccaccgccgaattcagtaggtcttaattcgccggagaaccggaaacgtaccaatccttctatccaggaaaagtctccaagtatctttgatctatatttaaatcgaatgcggggtcgtggtcgtcttgctaaagctgcggagaatcttcaccgtataacttcaacgaatcctacaatctcagtacctaaagacgaagaggattctcctattgcgcggcgtccatccaaacgaaagattgttataagttccgatgaggaagaggagcagaagccacagattgcggaaacccaagtggattgcgagtccgatgattacgagagaattcttgacacgcaaatgcctgatcctcgtaagactccaacgagacctcgacacaaacgcagtaaattcaattcctttattttggatgaggctgaaaaaagcggatcggaccatgaggaggaaggggagactaccataggcacatatctgaaggactccatgatcgtttcaagcgatgatgaggaccataacgacacaaacactcatgctatttaccttcgtgcactcaagtaa

SEQ ID NO: 17550 - protein, 1383 aa, DROSOPHILA
MDVNWMDDDEDLVAALAMHEEQKSEDADGTRWEHCDEACDGFDMATGHNWIYPNNLPLRSYQQTIVQSALFKNTLVVLPTGLGKTFIAAVVMYNFYRWYPKGKIVFMAPTRPLVSQQIHASQKIMPFPSEDTVQLTGQLPRPKRAELWASKRVFFATPQVVHSDMLEADGECSFPFGSIKLIVVDEAHRAKGRYAYTQVADCLMARNRYFRMLALSATPGRTMEDVAAVCRNLYISNLQVRWDTSIDVQPYIHRRTIRTIVVSLKERIKEPRERLLQIIEPYLRQLMEAEIFKGNKGTVSRNSLLFEQKSFVERSAQGQRHPDHNIIMGNFAMCISMYHSLDLMERHGLRVFVNNFDADDDGREKFVLARDGNLRNLVEQVRQELGANPLDYTTHAMTNGEVPPLPSDLDFGHAKYEKLRQVLVQHFQANPDSRAIVFCEYRESVMLIHRLLLQHRPVLRPRCFVGQGSTVGASYALTQKQQLQIMTDFRSGTSNVLVATSIGEEGLDVGEVEMIVCFDICSTNPTRFIQRIGRTGRKKNGEVVMLVTEGREQQVLKDVLANKDQINKKLLNSSVVKLSLYEQNPRMVPSKFQPKCEEKHMEPVAEEKPKPKSAAKTKESRKRKQPVAQTGSLRKYFKESPPTESQQGILQGIKPYQMSEASQQLVKQQVLRRSVTLKNFFGESQASSTLTSSQEDVQRLRKLTRLLQSSKPFVSDSKDLMSHLQDDHLPRQIKLYLLKSNPEFLRETHLKMQVQSELNIADDRLNSRQRRTKNNYQLLLDICDGMDQMNELLQGDNSGAEISFRDELNPIYNQSPKKFDTICEQIFDGLNEHGLNSNNFELKQDLLEKLELRNLETTVNEQLGGIEASWSEEEWDQQEEDVKFESMYLSQQLNLPDANVVPHSSTPLRVKPLSKLMFKTLQGDIEEEYHSGMEASELGDNLGRLNSLMNASESKIKATERIAPIPVVDSTIETNHFPAVEESQRSTPISIADSSGESNHCAVNKNSEIYPMSIDETKVEVKSSLNLKMHAESIVEDLDIDLDDFLEPMDKELELASQTKGKSQENIVDHQMEKLEKNCEQKETAHNNDLDLTDEDLKEFLEPMVEEVELMSQKKANDFKDFLEPMPEELELMSQQKKNILLPSTETIKNSENKNSHEDGSRTVSPDIFGSDSMSPLKPQGKSLAAKLAAKAAAKVLPCPPPNSVGLNSPENRKRTNPSIQEKSPSIFDLYLNRMRGRGRLAKAAENLHRITSTNPTISVPKDEEDSPIARRPSKRKIVISSDEEEEQKPQIAETQVDCESDDYERILDTQMPDPRKTPTRPRHKRSKFNSFILDEAEKSGSDHEEEGETTIGTYLKDSMIVSSDDEDHNDTNTHAIYLRALK

SEQ ID NO: 17551 - DNA, 7559 bp, DROSOPHILA
actcttgccgttcgtctgaggagctgcttcttcgtcgaattccagttcgctatcctcctcctcgtccgaatactcctcgtaaatctgaccgtcgtcaaactcgccaaagttcatctcgacctgagggtacggcaatttgttaggaacaggaacccaaagtagatagaaagatagatagatggatggatggatggatggagctcaccttgccgcatacgtgtacgggtccacttccctgcaccagtttgaaggtcactgatccattggggaactcgacatttggtcttaagctacgggtctcgccgaccttcaacacggcaatggggatcttcaaggttttcttctcgccatcgtcgtttatgttcgtctccgcctggaagcgaaacattaaatttgtgtgcattttatcactgtataatttccgagtttttcgcgaaatatgatatgagttaaatcagccatgtcgcctttaaatttacgacctgcgacgcggggcagattgccggtatcgaggctcacctgtacaacgttgaattcgccggtcttcgcttctgggccgagggaaatctgtttgatgatgagcttgtgcgagtggacgatgtactcctcgggtacatctgggacctcgaactgtgcgatggcctccttctcgctgagtgtgacacctggaagtggacgaacggcgagaagggttggatttccgactgctttttgccggctggaggggagctgctcgcagcgtggctatgggatggctattggagcgctcttccagcccaaatggcaatggtactcaccataaaacgactcggactccatttgcaggccttggaacacagatgtacagtcaattaataaaagaaccttttgtactctacacgtgcccgtaaaacggcgatggctgcagttgtgtgaagcgttgagcggtgctgttatcgaagcgcaggactatcgatattattcgtttaatttgttgggaacttcgcaagtactggtaatgaagacttgaaatattttttaatatattttactgtcgcgttagcttgcaacaaacgaatatagattgtcacattcgattggacactacaagtggcagccctgcgattttgattcccagtctgacaatcatcgatttcggcaccttacgtcggcctggcaaccctgcgacagctaccattttgcaaaagattttgctcaacacgtgttcgccgctggttttgtgtggaattaatattaaatattacctaccatggctgaggaatcattctacggtaattacaatttagcagttgcactctataggcagcgaaagggggcaaaagtggacgcgtagaaggcgtatttaccaccgaaaaggcggagtgtctgcgaagcttgccggtgtttttgctctaagatttgccgctggccaatttgtgtgtgtctagcctcaaaccctcggatttgagtgcgcgaataagatacgaatcagaaagtataatggcgactatatcccctccgcaggagtcactttgaccgccgagagcgacagcgtcacgtgggatgtggacgaggactacgcacgcggccagaagctggtcatcaaacagatcctcttgggcgccgaggccaaggagaacgagttcaacgtggtcgaggtgagtactccattcattgtgtatgcgaaacggggcattcagtgcatgtagtaaatcccataaattgtgtatgcgcgcgccggttggtgtcctcttctttttttctttttcattttttttttcgttgcatttttccggccggcggggcagggaccggtttccatttttcccccagaccagaacaacctcgaacttttcgctcgttgtggtgggctagggtaattgtgtctgtacatctgcaaacggccgccgagtaaccagccccggactttcgattgccatggtacattaccaatgggatgtgctaggtacataaattctttttagtacaaggtacttgcaaagaagtactaggtactttacaactgtcccagtaaatccagggacttaggtgttttgtatattgttaggaactttcgagaataactatcaaagcacatcttctttaaagaatataatttttattataataaatatttttaatttgtgctttaaaatttctcattagttgtacctaaccatcattataccttaaccatcaagatcctcatagtttaagtaccccacctttccgaaccaaattcattggcgcaactgtacgcagatacacatacggcaagacaaaagagcactctttattgactcaagtcaacggcgatacacgaatcggctgcctcggcatccgcaattgtttgcattaggtctggaaagcttttcgagaacttgaacatactgcgcagcttcctgtccatccggcaaatcactcccgccgccggaatactccaattccagcagatcatgtcgcacttcagcagggcgagatcttcgcgcagtgacttgaggttcttcgcgaggaatagagaagaggtttcgggtcaaaggtcatagtttgcagcaaagaaagctggcactcaccaaagccactgtcgtatcaattgaggcaatctcgtgtcccttaatgaccaccagtgtggtgggggcacttccctcgctgtttctttgcgtcacgtgcgacacaagcgacattttcaagtactcggctgccgcgtagtccacgctgcccttgagatcggccatggtcacctcaatgccgttaaactaggttgattgccaatagaaattattaggccctatatatgcagtgtgtcagctcaccttctcggttgtcaagaaaaactgcggcttcatgctcttgtagagcaggaaaagcgcattgaagacgatgcccaccaccattccgtactccagggtccagaagacacaggtcagcacggtaaccaggaaaggcagcatatcgcgctctgtaagataaccagacttactttaacttcacgtgggatcccaaatgccatgtagcactcacttttagcccgccaaatctcgccaatggtctcgtactccaccataaagaacatggctgcaatgatgatggctgccagggtcgccttcggaatgtaggcaaatgtggtggtgaggaaggccagggtcatgaggacgagagcgccggtaaccgcaccacccagcggggtttttactccactggcgttgttgatggctgtccttgtaaaggatccagtgataggcatggaggagaagaagctgctgaggatgttgctgacgcccagggcaatcatctcctgcgatgcgtccactatcttgcccttggctgaaagtagaagaagctcaagttatggaatatgaactgaagttattcctccgcactcacagaaggccttggccacagctatgctctccaatatggacaacagtggtatggacaccagggcagtgcctacgttcgataccatgccaccgaagctaatggtttctccagtctctggatcctccgtgtgaaaagggggaagcttgaaaggcggcaggcctggagtgatgctgccgctgactagaaagggcagtttgccatcgttcttcagaagatagcacaggagtatgccaattaacacggccacagcattgcgggccagtgaaatatacttccacacgcttttgaagccgaaagttaggtttttcagttgctgaaattatttaaacatttatagtctcgctaatcaaaccttctaattaagcaatttaattaagcattacccaccctcatgagcagcaggagcacaagtgtgcagcagccgaggatggcatcatttcggcgtgtttgtgttatgtgaccgaagaagtatatccagctgttaaggaacccactggcactactgctaatgccaaagaggctattaacctggccggtggcaatggttagggcggctgccatcgtaaaacccgtggtcaccggcaccgatatgaaccgcatgagcactccgagattgagtaaacccattagggtgatgatgcagccggacagaaagcatattagcaccgcatacgctgggttgccgtccacatatggctgcaccataagcgccatgatggccgtagggcctgtggaagaacgatttgaattacttagcgcaccacctcaccagaggctccccaactcacccactgtgatatccttacaagttccaagcagtatgtacacaaatccacccataaaagcggagtagagcccataggctggtggcagattggccacagctccgtaggctatggcctgtggcacggctgtgaggcccacggtgagacccgccaccacatccatggccaggaagttcaactggtacttgggcagccaatcggtgacgggcaggtatctgtggacggagcgcatgctgcagcagctcctcgcctttgagctcacggcaccgcaaacgttcggcagacgctcccggtagagatcatctggaaagcacaagtgggctatttagtaggtgtgcctcctggggcgccttgaaatcttgatatggccatagttaagtggtttatttgattgaaaaacgctcttttatgtacacccattcgcaatctctgcacatgatctgaagtgcctcgatgatttcctgcggttcggtggtcttgtgacttctggaaaaataccaaagatgtctacaagctgatagacaagttcatccagcaggcagcacaatgccttgatgttagcactttgaaccctctgttttggtgtctcatattctagataattagtgagccgcatatagtatccttggctagtttgtatcttatgcatttatattattcaacgggggaaatttacgttttgatcccttcttgcttgatggacacgttcatccccaggaagccagcttgtcactgataactcatctttcgcagctcgtaatagcactgtcatcttgtggattctcttgtctaattacggactcattaccgggtatttaccataaataatgtaatgtctccgaagacctttgtttagtttcctttaattgtagtttatctcatcaagttttaggtaaactagttctttatttatcacagcacaatcaaacagtgtttgttccttcactaattatagccccattgagtaatagtttgtgttttctgatattcagttggttggttttaatagaaggggaaggagtagtttccttcgtatcacactgctttcacttatcctcttgagggaacgcgcttctccacttaccttcgttatcgcgcatgtcgacaagatctttggagcactttacgatcggccaatactagttttgattcgaattacacgttgcggatgattaattagcagtcacttgttagattcgcgcttgctggactccggttcagatgagcctggctacagtttaaagggaacgaaccgatccactccagtgtgggcagacgagtggtcaggcggccgccagtcgacggtgttattaccgaaagcgactgtgcgaatatgtgagtgcgtaggcagttatcatcggacagttcagttagttttggggaaggtgttctgttcggccgacaacgataagagatagagacgaagacgaagactgcagagcgattaagtgggccagtcgtgatgaacttcgcgctatctgctcgctggatccgaaattggtgtaatctgggaattcaacaactatcttcggccacttgaaaggcatatgacggggatctatatgggtcaatcttggccagcaatcttatgcagttaaaagcaggaaaagattgatgtttcaattgatgttcctacctaagtgaacaatagataacattcgaaacgtgtctaacttcaatttatttataagccacttgaaaagtcaatgaatctatctaatttgcgaatcttcgccttgtttacgcaggtgaacacacccaaggactccgtgcaaattcccatcgccgtattgaaggccggagagacccgcgccgtcaatcccgacgtggagttctacgagtcgaaggtgacattcaagctgatcaagggcagcggacccgtctacatccacgggcacaacatcaaggacgatgtggaggtggtcgacatggaggaggatgacgaggaggatgatgtcgccgaggacgaggaggacgagcacccaaagaagcgcgccaagatcgagaacgccgccgatggtaaaaatgccaagaacaacaagaagaagtaaactgctgaccgccaatcatccatcgaggtttaagctatgaacgtgtagattttaaagcaaaaacagttttaggccctataatacaatacgatgcatactgagaatacaatctagttccttttgaacagctccttttacattcaattcaaagacaacgttgtgtgctcggtcgtgtttccccagcgaatggtctgtcgctcagccaggagttccgcacccggaagcgggagcggatcggactgtgactgatccggacactaatcgaacacacagatttgtatatatattaaagtataactaaagctaagccggacttcctgtacgcgccccttcatatttgcagtatgaaaataaacttgtcggaatacaaacaatattattgcattttactaaagtgggagttcgttttaaacgctctcttacactgatgaactaagtggcaactataaatacttatcttccccgtttagcaaacattcttgaaaccaggcatttaatcaatttcagttttatttctcccatcaattcgttactcatcaattgaaatttcagatttggtaatgctaaagggctatcatgattgcagttctatgaagtggatcaaagcgatatcgggaatgccttcaaagattgcgggtcgctgctagtaaatagtgatctctagtgcttcttcagtgcttgcttagttcggcgagggcataaccttgatgcgctcgaaggcttgtttctccagggtctcgcggtgcttgggatcggcgatctggatgagttcgtacatcctctggcgcacgttcttgccgaacagcgaggcgattccatgctccgtgacgacgtagtggacgtgggcacgcgaagtgacgacgccagcgccttccttcagcgtgggaacaatcttgctctcgcccttgttggtggtcgatggcatggcaataattggcacacccagtccatcgagaccctccgccgctccgcgaatgaagtccacctgtccgccgaagccggagtagaagcggggaccaatcgagtctgagcacacctgtccagtcagatccacctcgatgcagctgttgatggccgtcatgcgaggctgctgtttcacaatgctggtgttgttcacatagtcgatggcgtacatctctgaaaggtggacagtgaggcattagatcgagctcatatcccatacattttcaattcaacttcagtgtttcagaactaaacctaccgatgaagggattgttgtccacgaagtcatacagagccttgtcaccgatgaggaaggagcccacaattctgccctggtgcatcttcttcttgctgttggtgacgcatcccttgcgcacgagctcaacgacaccgttggcga

SEQ ID NO: 17552 - DNA, 1071 bp, DROSOPHILA
aagacttgaaatattttttaatatattttactgtcgcgttagcttgcaacaaacgaatatagattgtcacattcgattggacactacaagtggcagccctgcgattttgattcccagtctgacaatcatcgatttcggcaccttacgtcggcctggcaaccctgcgacagctaccattttgcaaaagattttgctcaacacgtgttcgccgctggttttgtgtggaattaatattaaatattacctaccatggctgaggaatcattctacggagtcactttgaccgccgagagcgacagcgtcacgtgggatgtggacgaggactacgcacgcggccagaagctggtcatcaaacagatcctcttgggcgccgaggccaaggagaacgagttcaacgtggtcgaggtgaacacacccaaggactccgtgcaaattcccatcgccgtattgaaggccggagagacccgcgccgtcaatcccgacgtggagttctacgagtcgaaggtgacattcaagctgatcaagggcagcggacccgtctacatccacgggcacaacatcaaggacgatgtggaggtggtcgacatggaggaggatgacgaggaggatgatgtcgccgaggacgaggaggacgagcacccaaagaagcgcgccaagatcgagaacgccgccgatggtaaaaatgccaagaacaacaagaagaagtaaactgctgaccgccaatcatccatcgaggtttaagctatgaacgtgtagattttaaagcaaaaacagttttaggccctataatacaatacgatgcatactgagaatacaatctagttccttttgaacagctccttttacattcaattcaaagacaacgttgtgtgctcggtcgtgtttccccagcgaatggtctgtcgctcagccaggagttccgcacccggaagcgggagcggatcggactgtgactgatccggacactaatcgaacacacagatttgtatatatattaaagtataactaaagctaagccggacttcctgtacgcgccccttcatatttgcagtatgaaaataaacttgtcgg

SEQ ID NO: 17553 - protein, 152 aa, DROSOPHILA
MAEESFYGVTLTAESDSVTWDVDEDYARGQKLVIKQILLGAEAKENEFNVVEVNTPKDSVQIPIAVLKAGETRAVNPDVEFYESKVTFKLIKGSGPVYIHGHNIKDDVEVVDMEEDDEEDDVAEDEEDEHPKKRAKIENAADGKNAKNNKKK

SEQ ID NO: 17554 - DNA, 5340 bp, DROSOPHILA
tacactcatgaatattcaaacaaaactcttcaacttgtctggcatatatccatagacaattacgcgggtatgtatgctgggttttgtgttcttaaaatcgtatatctgctgcaggattgacatcgaactgcttaaccccacgacggcaaccattcgtcgaaaaagtttgaacacagtttatatttttgcaatattctaagtactataacctaccaaaataactgtaaaagaaagtttctatgaacgtttgaaatcaaaattaggtccgattttgcgtagttttcgacaaagtgtcaccgtcaaaagggcttcgactggcatatccctcaaagggttaacatgcttttctttggtcttcttatggcctacccccttcatatgtctgcttttcattgatatattctgcggaacaacaaaagaagtattattctatattgggatatgctttagagttttggtttgtagggttttctagtctcggtaaatgtgtatatcttatgcttaatttattttattagctatcatatcatatactttgcatggttatcatagattggttattaacattaaaatatttattgtctaaaacatttcgccccgcttagtgccactctagacctatgtatgcatcccaaatcggattgcttgttttcccccccaacgattctaactatagcacacacctttggctacttacagataactcttccctgtccaccgattaaattttgaatttaataagtgtttgattctaatactttgctgatggtcgaaatccagcagatattccattaagcggagcactttcgttgggtatgtatagaaaacttatgggcctaaggaggtgtaaggggtttgggaatggaaaagtttgcaaggcgccagactctcggggctctgaagtgtctggtcctttgcgcaagtgcagtgcaaaatggaaatctatcagggatttaactcaaccaccagcagcttaaccacttcagatccccaaaccatcttaggtcatgtgcagatcccccttgaggatccgcgtaaaggtcttcttgaactgctgattggccagagcgtagcaaaaaggattcatcgggctgttggcgtagcagaggaagtacgagaacatgtagaggtgttcattgatgcagggcggatgccggcagaatccctcgacgagggccaacacatggtagggtgtccagcaggccacgaagcagcccaaaatgaacgagatcgtgcgaaacgctttgcgagcacgattctccgacttggacttctgccgtccacccactccaaggatcaggggtagagccttcttgctcttgaagtgctttcctatcgaatgaatgaatgcccttttgctggagtttcggctggccgccaaactcttctcctccctgttggcatcgtcatcccccgcgttctttttggtggcaccaacaccgtcttgttccccgcctccacccacaccgcccgtactgctggtggtgcccgaggtggagggcatcttgttggtattactgtccgaggtttctcgctcctcaatcctttccagtggcaccggtggtgttacacccgccgccgactggggcgttcccgtttgtggcgttgaagtctttaccttgggtgagagtggcattggtggcatcggggaatagagtatggcatccttgctgctggtctccataggactggaggcccggcgatggggacagtccgcagctagctttccgggcacatccaacaggcagatggcctcaatgcagctctcccgcctcaccttagcaaagtcctcgattcctgtgtacgagacgagaagacgtttttcaatggccaccgcctcctcgatactctgactctgactctggttgtgattcggattcaggttgaggctcaggctttggctgggactctggttttggctgggagtttgactgaggctctggttcaggttcgattttggtggatttcggcgtgcgggcggtggtggaggcaggactggtggtttcccctggacgctgtcattcggggaggtcgtcgagttggccgtcacactggccagcatggcggagctctcgtccatatagcgtagctccgagttcgtcatcaggtcataggtcagggccagttcactgttaccggaactattcccaaagggacgatccgagtagtcatcggagagcggggtggggcactgaaaggcgtcgggaggtggcaaaatggtctgcaccagaccctgatgcacttgatcgctagggacctcgatgggtgccaagtccacgggggacaggggatcactggtgttgagtaatgttggaggagcggacaggtcgaccaaacgatcatgctcggctatctgggacagtgtggagcaggatgtgcgcttgggcctgtccagcggtgggttcggctggttttggtggtgctggtggtgcggttgttgctggttctggtggtggtgcagggagcgcatctcttccttgctctgcgcccgctgtaacggactctggttgtgatggtgctgttggtggtggtggtactggtgcatggcctcgatcgacttggagttagtggtgctcttctgcaagttacctttgccacgagtggccagcagggcggcctgtgccccaaagaccagaccaatcgatgaccgcttcctcatgttgttcaatttctgctgggtgatcaactgctgggcctggttgacggatgattcctcatcggaatcgaaggcaggactgctggatctctcgctcttttccgcatccacggctgcctcacgttttttcgcctcctcctggatttttgctgccgacgctctcctctgttccggtgtcatcttctccacttcctcggtggccacggccagaggatttgcctgaccggaaccacttaatctcttaatcactgtggtgcaggcactatccaaatcggtttgatctcccgcaagttccactttggtctttaggattttctcctcaatcacaccaatgccagctgcatgacctgccattccggacatcgctccagcactcagtgccaccatggattgcattttccgttgcttcgcctcactgcgcttttgcatatcataggctgttttgtagatcccggcatataagacaaaaagcacaattagtgtggtccaatagtagccaatgattagggccgtattaaagatcggatccttgagaaactgaacggcgcactggccaggaagtagatcccgcttgccggtgaagtgctcccatccaaaaatcgagatgaagaagagcagagcgggaatgatccaagtgattgtgaccatatatatcactctggttctcgtcctccaactccggtacttggcggcaatcttcacagagcagtagcgatctatcgtgatcaacagcaccgtgtactgggacaccagacacacagtatagtcgacggaaagccagagatcgcagagcatcggacccaggtcccaataacccttgagcacgtatatcgtgtagaagggcatcgaaacggttcctgaaatatgggtttatagtacaattaataattttttttttttgaatttaaggtaaaatagttactacctattagcatatccgtggctgctagggaggcaataaagtagttgctgggctgccgaatattcctgtccacgatgaaggccagtagcaccaggatattaccgcccaccgtaagaatgatacagatcgccaggcatatggctatcaggatcgtctgccacagtgcaaatggtggcaaaacaggaccaagaatctccgagtcggaactggatcccgacatggtggaaccgccatcagaggattgatttctaacagccaacagaaggttcgtattgttcacatcgaagttcctgtaccattgcagctgttcattaaccggccaggaattgaagtcactgctctcgccatagatcttggccgcctccaacagacgtttgcactccgtgtgcgtcaggactcgcttgaaaatgaagctgcacagcttatcccgctcccttctaaggctcctggaagtgcgaaagtaaatatatgcttaattagagttgacataaaactatctctatctctatctctatctctatctctatctctatctctaaactaatgtccttgaaaacaaattctaacaatgtatctttttaagatctccattttctaaaagctttgccactgaaattactattctaataggcgcctttattctattaagacaactcaccagtcggtgatccacttgttcttgatggtatagatggagtcgctggagttgccattcaggccagtcagctcctcctcgcccgccgacttgttaagcgaccgcatccttaaccgctccgccctcttcccgctctggccacgtcccgctccctgctccccgcacttcgcctctgcgctccacaacctctgcggtttttatggtaatttcaagttgttcctccttaatgtgctgtcgacggcggttgtctcggaatgcttacattgcctccatggaatgccaagacttgtctccggtcaggtgcagcatctgcaagaggcaacaaaagcagccacagtcttggttagcacttgaaaaaatatagaggttattaatattatatgatataatatatatatgcatataaaatatgatataatatatatatgcatataaaatatgatataatttatatatgtatacataatatgataaaaagtctgaatttcagaattctgccagaagtcgttttccatccaaaaattaattgttttttaatcgaatttttggtaataataatccgaataaggaatggaatatttcgttgagatcgtaaataaattttaaatccgtgtgtgtttgatttggaaccagtcgttttccatccaaaaattaattgttttttaatcgaatttttggtaataataatccgaataaggaatggaatatctcgttgagatcgtaaataaattttaaaatatatgtgtgtttgatttggaaccatttatttttttcacgatgttgccactttccaaaaattcgaaaattgacaaaaaaaatatttttccgttttagttgcgcgaccatttttagccaaataatagtaaaaaatctatttgaaaaatacattgtcttcattagatggtggaaaataatgaaaatatgaaaataatggaaattaaattaaatcaaaattagtaatgaaaatcaagtatttactaaataaagaaactttcttttcgtgtagtcttcgtggacgtcttcgcttccgccaagtttaaactaattttgcaaccgttaactggcaaccggcgactggcgatgcaatttgcttgtggcagttgcttc

SEQ ID NO: 17555 - DNA, 3060 bp, DROSOPHILA
atgcggtcgcttaacaagtcggcgggcgaggaggagctgactggcctgaatggcaactccagcgactccatctataccatcaagaacaagtggatcaccgactggagccttagaagggagcgggataagctgtgcagcttcattttcaagcgagtcctgacgcacacggagtgcaaacgtctgttggaggcggccaagatctatggcgagagcagtgacttcaattcctggccggttaatgaacagctgcaatggtacaggaacttcgatgtgaacaatacgaaccttctgttggctgttagaaatcaatcctctgatggcggttccaccatgtcgggatccagttccgactcggagattcttggtcctgttttgccaccatttgcactgtggcagacgatcctgatagccatatgcctggcgatctgtatcattcttacggtgggcggtaatatcctggtgctactggccttcatcgtggacaggaatattcggcagcccagcaactactttattgcctccctagcagccacggatatgctaataggaaccgtttcgatgcccttctacacgatatacgtgctcaagggttattgggacctgggtccgatgctctgcgatctctggctttccgtcgactatactgtgtgtctggtgtcccagtacacggtgctgttgatcacgatagatcgctactgctctgtgaagattgccgccaagtaccggagttggaggacgagaaccagagtgatatatatggtcacaatcacttggatcattcccgctctgctcttcttcatctcgatttttggatgggagcacttcaccggcaagcgggatctacttcctggccagtgcgccgttcagtttctcaaggatccgatctttaatacggccctaatcattggctactattggaccacactaattgtgctttttgtcttatatgccgggatctacaaaacagcctatgatatgcaaaagcgcagtgaggcgaagcaacggaaaatgcaatccatggtggcactgagtgctggagcgatgtccggaatggcaggtcatgcagctggcattggtgtgattgaggagaaaatcctaaagaccaaagtggaacttgcgggagatcaaaccgatttggatagtgcctgcaccacagtgattaagagattaagtggttccggtcaggcaaatcctctggccgtggccaccgaggaagtggagaagatgacaccggaacagaggagagcgtcggcagcaaaaatccaggaggaggcgaaaaaacgtgaggcagccgtggatgcggaaaagagcgagagatccagcagtcctgccttcgattccgatgaggaatcatccgtcaaccaggcccagcagttgatcacccagcagaaattgaacaacatgaggaagcggtcatcgattggtctggtctttggggcacaggccgccctgctggccactcgtggcaaaggtaacttgcagaagagcaccactaactccaagtcgatcgaggccatgcaccagtaccaccaccaccaacagcaccatcacaaccagagtccgttacagcgggcgcagagcaaggaagagatgcgctccctgcaccaccaccagaaccagcaacaaccgcaccaccagcaccaccaaaaccagccgaacccaccgctggacaggcccaagcgcacatcctgctccacactgtcccagatagccgagcatgatcgtttggtcgacctgtccgctcctccaacattactcaacaccagtgatcccctgtcccccgtggacttggcacccatcgaggtccctagcgatcaagtgcatcagggtctggtgcagaccattttgccacctcccgacgcctttcagtgccccaccccgctctccgatgactactcggatcgtccctttgggaatagttccggtaacagtgaactggccctgacctatgacctgatgacgaactcggagctacgctatatggacgagagctccgccatgctggccagtgtgacggccaactcgacgacctccccgaatgacagcgtccaggggaaaccaccagtcctgcctccaccaccgcccgcacgccgaaatccaccaaaatcgaacctgaaccagagcctcagtcaaactcccagccaaaaccagagtcccagccaaagcctgagcctcaacctgaatccgaatcacaaccagagtcagagtcagagtatcgaggaggcggtggccattgaaaaacgtcttctcgtctcgtacacaggaatcgaggactttgctaaggtgaggcgggagagctgcattgaggccatctgcctgttggatgtgcccggaaagctagctgcggactgtccccatcgccgggcctccagtcctatggagaccagcagcaaggatgccatactctattccccgatgccaccaatgccactctcacccaaggtaaagacttcaacgccacaaacgggaacgccccagtcggcggcgggtgtaacaccaccggtgccactggaaaggattgaggagcgagaaacctcggacagtaataccaacaagatgccctccacctcgggcaccaccagcagtacgggcggtgtgggtggaggcggggaacaagacggtgttggtgccaccaaaaagaacgcgggggatgacgatgccaacagggaggagaagagtttggcggccagccgaaactccagcaaaagggcattcattcattcgataggaaagcacttcaagagcaagaaggctctacccctgatccttggagtgggtggacggcagaagtccaagtcggagaatcgtgctcgcaaagcgtttcgcacgatctcgttcattttgggctgcttcgtggcctgctggacaccctaccatgtgttggccctcgtcgagggattctgccggcatccgccctgcatcaatgaacacctctacatgttctcgtacttcctctgctacgccaacagcccgatgaatcctttttgctacgctctggccaatcagcagttcaagaagacctttacgcggatcctcaagggggatctgcacatgacctaa

SEQ ID NO: 17556 - protein, 1019 aa, DROSOPHILA
MRSLNKSAGEEELTGLNGNSSDSIYTIKNKWITDWSLRRERDKLCSFIFKRVLTHTECKRLLEAAKIYGESSDFNSWPVNEQLQWYRNFDVNNTNLLLAVRNQSSDGGSTMSGSSSDSEILGPVLPPFALWQTILIAICLAICIILTVGGNILVLLAFIVDRNIRQPSNYFIASLAATDMLIGTVSMPFYTIYVLKGYWDLGPMLCDLWLSVDYTVCLVSQYTVLLITIDRYCSVKIAAKYRSWRTRTRVIYMVTITWIIPALLFFISIFGWEHFTGKRDLLPGQCAVQFLKDPIFNTALIIGYYWTTLIVLFVLYAGIYKTAYDMQKRSEAKQRKMQSMVALSAGAMSGMAGHAAGIGVIEEKILKTKVELAGDQTDLDSACTTVIKRLSGSGQANPLAVATEEVEKMTPEQRRASAAKIQEEAKKREAAVDAEKSERSSSPAFDSDEESSVNQAQQLITQQKLNNMRKRSSIGLVFGAQAALLATRGKGNLQKSTTNSKSIEAMHQYHHHQQHHHNQSPLQRAQSKEEMRSLHHHQNQQQPHHQHHQNQPNPPLDRPKRTSCSTLSQIAEHDRLVDLSAPPTLLNTSDPLSPVDLAPIEVPSDQVHQGLVQTILPPPDAFQCPTPLSDDYSDRPFGNSSGNSELALTYDLMTNSELRYMDESSAMLASVTANSTTSPNDSVQGKPPVLPPPPPARRNPPKSNLNQSLSQTPSQNQSPSQSLSLNLNPNHNQSQSQSIEEAVAIEKRLLVSYTGIEDFAKVRRESCIEAICLLDVPGKLAADCPHRRASSPMETSSKDAILYSPMPPMPLSPKVKTSTPQTGTPQSAAGVTPPVPLERIEERETSDSNTNKMPSTSGTTSSTGGVGGGGEQDGVGATKKNAGDDDANREEKSLAASRNSSKRAFIHSIGKHFKSKKALPLILGVGGRQKSKSENRARKAFRTISFILGCFVACWTPYHVLALVEGFCRHPPCINEHLYMFSYFLCYANSPMNPFCYALANQQFKKTFTRILKGDLHMT

SEQ ID NO: 17557 - DNA, 3522 bp, DROSOPHILA
gacgcatctcgttctgtggattcaggtgccgtagctctacggccagcagtttcttggtggcagtagtcccggtggcagccgataccaactgtttcgccgactgtctgggcaccgcatcgtagaccttgccaaggagcggatccaccttctcaaagtacttatcctgacgctcgttatcttcgctgctgatgtgattcccactggacttggccttcttcttgcgcttctttttcttctttttggccgcactggcagtagcattgggcagggcagcagacggatgctccgtttcattgtcatcttctttgaactcactctccgagagactcaaaccggcttgattgagctagaaaatttgtgggaacggaggattatgcagttcattcggtgatgagctggctattttttaatagcggcctaccaaatcgaatggattaaggtgtgattttcgatagcgttgcatatcgctgtcctccagttcatcattgtcgctcagctcctcgcagtcctcgtcatcgggcggtggcgccagcttgtcagcgtcgccctgcagcttcttcagcattcgcgcagacatccttcaagtgtccttataccccttagcaggaattctatttaatttcgtcgcaaaatacgtgtgtatttcgctgttttttttttcttcaccacattcgctttcgcacggctgcagggttgccgagctctgtggccacgcgcgcttcacagcactggcctagacaggtggtcccgtcttggcgggaattgaaaaagaagttctaaattttagcaagtgctatacacctatacgccttgcctgtagaagttggatcaaacttgacgtgttattcacagaaattttaataagtttactttttgtctcttcataaagtgaaataggaaaaagcattttaaattgttttgaaaaaatttatttttattcgacatttcctattttaaacttatttacttctagtaaagtgagaatataacatcttacgcatttattggtatacaagcataaactaattatctatctcaaaatagaatatgcaaccaaaatgtcctttattgacaaataattttcgtacaatttcggtgcaatttactgccttatgttctaaaaactgccatgataaggaatttacaaacgagtcttgccataataggcgcctgcgacagcggacagtataatgattactatggcggccatgtagaagaaagtgcgcccaatcgcctggtcacgcaagccgtcgatctggtctgtgagggccatatgctcgtcctccagcatgctgacttgcttgagcaacttggccattggctcactgacttcctgggcatcaaaatggacctctccgtccttgttgtccgtggatattacagctgaacctcccgcctgacggaaatcgtcctccttcgaagggactagctcacatttgatcttggtttcccgagtttcattcgggttctgcatcttccaaaactcctgcacatcgcttatgtcaccagtcacctcggcggccaggagaaggaacttatgacgcttctttatctgctcctgcagaattggctgcatgaatatgtcaacgctgaccttctgctcgggccccaagacaccgatgttggggcgtacataaaaaagttttggagtggtggtcttcatcttgaaggccattcgctgggtcttactggtgttcttgatgactagcttcctgctcaccgagcggttgaatggtccctcaaagacgatcacatcgcacgggtctagcgcaagtttgctctcggtattgtcggacatattggaatatttgtacctttttatttttcaaaaaatcggaagcgatatgaactggaaccgattatgaccaatatatgaaaaaatgtggtaccaaatgaacacgttccctgacaatgccgtagtgcaaatgacagaaaaaggaatgtgaaactttccatttcagggctgaattgagttcacatattgcttgatttcgtatgaattcaacttttctggtgtggacacactggtcggttttgaaagtcatatgcgcagcatcactattatagattgcagctattagcttatgttgcttaaaggaatgtcttaaaagctatattttaggctaatttcataaattatatacaaacctgtctttaaataatgttcaaaaactttttagaacttttgcaaattgtagttttttgtatttgtaagttcaagatgtttagataacaacatgatttcgagtttcagatcgttcgttttatttgttttttgttttattaaatatttacaaaaattcgatacgtttgtgtgactgaatgtgtgtcaggtgggggatggtccatcatttaccaaaatatcatgcgcccggcattgggggaggtggccttggacagaatgatgcccgaaagttcctcgtcctccatttcgttgctgtttcgagtgggaggaggtatgggtaagatacaaattaaaaaatgtttgacaggactctttcgatttatgcaattatatacacgtttattggtatcgctatttgctttgattgctttctttcttttttttgttgcttgcttggtaataaataacaatgaatgttggttgtcgagacggcggatgctgagtgtaggcatcgtattaatctcacggtgtgcgatgatgggtttttcgaaatcgaaatcgattcgatttggtgggtgggtgcttttgtgggcgggggcagtacaacaggcacaacgataacaacagttacaacggattgcggtagccaatttcgcttttatggtctacaaaaaagtccggatatagagaaagaaagagggaagaaataaaagtgataagatatatacaaataaaacatttcgaattccattaaaggcacaaacacaaattcaaatgcagaacgcaatacaaacattgaacaaaacgtataatatcggtacatgcgattgatgatatagtatggactgattaagcaggggaacagggctaaatagggccaataatacacatttagtttgaattaagtcacattttatttccttttttttttgtatgtatttcgattttttcggctttcgtatttaactttaggcactatttaaatattaaatatatattgcaaaaatcaataaaaatatgccttaaaaactcctgcgctaaaaattaggtttgtacagcatgttttgttgtaaaaattttgcattaagtaaatttcgattatacgtagtttaaatatcacttatgtaaatattttcgttttaagccacacgggttaattttaaattttgcaatttttagtttacgttttgcggacggttacaagaacatgttgcattcgcgaaaaatgtacaaatttttaaacatattatttataaatagcattttaaatatagagtgttttcgctctccaatatatttttgtttcttgtagtgtttagaattagatggtttctgttttgtgttctataaattaggtttcgtatttatgcagtcgttaattgtatttttcttttcat

SEQ ID NO: 17558 - DNA, 647 bp, DROSOPHILA
gtgtatataattgcataaatcgaaagagtcctgtcaaacaatgtccgacaataccgagagcaaacttgcgctagacccgtgcgatgtgatcgtctttgagggaccattcaaccgctcggtgagcaggaagctagtcatcaagaacaccagtaagacccagcgaatggccttcaagatgaagaccaccactccaaaacttttttatgtacgccccaacatcggtgtcttggggcccgagcagaaggtcagcgttgacatattcatgcagccaattctgcaggagcagataaagaagcgtcataagttccttctcctggccgccgaggtgactggtgacataagcgatgtgcaggagttttggaagatgcagaacccgaatgaaactcgggaaaccaagatcaaatgtgagctagtcccttcgaaggaggacgatttccgtcaggcgggaggttcagctgtaatatccacggacaacaaggacggagaggtccattttgatgcccaggaagtcagtgagccaatggccaagttgctcaagcaagtcagcatgctggaggacgagcatatggccctcacagaccagatcgacggcttgcgtgaccaggcgattgggcgcactttcttctacatggccgccatagaataaa

SEQ ID NO: 17559 - protein, 201 aa, DROSOPHILA
MSDNTESKLALDPCDVIVFEGPFNRSVSRKLVIKNTSKTQRMAFKMKTTTPKLFYVRPNIGVLGPEQKVSVDIFMQPILQEQIKKRHKFLLLAAEVTGDISDVQEFWKMQNPNETRETKIKCELVPSKEDDFRQAGGSAVISTDNKDGEVHFDAQEVSEPMAKLLKQVSMLEDEHMALTDQIDGLRDQAIGRTFFYMAAIE

SEQ ID NO: 17560 - DNA, 3068 bp, DROSOPHILA
ggaagggtagcttctggtctaagcgtctcctccttgtatttcgcattttgaggaaagggaaatcacttttaaagggaattaatattattattaatcagacggaaagtcagcgccgactttggtctgcaattatgcaaatgtggatcacagcagatccacctcgggttacgatcttttggatatggagtaggtgtgtcttggcaggatgccagcttccacgaagggtggaggtattagcatagccccaagctgatatgctttccaggaaagatccagttcctccgatgtgtgggcgtttttgggcctggccaaggaattcgctacctaaattatgcactcgcctcgggatcttgggcaaactaattagtgtggccagtacggggcatttttcaatatgccccccccccccccacctcaattggcacctggccataaattcaaccggccttgggacggacaatctacagtttctagttaagtctgcccaccttgcaatccccctttcgcattgtgtggggccaattgcccgctgtgagccaccacctcctccaatctttgcggtgccgaatcgaaaatgcaaatgtcccgtccgccaggagaaaactaagtattcccgaggggccagaagtcaactaagcggatttatttattttactttccattcgctattttcccatatcataagtagtctttgttagtctttctttcatttaagtttgactagtgttcactcatatagtgtactcatatagtttcttttaaagaaagttatctcatttatttcggtaaaaacagtagtgtatatgattagtattttttttttacattttagtactaataataaagcagtatataattaaaaaacaaagtcagtgggttatatcaaagtcgagcaacaattcaattcctaattcgaattgcaaggaaacgcaaccattcgttttcattatgcctattgatgccctagatgtctagataatgtcttcaagtagtccgtcttttacttttcatttcgctggtgggtaatggtggtcacgcccacgtcctcctttaattgatccttatcgccccaaccccaaacaggatgtgatccatcgccagagcgctggactcgctgcttgaccaaatccagtgagacactctttagatcgtaggcccaacccaaataggccatgaattcgataaacttggtggtcacatcctgcgaatacttgcccagctcggcgctcttgtagtcccagggaaagacatggtggtagttgtggtatccctcacccacacggaaaaatatgaggaagccctgatcgactggacatatgttcttgtcgtaaggccgcatgccgtgcatgtgggccgagctattgaccgtccagatgagattgagactgaggcaccatcgaagcagggccatcacgtgccaggacacattgagtgattcgccccacagatacatgggcaaaacggtgggcaggacaaagcaaatgattggcattagcagcaggtagtatttcttctggaacatgatcagtggatctgcctccagatcggatagatctatttgcttgcccttctccacaacctccggatgcttgcggcagcacaaccaaccgatgtgggcaaagaaccaaccacgttgcgaattgtacggatccgcatcagtttccgtatacttgtggtggacgcgatgatcccgggcccaatagtagaccgcatcctgaaaggccaaagtgttcaggaacaaaaagatcagcttgagcggtgtattcgccttgaatgtgcgatgagcccacaaacgatgggcaccgccggaaactcccaaaatggtcaccacaaccgttggccaaaagagcacgaccgttgtccacgtggccgaagtgaagagcagccagactccatatagcgaagatatgtgaaggatcacgaacagcactatattgacccataccaactccagtttacttccatcggtggtcttccgattgcttagctccgtcgacaatccaccgtctactgtctcgacatcggattcgtaaagcactccggtggtgtctttggtattgcgtggcatggtgctttacgtttgatacagtttctgcttttcgactgggcttctatttatcagatacatataaacatgatacgttgaacccataacgtcggagtgcaattcaaatctatgcgcttcaagcgctcgctatttgcaaattacaaattacaaattaacaaattacaaatttgaatgcaacaaattaaagtgcaaaaattcgcttaaacaaattgaatttcttcggttcctgcttacgcagtgctacgaatgcaattcaaatttgcattatgacatatacatacattgttgcactcagggaaagctatgcattttcggttttaccaattcaaattctgaatcgtacaattttataaattttgctggtatttacggggctatttttatttgcatcagataacttccaacattttgcattacctccagtctacctaaaataatcaatattcaattcaaaaatatcaaaagtatctagcaagaactgtaatgctttaaatgttttattatataattatttagttttaaataataagttaaattgaataattgtagtcttattttttacaaattatttttggtttattaatttatcgaaaactgagtggctgtttgattttttttctgcgtgcagacagtagatgtgttgatgtggctgctgctaccgttgatgttgcagttgcagttagatgtggcgcatcattaaagtgcagacaaatggcagcgcggcatgtgcggcacatgtcaggctgcacaagctttagcaacaggtgaaaatgctggaattctgattattcaccgctgctgcagctgcagttgctgctgttgttgctgtagctgttgctgttgcggtgattggcagcaacttaaactgtaactttcaacgatttgtcgtcgttgtcgctgtcgttctcttgccactgccactttgatgtgggccaaaccaaaactatcgagcggacagcatgcaacatgcgcataattatccgaatgcccgctggcagca

SEQ ID NO: 17561 - DNA, 1068 bp, DROSOPHILA
atgccacgcaataccaaagacaccaccggagtgctttacgaatccgatgtcgagacagtagacggtggattgtcgacggagctaagcaatcggaagaccaccgatggaagtaaactggagttggtatgggtcaatatagtgctgttcgtgatccttcacatatcttcgctatatggagtctggctgctcttcacttcggccacgtggacaacggtcgtgctcttttggccaacggttgtggtgaccattttgggagtttccggcggtgcccatcgtttgtgggctcatcgcacattcaaggcgaatacaccgctcaagctgatctttttgttcctgaacactttggcctttcaggatgcggtctactattgggcccgggatcatcgcgtccaccacaagtatacggaaactgatgcggatccgtacaattcgcaacgtggttggttctttgcccacatcggttggttgtgctgccgcaagcatccggaggttgtggagaagggcaagcaaatagatctatccgatctggaggcagatccactgatcatgttccagaagaaatactacctgctgctaatgccaatcatttgctttgtcctgcccaccgttttgcccatgtatctgtggggcgaatcactcaatgtgtcctggcacgtgatggccctgcttcgatggtgcctcagtctcaatctcatctggacggtcaatagctcggcccacatgcacggcatgcggccttacgacaagaacatatgtccagtcgatcagggcttcctcatatttttccgtgtgggtgagggataccacaactaccaccatgtctttccctgggactacaagagcgccgagctgggcaagtattcgcaggatgtgaccaccaagtttatcgaattcatggcctatttgggttgggcctacgatctaaagagtgtctcactggatttggtcaagcagcgagtccagcgctctggcgatggatcacatcctgtttggggttggggcgataaggatcaattaaaggaggacgtgggcgtgaccaccattacccaccagcgaaatgaaaagtaa

SEQ ID NO: 17562 - protein, 355 aa, DROSOPHILA
MPRNTKDTTGVLYESDVETVDGGLSTELSNRKTTDGSKLELVWVNIVLFVILHISSLYGVWLLFTSATWTTVVLFWPTVVVTILGVSGGAHRLWAHRTFKANTPLKLIFLFLNTLAFQDAVYYWARDHRVHHKYTETDADPYNSQRGWFFAHIGWLCCRKHPEVVEKGKQIDLSDLEADPLIMFQKKYYLLLMPIICFVLPTVLPMYLWGESLNVSWHVMALLRWCLSLNLIWTVNSSAHMHGMRPYDKNICPVDQGFLIFFRVGEGYHNYHHVFPWDYKSAELGKYSQDVTTKFIEFMAYLGWAYDLKSVSLDLVKQRVQRSGDGSHPVWGWGDKDQLKEDVGVTTITHQRNEK

SEQ ID NO: 17563 - DNA, 5488 bp, DROSOPHILA
acaaaactacgcaaaaatggagaattcagttctttacttatttttacaaatcttacgtaaacactccaagcatgaattcgcgacaagtacttagccatcgaacgaactcgtttattcgatagaatcgagatggctgagacccctgctggtgcattaacttgttctcatatctgattgtaaaagagaatctatttcttcaataaaatgtcaccaagtaaaagcgatgcgaataaggatgtattaatcgccgaatatcttcaagtttataattaatatttagaatacagcaagctatgaatatgtactaatgtaatgtaatgtactgctctaatcctaactctaaactaggaattactggatttcatatttttttcttacattgtcttttctgtttcatatcgttaagttgaaaagatcagagccgctgataattgaaaatcatactaatactccagtttatttttgaatttatcggtttttttttttttaaagaaaatgtcgctatattcctataaattagataatattaataaggaatcaatcttaatttagtatttttgaaaatgtagcttattcaagcaaatacttattatacaaatataggtaaatgtgggttaatggtattagttttgtttttgtaaagattttctctaacccttaggaagtagtacacctttcataacctaaggtacataatgtaatataatttatttttgcagagcgaactaaacagaaatatatattaaacaaaaaatatatgaaaattctatgatgcttttcaaatcatccacagggaggaggatgcaacaaaaggggccaaagttgtgacaattcaagttgtttattctaatctcgaaaaaagacttgattgtttagctttttctgtcttatatcaaaatttcgaaatagatatgcctgatgcccgctaaggtcgagcgatcagtgtgaccctgccaacaaagcataacggtaataacaaaagctaacggtatatcgccagtgtggacatgccaccccagacgggcagtgcgaccaggccgcgcaagaaagcagccactgggaacacggcccgcggattagcagcagttgcgagagaggcgcgcgcgcggtcacaactgggcgacggcagcgattggggcatgcaaattatgccaaatagcaccatcgacgggagcacgagcacgagaagcagcagcagcaacagcaacgccacagccaaagtcatcgccagcgtcaacgccgacaaccgagcacagaatgcagcagagcaccggagcggcgacgtcatccgcagcagatagcgggatgggggcgacggacctggtgtccaggtgcgttggcgacggcgggggaggtggcgggaacagctgctccggcggatccagcgacccagcagcggtgagaggcgtttttccatggagttgcccaattttgttgctttccactttttcttcttgttcttttttttttttaagtgttcgtgcgaaccagtgtgtgtatttatggtttgtttggcctggccaaaaattatataactttaagcggaggcagcgcacgcttagtgacacccccaaaccctcctcctccttatcatcctccaccatcacccatttcaccccgctgctcagcaaaaagcgttgtaaacgcgcacaacaactgtgtgtgtccgtgtgtacatgtgtgtgtgtgtgtgggcgaacgttttattttccatgctcctcctcggctcgtttgttgtaattttccgcagtcagcgcgcatgccacccccctgctaccccctcccaccatcccacaacacttttcacaccgaaaatattttcaaattagtccagaaatccagaaatgctaaaagccatttttgcaacaaaataaaatgaaaccaaatttagcacacagaatcagtggatttaaaaacaatcacaagtacatatttttactccaccagttattccgtaaggctaagtaatcaagctaataatattcctttcgaaaccacaattctctctttaaagccgaaagaaagcttaccacttacaggaatagaggtgttccacaaatggctaacttgctgaaactcaaaagtttattggataaccaataagtacatataatgccatacagaatagaattgatatttgagaatccctgtaaatgtatcgtaaactgcatgaaataacggatgaatctttttgaactgcaaatacttgatttgtaaacccagctaagttctagaagtttggaaaatattgagctaatgaaaaatattctccgtgcatttctgctacacgttttcgcatttatttagtttttctcgctggcttgcctaattttcgaaatgcgtgtatttacacaggcggcgcttgtttgtttgtttctcgttttaatcatttattcgatttcgccatgtccttgcgaaccacccaaccacccaaccacccacctttggcccagtttcttggcgagcttcgagctgctcgcttccggtgtcccgattcaatcgcagcacatatttaatttcatttctgacgcccggccaatttcccattaacttgagctaattaattttggccagctgccgttggtaataatggttacgtcaggcgaggctcgtctatttttggtccttaatcctttgctgcttcgcagcgccagagaacgataaagagaggaagagcaagagagagagtgagaaagggggagagagtgtccttgccacccccccaggctatcattcatatcctgcccccgccccctactccccttgtctgcccaagaactcaaggacttgtttatttataactccggctcatccagttcgggatgccaggcgaaccgcattcactattcagccggatcgcatagtttccgccttaattcgctgcgccccatcgttcgtcttttgtttattgatttattcacacgccttctgtttggttttcatttctatttttacctttatttattttttttttagcgctttatcgttgttgtgcattaaccaaaacgaaacactcgaccaccaactatggccaggtaagggctgccatcccattccattctccactcctccatttaagaggcgaaaccactgcggttctgggctggaacgatgccacataagcaaacattgtcctgggaaatatttaatttcaatgataactcgaaaaaccctaatactgattactacctatacgttaataactcaatgagtggattttaactatcaatttaatattaattaattcatttaattgataacgaaaagctatatgttgcaaatactctccatcacatgttattatgtggcatttcgcacatcccaagtatagtgcgcagtggttttgcttgaactccgctcgatcctaatggcctccattccttgcaactccttgcagatcaacacaacgattagctccaagcaggcggatgcgagggagccgcaggagcagcaggttgccatccactacttggctagcttccatgaactgtgcgtggtgaccgccctgctgccgctggtgacgctcttcacgtgcttcgtgaccgcctacgtcttccagtacgacgatgtccacgagacacattgccgcgtgagtaaatgggcaccgggcgatccaagggtattcagtggccaggatgatgctgatgaatgatgaatgttttgggcagggctccggcgcgtcgcccgtggccaataaatcactgtcatccctgcgggaatcccgccgagattggagacacgcaaatccgcttttccaaacgattcgctcacaattgctccacgcatggcggtttttattttcaccagcggtcatttatttaattttaattacaataaatttcaccagtgaaatatattcctatttgggtatatatataactcaaatagatttatacatatctgatttttttatgttattaatatatattttgattattagtggccataattcattttccttgcaagtatagagagcattcacttcaagggtaacccgtccgtccatattcaagagcatctcccaccatatcttcagtctccagattaatgttattaattatgtatggcattcgttaccaggtctacaacattataccctcgataagtgcaattaccggcgtcagtccgcagcgctacttctggcgcttcagcatcgcgctccacatcggaccgcgaaatccccatcgcctttgtctacaagaactactaccgctcgcagctgcgtcggatcagtcccgcccaggtgcctcagacgagcctgctcatcacgctgatcctggtgctcaattgcatcgagatcgcgtccctgggcggcgtcacctatatatcgaatcgcgagaactaccgtaggtcctgcccagccccccaatcgtacatctgatccctctgatccgtctgctctctctcttccagccgttcacgagcgcatattcatcacgttcatggtctgctcgctgtgttacatgctggccaccatcaagctgaacggcatcctcaatgccggacaggcactgagcgaaaagcagctcctctccatcaagtggaagaagatcctgttcgccgtctccatcctgagcaccgtcggcctgctggtgttctttgccaaacatcgcttctactgtcacgacttgggtgcgtttcaaatctcttagtttcacattttccaccccgaaacagataatgaatctcccacatctctattcccacatctcttgacagcattcagttggttcgcgttcttcgagtacttgatcgccattgccaacatgcttttccacttcaccatcatctgggacttcccatcgcagttcatgatgatcgtgcagggaccccgcgagaatcttgcccagtatttgagcaaccggccgaaactggactagattcgaccaggactagatgcccccagcacgccactcctccagtgaaccgtgtgcgtgtaattcccgtgcgaaacgtacaattaacgaacttcttcaactttaaaactaagcgcttccataccgatcaaccatagcaaatttagccttcttctaattcttcgattctctttacacttacacttatgtatcaatctaaaccgaaagcgaaaccaaaccaaaatccagagataaatgttccatagttccatgattaatatagctattgaatttaacaacaagtatgtaaagaattttgccagattagagggcataccgttctatgtacacattctaaatacgtgaaataagttacctagggattaagtgcacccaaaaccaaaaccaaaccaaatggatcgcagctcgccagatctcatgtcaatttcgaatggaatgcaaggagccaagccaggtgcgagcagtttcatttgttaggcagtaaagtaaagtaaaataaatagaagtcgcattacttaccacttagtacatatcgtttatacaagatgataacgagcagcgggaaatagcctccttgggacaggccctattggcccccaaccacaaaagaa

SEQ ID NO: 17564 - DNA, 916 bp, DROSOPHILA
tgtggacatgccaccccagacgggcagtgcgaccaggccgcgcaagaaagcagccactgggaacacggcccgcggattagcagcacaccatcgacgggagcacgagcacgagaagcagcagcagcaacagcaacgccacagccaaagtcatcgccagcgtcaacgccgacaaccgagcacagaatgcagcagagcaccggagcggcgacgtcatccgcagcagatagcgggatgggggcgacggacctggtgtccaggtgcgttggcgacggcgggggaggtggcgggaacagctgctccggcggatccagcgacccagcagcgcgctttatcgttgttgtgcattaaccaaaacgaaacactcgaccaccaactatggccagatcaacacaacgattagctccaagcaggcggatgcgagggagccgcaggagcagcaggttgccatccactacttggctagcttccatgaactgtgcgtggtgaccgccctgctgccgctggtgacgctcttcacgtgcttcgtgaccgcctacgtcttccagtacgacgatgtccacgagacacattgccgcgtctacaacattataccctcgataagtgcaattaccggcgtcagtccgcagcgctacttctggcgcttcagcatcgcgctccacatcggaccgcgaaatccccatcgcctttgtctacaagaactactaccgctcgcagctgcgtcggatcagtcccgcccaggtgcctcagacgagcctgctcatcacgctgatcctggtgctcaattgcatcgagatcgcgtccctgggcggcgtcacctatatatcgaatcgcgagaactaccccgttcacgagcgcatattcatcacgttcatggtctgctcgctgtgttacatgctggccaccatcaagctgaacg

SEQ ID NO: 17565 - protein, 130 aa, DROSOPHILA
MPPQTGSATRPRKKAATGNTARGLAAHHRREHEHEKQQQQQQRHSQSHRQRQRRQPSTECSRAPERRRHPQQIAGWGRRTWCPGALATAGEVAGTAAPADPATQQRALSLLCINQNETLDHQLWPDQHND

SEQ ID NO: 17566 - DNA, 7494 bp, DROSOPHILA
ttcgcttccagtcatcagcttctccacctccaagctgctgctcagtgtgtccgccgtgctgctgggatttggccaggtggtgaccgcctttctgcaggagctggtcttccagatgggcatgacgcgggccaactggacggccatccgccgtccggtgcacttcaccaacggcctgctggttctcctctggggcgcgctggcccactgggtggtggagcggtactccttccaggccaccgtgggactggccggcgccctttacggaactaccacgctgctctggaacttcctcttcttctgctgccagagcaaggattgagggactgaagaattcgcgcactctcacacaacaaggcatcgtgtatgtgtgtgtgtgtgtgtgctgctgtggctgacgttgttgttgtatttgtgcagtgatattaataaataaatatataaactataagcaagctacatacattttaacataagtcttaaaagtcttattacgtcaatttgaaaaaagaatggaatgctggcctttaaaatatccctaaagaactgctacagaagtagctatagccttttagctatttttccattaagctgtgctgactactgtactttggaaatgtggacagtttttttccgattaaaataagtttaaaagtataaaatgttgcgttcattctagagattggttcaattttttagaaatctgtcgcacactaaaaaaaatgcatgttcttacaaaattcgctgtgtaagaaatattgaaaatattgaaatattattggaaaatattgacgaaaaatttcccttttcaccgaatttgtcgtatttttacagtaagactaaatgccgttatttcctcagatatttctaggtaattacattcgctgcgtgacgaaagctgcctgctatgatgcggcagccagacccaacactgttggccgatatcgattggtttggtattatagagcaatatcttgtacggtcatactaaggcaccagtacgccaaaaccgaaattttctttctttactcaattttcatcgagctaagttgcgaaaattttctcaagtcacagtgaaaagtgtacattgtttaaaacctggccaaggggtaagtgtttgttgcaaggcgcttgtggtgtggcactcagtgcggtgcaatagcagcgtcggcattttccggcggccgcagaagtggcaccaagcaaagacggcgaaaaacagcgaaaaatgcgcaaaatcgggcttcctttttgccggctcgttttccttttttgcttattcttcttcttgcgattcttgaaagcgaatgcgtgtggaaaaataatttctgattaaatttcaatttgcagctaaaagtagcgaaagcggtagcgaacacacgcatgtcgctgcctcccgaggacaccgatttgtccacaaattccgcatacgaatccgcactccaaatcgcgagcaatgtgtcggcagcacgagtagtcggttcggcagtaggacagcgattttcgccgtcgccagcagctcacccgaacgtgattgagcgcgtcgcgtctcatgtggactcacgccgcagcacgtttccaagttggggtaatccgtcagtagcgccaagaggatcggaagaagcagcagccaacgccacagcaacacaactcctatgggcggagaaccaaggtctcccgacatcgcacttattgccaactgaacaggcattcgagacattgaacactaatgcgtattgttccccgccaggggattcacgatttacgttccctagccagaactactcgccgctgctgccgcggtgtgtcccagttccgaatcagcgttactctccagatggatcgccaatacatcaactccatgagctgcaaaattgtccattgatagattcgccgataagactgcgatttccatcccccttgccagaaccaccatcactaccgaccatcacccttacagttgatgccctgatcgatcttgaccaaaacaaccaggtcgcatattatgtccagcagtacaacaatcagccagtcctatatcaacaaaacattcatataggaacgggaatccaactatgcgatcaggcctccgagaataatcaaccgattatattacatatcgtggagcacaatccccagactataactgagagccaggagcaattccaccaggttgtccccgaaattcaaatcaataatatccaggagcaagatcagaaatttgaaaatggcatctcggaacaaaatcatccgattgcaactgaggctcaggatcagactttaactgagatccgggatgaaaaccagattgtccttgcagtccaagaaaaaaatctcacgcgtgcctctgagattcaggaccagaaccaacagacattaaccgagatcccagagaaatgtcttcagattgcatctcctgtcactactgatatacaggtacaaagtcctcaggttgtaatagagatccaggagcaaaatcaccagtctgtaacggagatccaggaggaagttcaccagactgcccccgaaatccaagtgaacgttttccagacctcgtctgatattcaagggcaaaatcaccagattgtaactgaagagcaaaatcatcagactataaccgagacccaggaggattactcggctgtctccgaaatccaatgggaaaatctctcgttttctgctgagattcaggagcaaaaccagcagatcgtaaccgaagttacgaagcttgcatctccttctgttactgatatacaggcacaaagtcctcagtccgtaatcgagatccaggatgacgatgatgaagatctaaagttcgaatctgatgatctgcacactatacctgaaatccaggagaaaaaccaacaaagtcctcagttcgtaatcgagatccattatgataatgaagatctaaagttcgcatctgataatcaggagcaagatcaacaaacagccgagctccaaaaggaaaggttccagttcgcatctgaaatcgagaagcgagatctgcagattgttactgacactcacaaacaaaattatcacaatgtaaccgacatcccgttcgcaacatacatccaggaggaaaacgagcagttaacaccggaagaccaagaggaagatcaacattacctgaattttgaggggaaccaacaattccagctccagaagcaagatcagctgagtgtaccacagatccagaagcaaacccaccagttcgaatctaaggtcaaaaagagaaagttgcagcccttttctgaataccagcagaaaggtcagaaagatcatatccaagagaggcagtatattcagcaggaattcaccatccactctaaccaggcttattctaaggtccagtatatacaaactatacaaactgcgactccgtacgtacctcaattggaaatatcccaggaaaacagttttgaggttcaaccagcatacgaggtaaacgaaggccaacgggacagagaactggttagttacacaggccacgagcatcagaactttgttgatgaggtctcgacaccattaccgcccgctgaagctcaaccaggatctacttcagaagatatatcagaccccgtttcacctgaacattgggagcagctagagtcactcgatccgagcactatttgtattcgcaaaaccttcaatctaattcgcgatatctctgaaagtctggtggccgatccagagcaacccgaagccgaagcccaccggaagtcaattttccttctccgccagaagctagccgatgtgtgccataaggttctaaccgaaattatacacggccgggccaccgatgagatcatctccattctgagagagattctcgagcaaactaaggaaatacctccacgccccacgccgaaaagagacctccaagaagacatttcgatgggcttagaaatattaaaaaagatccgtggtatgctatccggttggtattcttccagagaaagcgaaacggactccacggataccggaacgggattccaggctcaaaacggaaaaggttttggtgccggccgccagccggaaaatagttttttatcccagaaaagacggtaagcattaagaattttatgttatttttaattttgtttacctaaatccaactaggtaagcctgcgcaacaattttatgtcattcattgctactcccatgtaaaaatttcaattaatgttttttctctactttcagcaaccaagaagagaaccctcgtctgatcaagtaccggcgtgtggacaacagctttccccgcttgataacgaatgagacggccgaggacctgattcccaacaattcgatggccaagcgggatcagccccagagctcaaagcggctctcaatatttaatccgccggtatacacgcagcaccgagtgcgcaatgatgccccccacgtacctacgccatttgacgatgaggagtcgtcacagagacttgctaacgcgggcccatcatccaggcccatgacttactcggatgcggtgcgtctaggccataatggcatctccgagtcgcgcgtaaatgggcactccagccatacggtgcgcagagaaccgtctcggctgcacagaagcattctgtcccacgagatgaactgcaaggatcaagagcagtataacgaacttatccgtacccaaacaaattacgtgggcagtcgctacctcaagccgggtaccccgccaacgtttcagcgggctaaagcccagtcggcaaccagtagcagctgctcactgcaagacaaccaatcgaatataacagattcgttcccgtcgccacatggccgtgcgaaccctgagctaacggagtacgccaaattgatcaaccgccaggagaatgaggagaacaggtctccggcaccacagcagccaaagcgaaacgctagcaatagctctgccagccatgcgtccactatttccagcagcgcatcttcctcctgcagcacttgttcaacttgctcatcttctgacactgagccaatgttggttaaagatagcccggaggtcaaggaagccaacgaagccaacgaggccaacgaagccaacgaagccaacgaaaccaaggaaaagtaaataaatgctttatatccaaacgtaaataatttgcaataatcaaaaatcctgattttatcaccaattagtgacgcacctcaacctacaactaccagaatcaagaaaccagacttcttgcaccgtcgctttgccaactgtatctttctaaggaatgactttgcggaaaatttcaaagcaagagcgaatcgccggcaacttgaatccatgcatcttcttggaatagctgaacagcagtaagtatttgtaacgctataattaggcccagtaccaagaggcttttttccaattttagggctaatgaaagcaaagatgaacgccttgcctatgaaaaaaagctgcgggaagtcatgttccggtctggtgctccccaccggcccttttttgaaatcgggcccctggaacagccggaagagaagaaagagaccaagctcattccgctaacaaaggaggaccacgctcgctttcaagaaatgacaactattgaggttacgacggtaaacgaatatatttatttatttatatgtgtacccatttaaaacgtttatatgcttgcgctttaaaatcttatttcagaacttaattttcaaatataacctacaaataactaccgacgacatattcacgtttgttgatggcgaatggcttaacgacgcgatcatcaacttttacatgtccatgctgacggaacgctcggagaagcgagctggcgaacttcccgccacttacgccatgaacacattcttcatgccccgtctcctgcaagctgggtatgcaggcgttaggcgctggactcgcaaagtggacttgttcagcaaggacataataccggtgccagtgcactgcggcaacgtccactggtgcatggccatcatacacttgcgtaacaagacaatcttctattacgactcaatgggaagaccaaaccaaccggcgcttgatgctctagttaaatatctgcacgaagagtcactagacaagcgcaaacagccgtttgatatgaccggtttcgttgtcgagaacgcgcagaatataccacgtcaagggaatagcagcgattgcggtgtcttcagctgcatgttcgccgagtatataacgcgtgatgttccgattaccttctcccaggcggaaatgttgtacttccgcacgaagatggccctggaaatcgccgacggaaagttgtggcagtaggggttcaagcacaaaactacgcaaaaatggagaattcagttctttacttatttttacaaatcttacgtaaacactccaagcatgaattcgcgacaagtacttagccatcgaacgaactcgtttattcgatagaatcgagatggctgagacccctgctggtgcattaacttgttctcatatctgattgtaaaagagaatctatttcttcaataaaatgtcaccaagtaaaagcgatgcgaataaggatgtattaatcgccgaatatcttcaagtttataattaatatttagaatacagcaagctatgaatatgtactaatgtaatgtaatgtactgctctaatcctaactctaaactaggaattactggatttcatatttttttcttacattgtcttttctgtttcatatcgttaagttgaaaagatcagagccgctgataattgaaaatcatactaatactccagtttatttttgaatttatcggtttttttttttttaaagaaaatgtcgctatattcctataaattagataatattaataaggaatcaatcttaatttagtatttttgaaaatgtagcttattcaagcaaatacttattatacaaatataggtaaatgtgggttaatggtattagttttgtttttgtaaagattttctctaacccttaggaagtagtacacctttcataacctaaggtacataatgtaatataatttatttttgcagagcgaactaaacagaaatatatattaaacaaaaaatatatgaaaattctatgatgcttttcaaatcatccacagggaggaggatgcaacaaaaggggccaaagttgtgacaattcaagttgtttattctaatctcgaaaaaagacttgattgtttagctttttctgtcttatatcaaaatttcgaaatagatatgcctgatgcccgctaaggtcgagcgatcagtgtgaccctgccaacaaagcataacggtaataacaaaagctaacggtatatcgccagtgtggacatgccaccccagacgggcagtgcgaccaggccgcgcaagaaagcagccactgggaacacggcccgcggattagcagcagttgcgagagaggcgcgcgcgcggtcacaactgggcgacggcagcgattggggcatgcaaattatgccaaatagcaccatcgacgggagcacgagcacgagaagcagcagcagcaacagcaacgccacagc

SEQ ID NO: 17567 - DNA, 4907 bp, DROSOPHILA
ccaaaaccgaaattttctttctttactcaattttcatcgagctaagttgcgaaaattttctcaagtcacagtgaaaagtgtacattgtttaaaacctggccaagggctaaaagtagcgaaagcggtagcgaacacacgcatgtcgctgcctcccgaggacaccgatttgtccacaaattccgcatacgaatccgcactccaaatcgcgagcaatgtgtcggcagcacgagtagtcggttcggcagtaggacagcgattttcgccgtcgccagcagctcacccgaacgtgattgagcgcgtcgcgtctcatgtggactcacgccgcagcacgtttccaagttggggtaatccgtcagtagcgccaagaggatcggaagaagcagcagccaacgccacagcaacacaactcctatgggcggagaaccaaggtctcccgacatcgcacttattgccaactgaacaggcattcgagacattgaacactaatgcgtattgttccccgccaggggattcacgatttacgttccctagccagaactactcgccgctgctgccgcggtgtgtcccagttccgaatcagcgttactctccagatggatcgccaatacatcaactccatgagctgcaaaattgtccattgatagattcgccgataagactgcgatttccatcccccttgccagaaccaccatcactaccgaccatcacccttacagttgatgccctgatcgatcttgaccaaaacaaccaggtcgcatattatgtccagcagtacaacaatcagccagtcctatatcaacaaaacattcatataggaacgggaatccaactatgcgatcaggcctccgagaataatcaaccgattatattacatatcgtggagcacaatccccagactataactgagagccaggagcaattccaccaggttgtccccgaaattcaaatcaataatatccaggagcaagatcagaaatttgaaaatggcatctcggaacaaaatcatccgattgcaactgaggctcaggatcagactttaactgagatccgggatgaaaaccagattgtccttgcagtccaagaaaaaaatctcacgcgtgcctctgagattcaggaccagaaccaacagacattaaccgagatcccagagaaatgtcttcagattgcatctcctgtcactactgatatacaggtacaaagtcctcaggttgtaatagagatccaggagcaaaatcaccagtctgtaacggagatccaggaggaagttcaccagactgcccccgaaatccaagtgaacgttttccagacctcgtctgatattcaagggcaaaatcaccagattgtaactgaagagcaaaatcatcagactataaccgagacccaggaggattactcggctgtctccgaaatccaatgggaaaatctctcgttttctgctgagattcaggagcaaaaccagcagatcgtaaccgaagttacgaagcttgcatctccttctgttactgatatacaggcacaaagtcctcagtccgtaatcgagatccaggatgacgatgatgaagatctaaagttcgaatctgatgatctgcacactatacctgaaatccaggagaaaaaccaacaaagtcctcagttcgtaatcgagatccattatgataatgaagatctaaagttcgcatctgataatcaggagcaagatcaacaaacagccgagctccaaaaggaaaggttccagttcgcatctgaaatcgagaagcgagatctgcagattgttactgacactcacaaacaaaattatcacaatgtaaccgacatcccgttcgcaacatacatccaggaggaaaacgagcagttaacaccggaagaccaagaggaagatcaacattacctgaattttgaggggaaccaacaattccagctccagaagcaagatcagctgagtgtaccacagatccagaagcaaacccaccagttcgaatctaaggtcaaaaagagaaagttgcagcccttttctgaataccagcagaaaggtcagaaagatcatatccaagagaggcagtatattcagcaggaattcaccatccactctaaccaggcttattctaaggtccagtatatacaaactatacaaactgcgactccgtacgtacctcaattggaaatatcccaggaaaacagttttgaggttcaaccagcatacgaggtaaacgaaggccaacgggacagagaactggttagttacacaggccacgagcatcagaactttgttgatgaggtctcgacaccattaccgcccgctgaagctcaaccaggatctacttcagaagatatatcagaccccgtttcacctgaacattgggagcagctagagtcactcgatccgagcactatttgtattcgcaaaaccttcaatctaattcgcgatatctctgaaagtctggtggccgatccagagcaacccgaagccgaagcccaccggaagtcaattttccttctccgccagaagctagccgatgtgtgccataaggttctaaccgaaattatacacggccgggccaccgatgagatcatctccattctgagagagattctcgagcaaactaaggaaatacctccacgccccacgccgaaaagagacctccaagaagacatttcgatgggcttagaaatattaaaaaagatccgtggtatgctatccggttggtattcttccagagaaagcgaaacggactccacggataccggaacgggattccaggctcaaaacggaaaaggttttggtgccggccgccagccggaaaatagttttttatcccagaaaagacgcaaccaagaagagaaccctcgtctgatcaagtaccggcgtgtggacaacagctttccccgcttgataacgaatgagacggccgaggacctgattcccaacaattcgatggccaagcgggatcagccccagagctcaaagcggctctcaatatttaatccgccggtatacacgcagcaccgagtgcgcaatgatgccccccacgtacctacgccatttgacgatgaggagtcgtcacagagacttgctaacgcgggcccatcatccaggcccatgacttactcggatgcggtgcgtctaggccataatggcatctccgagtcgcgcgtaaatgggcactccagccatacggtgcgcagagaaccgtctcggctgcacagaagcattctgtcccacgagatgaactgcaaggatcaagagcagtataacgaacttatccgtacccaaacaaattacgtgggcagtcgctacctcaagccgggtaccccgccaacgtttcagcgggctaaagcccagtcggcaaccagtagcagctgctcactgcaagacaaccaatcgaatataacagattcgttcccgtcgccacatggccgtgcgaaccctgagctaacggagtacgccaaattgatcaaccgccaggagaatgaggagaacaggtctccggcaccacagcagccaaagcgaaacgctagcaatagctctgccagccatgcgtccactatttccagcagcgcatcttcctcctgcagcacttgttcaacttgctcatcttctgacactgagccaatgttggttaaagatagcccggaggtcaaggaagccaacgaagccaacgaggccaacgaagccaacgaagccaacgaaaccaaggaaaatgacgcacctcaacctacaactaccagaatcaagaaaccagacttcttgcaccgtcgctttgccaactgtatctttctaaggaatgactttgcggaaaatttcaaagcaagagcgaatcgccggcaacttgaatccatgcatcttcttggaatagctgaacagcaggctaatgaaagcaaagatgaacgccttgcctatgaaaaaaagctgcgggaagtcatgttccggtctggtgctccccaccggcccttttttgaaatcgggcccctggaacagccggaagagaagaaagagaccaagctcattccgctaacaaaggaggaccacgctcgctttcaagaaatgacaactattgaggttacgacgaacttaattttcaaatataacctacaaataactaccgacgacatattcacgtttgttgatggcgaatggcttaacgacgcgatcatcaacttttacatgtccatgctgacggaacgctcggagaagcgagctggcgaacttcccgccacttacgccatgaacacattcttcatgccccgtctcctgcaagctgggtatgcaggcgttaggcgctggactcgcaaagtggacttgttcagcaaggacataataccggtgccagtgcactgcggcaacgtccactggtgcatggccatcatacacttgcgtaacaagacaatcttctattacgactcaatgggaagaccaaaccaaccggcgcttgatgctctagttaaatatctgcacgaagagtcactagacaagcgcaaacagccgtttgatatgaccggtttcgttgtcgagaacgcgcagaatataccacgtcaagggaatagcagcgattgcggtgtcttcagctgcatgttcgccgagtatataacgcgtgatgttccgattaccttctcccaggcggaaatgttgtacttccgcacgaagatggccctggaaatcgccgacggaaagttgtggcagtaggggttcaagcacaaaactacgcaaaaatggagaattcagttctttacttatttttacaaatcttacgtaaacactccaagcatgaattcgcgacaagtacttagccatcgaacgaactcgtttattcgatagaatcgagatggctgagacccctgctggtgcattaacttgttctcatatctgattgtaaaagagaatctatttcttcaataaaatgtcaccaagt

SEQ ID NO: 17568 - protein, 1513 aa, DROSOPHILA
MSLPPEDTDLSTNSAYESALQIASNVSAARVVGSAVGQRFSPSPAAHPNVIERVASHVDSRRSTFPSWGNPSVAPRGSEEAAANATATQLLWAENQGLPTSHLLPTEQAFETLNTNAYCSPPGDSRFTFPSQNYSPLLPRCVPVPNQRYSPDGSPIHQLHELQNCPLIDSPIRLRFPSPLPEPPSLPTITLTVDALIDLDQNNQVAYYVQQYNNQPVLYQQNIHIGTGIQLCDQASENNQPIILHIVEHNPQTITESQEQFHQVVPEIQINNIQEQDQKFENGISEQNHPIATEAQDQTLTEIRDENQIVLAVQEKNLTRASEIQDQNQQTLTEIPEKCLQIASPVTTDIQVQSPQVVIEIQEQNHQSVTEIQEEVHQTAPEIQVNVFQTSSDIQGQNHQIVTEEQNHQTITETQEDYSAVSEIQWENLSFSAEIQEQNQQIVTEVTKLASPSVTDIQAQSPQSVIEIQDDDDEDLKFESDDLHTIPEIQEKNQQSPQFVIEIHYDNEDLKFASDNQEQDQQTAELQKERFQFASEIEKRDLQIVTDTHKQNYHNVTDIPFATYIQEENEQLTPEDQEEDQHYLNFEGNQQFQLQKQDQLSVPQIQKQTHQFESKVKKRKLQPFSEYQQKGQKDHIQERQYIQQEFTIHSNQAYSKVQYIQTIQTATPYVPQLEISQENSFEVQPAYEVNEGQRDRELVSYTGHEHQNFVDEVSTPLPPAEAQPGSTSEDISDPVSPEHWEQLESLDPSTICIRKTFNLIRDISESLVADPEQPEAEAHRKSIFLLRQKLADVCHKVLTEIIHGRATDEIISILREILEQTKEIPPRPTPKRDLQEDISMGLEILKKIRGMLSGWYSSRESETDSTDTGTGFQAQNGKGFGAGRQPENSFLSQKRRNQEENPRLIKYRRVDNSFPRLITNETAEDLIPNNSMAKRDQPQSSKRLSIFNPPVYTQHRVRNDAPHVPTPFDDEESSQRLANAGPSSRPMTYSDAVRLGHNGISESRVNGHSSHTVRREPSRLHRSILSHEMNCKDQEQYNELIRTQTNYVGSRYLKPGTPPTFQRAKAQSATSSSCSLQDNQSNITDSFPSPHGRANPELTEYAKLINRQENEENRSPAPQQPKRNASNSSASHASTISSSASSSCSTCSTCSSSDTEPMLVKDSPEVKEANEANEANEANEANETKENDAPQPTTTRIKKPDFLHRRFANCIFLRNDFAENFKARANRRQLESMHLLGIAEQQANESKDERLAYEKKLREVMFRSGAPHRPFFEIGPLEQPEEKKETKLIPLTKEDHARFQEMTTIEVTTNLIFKYNLQITTDDIFTFVDGEWLNDAIINFYMSMLTERSEKRAGELPATYAMNTFFMPRLLQAGYAGVRRWTRKVDLFSKDIIPVPVHCGNVHWCMAIIHLRNKTIFYYDSMGRPNQPALDALVKYLHEESLDKRKQPFDMTGFVVENAQNIPRQGNSSDCGVFSCMFAEYITRDVPITFSQAEMLYFRTKMALEIADGKLWQ

SEQ ID NO: 17569 - DNA, 5053 bp, DROSOPHILA
agcgatcggtggacacacgtctccggatcagcgagaatttgtccgagggacgcattaaggtgggtgatatcacagctgctaatgagtcatacttcttactttgattatttttgttacagccaaaacccattgatgttcaggtgattacgcaccacatgcagaggtacgccgtgtggtttggaggcagcatgttggcttcaacggtaagttatagtggcctaagatccgtaaaatcctttatctcaatattcttcccatttctagcccgagttctatcaggtgtgtcacacgaaggctgcctacgaggagtatggccccagcatttgccgtcacaatcccgtctttggcaccatgacataattgatccgatccaatcggcttgcagcagttatttttgatttatttttccatttaaaattgatttattgatttattctccaactatatatatatatatatacattgcgattcggtattccacgctaaagtattagtaattattcttttctatatgtgtttagctattaactctgtgtaaatcagtttcgttctgtttaatttcgtgtgattttgttaggctaactataaagcaacaactccgatgtctgccagttcaaccccctatctaaggtgcattatttctagaagtcgacttttataccatactcaaacacgatcacacacagtcacaccgatctaagctcttggagaaatcccggctctatacacaattaaatacgaaaacgctctacttgtcatagaaatatttataattgcaataactgcaaccaattcaaacactgaatgaacaaaaaaggaaaaacgaaaagaaatattgatgagaaatctgtttgttatattgataagcgtaattaaaaaggcattaaataaatcaataaaacattctttaagctcaaacactttcgtcgctttcgatctaaagcttttactggaaaattttattcaatgcataagttacatatatatatttttttgtgttcaaattgctctatgtattgtatatataaattttgtgacggtgtcgctaagctgagaaaatagcaaaaggtggtttccaaaaaacatgtcccgagctagaaatccgaaacaacttcgttacgcctcgcgtaattgacaaactgactagtcaatgtagtcactggagccctcctcctcgtcgttgctgctcgtggattgtgccgccgccgtttccggcgaacgcaagtgctctgcaatccggaagttttgcaggaagtctcgcatcgcgtccatcattagcgttaatgactgctgcaaaccagcttctgcaataatgttggaggagaagtgtaactacgatatccgctagcgattcttttggaatttcagcataattttaggttagatttttgacgattttaagaatgagaaacaaaatatcgcttttagccaagttattgaaacaaaagccaaagctttaatacaatttcgggatatgaacgaaattaagcaaagccataatacaaccagcgaaacatattctaagattcatgctctgtgacgaaacgggggcgacaaaatcggttttatctcaagatatttttaataatgctcatacgaaccttctccttcgccagctacgccggcagctccttgttcaatgcccacttcaatgttagcatcgcctgcagctgctcccgcacctgctgctggtgctgctccttcttgtagctgagcatttgcagctaggttgttaatgttaaacgaaggcaagagcgattgaaagaacattgacacagaattgttcgtgttcgttgtggggctgctgcttgacgaagattttctgcaagtactggtttttagaatttactaactttgagccgattcgaacgacataccgatgatagcagttgacgctgttcggtggcggcagtggatcataggtcataatggcttgcttctccttggacacgaagaccgccagtggaactttctccttgtaatcggagagtatgacatgtcgaagaatgggccttggtggtgttccactatatcgcagtgatcgcttctccttgtactcattaaccaggggatccttactctcaatgcgatctaacactatgttcacgttggattccaaccagggtagcacctcgttctgacgccaaacgactcttgcacggcacacatacaggcacaccagctggtgcagggcgggcgattgactggtaaacaagataagacattaaattccataccactaatcattcacggagataagactccacttacttgcccgacacatctgcaaagaagtacgatgaggccaggaccctcttgtccgtttgcaccgacatctcgtccaaaagaggacgtaaaacacccgggaacattagtagggcgtattgcagtgcctggttagagcgttcacaagcgccatagagcgtgtgtagagccaaagcatacgagtaggccatattgggcagctgattgaggttcctcgcggcgttatacttttcatagaactctaccaaccattcaaactgcttgctgcgcaaggcatagtagtcaatcactagaatcatggcaagaggatctgtgtctggctgaagactcaggagcagtttggagatctcgaaggcggtgcggctgcaagctcgttcctccaggtactgcgcgtgcttgaacagcacgatgtagaaggatcggttttcctgtctccggtagtccagtcggcagttgcccgacgtcaaactgaagttgatgtgcagcgacgattccagaaggagaagggcgcgctcaagcagttcggaggccaaggaaaagtcttcggtcatcttgcatacttcgctgagttgaaccaaggagtcgacatgataggggcagcgtttgataagtgtgatcagaaattccgagtcaatgcgctcgagagcagaaaggaacatttgctgcactccctggtagtattggctatgctcaaaggcaaaccattgaacgtccgctccattatctgtgatagacttggaggacaccgatggagagtctggggcgggcagcagcttcatcgtgatggtgtttttagtcagtgccggccacgaatccttggcggtcaccatataggtggacttcagcgtgggcttctgcctgccacgcttggttctgaaagaaagtttgattgcaagagttaagtttcagaatggaagttcttagcccaggcactccaaacttactccacttttaccacccgcttgccaaaagtgcgacgcatctcgttctgtggattcaggtgccgtagctctacggccagcagtttcttggtggcagtagtcccggtggcagccgataccaactgtttcgccgactgtctgggcaccgcatcgtagaccttgccaaggagcggatccaccttctcaaagtacttatcctgacgctcgttatcttcgctgctgatgtgattcccactggacttggccttcttcttgcgcttctttttcttctttttggccgcactggcagtagcattgggcagggcagcagacggatgctccgtttcattgtcatcttctttgaactcactctccgagagactcaaaccggcttgattgagctagaaaatttgtgggaacggaggattatgcagttcattcggtgatgagctggctattttttaatagcggcctaccaaatcgaatggattaaggtgtgattttcgatagcgttgcatatcgctgtcctccagttcatcattgtcgctcagctcctcgcagtcctcgtcatcgggcggtggcgccagcttgtcagcgtcgccctgcagcttcttcagcattcgcgcagacatccttcaagtgtccttataccccttagcaggaattctatttaatttcgtcgcaaaatacgtgtgtatttcgctgttttttttttcttcaccacattcgctttcgcacggctgcagggttgccgagctctgtggccacgcgcgcttcacagcactggcctagacaggtggtcccgtcttggcgggaattgaaaaagaagttctaaattttagcaagtgctatacacctatacgccttgcctgtagaagttggatcaaacttgacgtgttattcacagaaattttaataagtttactttttgtctcttcataaagtgaaataggaaaaagcattttaaattgttttgaaaaaatttatttttattcgacatttcctattttaaacttatttacttctagtaaagtgagaatataacatcttacgcatttattggtatacaagcataaactaattatctatctcaaaatagaatatgcaaccaaaatgtcctttattgacaaataattttcgtacaatttcggtgcaatttactgccttatgttctaaaaactgccatgataaggaatttacaaacgagtcttgccataataggcgcctgcgacagcggacagtataatgattactatggcggccatgtagaagaaagtgcgcccaatcgcctggtcacgcaagccgtcgatctggtctgtgagggccatatgctcgtcctccagcatgctgacttgcttgagcaacttggccattggctcactgacttcctgggcatcaaaatggacctctccgtccttgttgtccgtggatattacagctgaacctcccgcctgacggaaatcgtcctccttcgaagggactagctcacatttgatcttggtttcccgagtttcattcgggttctgcatcttccaaaactcctgcacatcgcttatgtcaccagtcacctcggcggccaggagaaggaacttatgacgcttctttatctgctcctgcagaattggctgcatgaatatgtcaacgctgaccttctgctcgggccccaagacaccgatgttggggcgtacataaaaaagttttggagtggtggtcttcatcttgaaggccattcgctgggtcttactggtgttcttgatgactagcttcctgctcaccgagcggttgaatggtccctcaaagacgatcacatcgcacgggtctagcgcaagtttgctctcggtattgtcggacatattggaatatttgta

SEQ ID NO: 17570 - DNA, 2488 bp, DROSOPHILA
caaggcgtataggtgtatagcacttgctaaaatttagaacttctttttcaattcccgccaagacgggaccacctgtctaggccagtgctgtgaagcgcgcgtggccacagagctcggcaaccctgcagccgtgcgaaagcgaatgtggtgaagaaaaaaaaaacagcgaaatacacacgtattttgcgacgaaattaaatagaattcctgctaaggggtataaggacacttgaaggatgtctgcgcgaatgctgaagaagctgcagggcgacgctgacaagctggcgccaccgcccgatgacgaggactgcgaggagctgagcgacaatgatgaactggaggacagcgatatgcaacgctatcgaaaatcacaccttaatccattcgatttgctcaatcaagccggtttgagtctctcggagagtgagttcaaagaagatgacaatgaaacggagcatccgtctgctgccctgcccaatgctactgccagtgcggccaaaaagaagaaaaagaagcgcaagaagaaggccaagtccagtgggaatcacatcagcagcgaagataacgagcgtcaggataagtactttgagaaggtggatccgctccttggcaaggtctacgatgcggtgcccagacagtcggcgaaacagttggtatcggctgccaccgggactactgccaccaagaaactgctggccgtagagctacggcacctgaatccacagaacgagatgcgtcgcacttttggcaagcgggtggtaaaagtggaaaccaagcgtggcaggcagaagcccacgctgaagtccacctatatggtgaccgccaaggattcgtggccggcactgactaaaaacaccatcacgatgaagctgctgcccgccccagactctccatcggtgtcctccaagtctatcacagataatggagcggacgttcaatggtttgcctttgagcatagccaatactaccagggagtgcagcaaatgttcctttctgctctcgagcgcattgactcggaatttctgatcacacttatcaaacgctgcccctatcatgtcgactccttggttcaactcagcgaagtatgcaagatgaccgaagacttttccttggcctccgaactgcttgagcgcgcccttctccttctggaatcgtcgctgcacatcaacttcagtttgacgtcgggcaactgccgactggactaccggagacaggaaaaccgatccttctacatcgtgctgttcaagcacgcgcagtacctggaggaacgagcttgcagccgcaccgccttcgagatctccaaactgctcctgagtcttcagccagacacagatcctcttgccatgattctagtgattgactactatgccttgcgcagcaagcagtttgaatggttggtagagttctatgaaaagtataacgccgcgaggaacctcaatcagctgcccaatatggcctactcgtatgctttggctctacacacgctctatggcgcttgtgaacgctctaaccaggcactgcaatacgccctactaatgttcccgggtgttttacgtcctcttttggacgagatgtcggtgcaaacggacaagagggtcctggcctcatcgtacttctttgcagatgtgtcgggcaatcaatcgcccgccctgcaccagctggtgtgcctgtatgtgtgccgtgcaagagtcgtttggcgtcagaacgaggtgctaccctggttggaatccaacgtgaacatagtgttagatcgcattgagagtaaggatcccctggttaatgagtacaaggagaagcgatcactgcgatatagtggaacaccaccaaggcccattcttcgacatgtcatactctccgattacaaggagaaagttccactggcggtcttcgtgtccaaggagaagcaagccattatgacctatgatccactgccgccaccgaacagcgtcaactgctatcatcgaaaatcttcgtcaagcagcagccccacaacgaacacgaacaattctgtgtcaatgttctttcaatcgctcttgccttcgtttaacattaacaacctagctgcaaatgctcagctacaagaaggagcagcaccagcagcaggtgcgggagcagctgcaggcgatgctaacattgaagtgggcattgaacaaggagctgccggcgtagctggcgaaggagaagaagctggtttgcagcagtcattaacgctaatgatggacgcgatgcgagacttcctgcaaaacttccggattgcagagcacttgcgttcgccggaaacggcggcggcacaatccacgagcagcaacgacgaggaggagggctccagtgactacattgactagtcagtttgtcaattacgcgaggcgtaacgaagttgtttcggatttctagctcgggacatgttttttggaaaccaccttttgctattttctcagcttagcgacaccgtcacaaaatttatatatacaatacatagagcaatttg

SEQ ID NO: 17571 - protein, 698 aa, DROSOPHILA
MLKKLQGDADKLAPPPDDEDCEELSDNDELEDSDMQRYRKSHLNPFDLLNQAGLSLSESEFKEDDNETEHPSAALPNATASAAKKKKKKRKKKAKSSGNHISSEDNERQDKYFEKVDPLLGKVYDAVPRQSAKQLVSAATGTTATKKLLAVELRHLNPQNEMRRTFGKRVVKVETKRGRQKPTLKSTYMVTAKDSWPALTKNTITMKLLPAPDSPSVSSKSITDNGADVQWFAFEHSQYYQGVQQMFLSALERIDSEFLITLIKRCPYHVDSLVQLSEVCKMTEDFSLASELLERALLLLESSLHINFSLTSGNCRLDYRRQENRSFYIVLFKHAQYLEERACSRTAFEISKLLLSLQPDTDPLAMILVIDYYALRSKQFEWLVEFYEKYNAARNLNQLPNMAYSYALALHTLYGACERSNQALQYALLMFPGVLRPLLDEMSVQTDKRVLASSYFFADVSGNQSPALHQLVCLYVCRARVVWRQNEVLPWLESNVNIVLDRIESKDPLVNEYKEKRSLRYSGTPPRPILRHVILSDYKEKVPLAVFVSKEKQAIMTYDPLPPPNSVNCYHRKSSSSSSPTTNTNNSVSMFFQSLLPSFNINNLAANAQLQEGAAPAAGAGAAAGDANIEVGIEQGAAGVAGEGEEAGLQQSLTLMMDAMRDFLQNFRIAEHLRSPETAAAQSTSSNDEEEGSSDYID

SEQ ID NO: 17572 - DNA, 7382 bp, DROSOPHILA
aagggtagctttccctcttgtttaagtaaattaactttactatcatgtccagttaacccaggctaaatacttttttcctatagggttaaaaataaaatgcccacctctacgcatttacgcgaatttaaatattagttcactccgcaaaacacctgagcaaatctttgcattggcttgactccaaccacaaatttttgaatttatacgaatatgatttagtcacatatctgttgtagtccaaaatggtctcgattaagtttattttgctgtttttggtcttattctatttccaagacggtatttcggccgtgacctgtgatcttgcccccacagatgccagctgcatagactgtcgggtttaccccactcacattgagtgcttgcagagattttgggcgccaactacaactgcagcgccactgatcgtagccaccaccaagaggtcccgaatcggcaggattcgcaacttcttcagcagttttctcacacgagtcagaagtaaaagttggttctgagatataagaaattacattttaaagaaagtaaaagaaataaataaatttgcttccgcatcaggaacttgtttgtgttaaagggcggcttataatacaaaacagtattaaaaatatttcaagtggtttccaaaagcgtctgaacaaaactcgttttcaaactgtaaaggaagtgattttctaatgaacttaaaggattcatcaatatattacttattcttgatttcttgttcagccttttgtttttcaacacgtgtttatcaacaaattagtattaagaaaatctatagcaaatttgaaatccaatgaatagacgctatattttacaaccgctactttacagcactttttgccgttaacattgaactattttattggatgtggcatcgccgtcggcaggtggcagcccccaccgagccgagaatagcagtgggaagaagaacaagaacgggcaacgcaatggcaattcctctttctccggtcgttcgtgaacattttgcgagaaaacttttcgccgcatttaaaaacgttaaagacgaagcatgcgaacggcataaacactggatttaaggtaaaacaacgcagcaacagtacttagtggacggtagacctatttaacctcaaaatgacaccgacaaactcggctgaaaattaaaaataaaatattccaaagtatcggctgtgcaagaattttgggcgtgtgatgtgtgatgtaatagcgtggccgcaatggctgttaccgtctgtggctttttttcatataaattaattggccagctctttgtttacgtttacgccaagcttgcggtctggaatataaataaaaacgccgacttaacctcatttatggtccaaattggtgtttataagttggaatattttgcatgtaaaaaagcttagacacgaacattgctgtcaggataggcgagtgccgtgagtggaagcgagatgactagtgtgtgcggcggttggaaatcagtggtgtgcaaattttcaagaacgaaaatgctagattcaaaatattttattttatgtgctaacacttaacatgtcattaaaattgttagcagtctcagatacatccgtttaatttgaataattttctttttttaaagatacaaaagaatagttatttccaacaattcaatatacaaaatttaatctaagtcaaaactatgtactatgtgtaatattaatacaagcattcttctgaccagtagttcagttaatttgtattttgcaattcattatattttattatctagctattttttttttaaagtaactattgaatgtcatcgaccaaagatctggcaacgccgtagtcgctctccctctcccaccgtcttcggcctttttgagcacatgtgccaccgattgttgctcgcaacggatatttttgtgcctcccgtttgtttatgtgtgcaacgaagtgagagaactgcatattttgcagggctagcgagtgatgaacaaccagcgatatggcggcatccagtggatacagcaccacgtttccgcgggcgactcctccgaggtggacatcctggagtcggatggtggagcaggggcctcgggtgaggatctggaccatgtggcggccgagaatcttatattcatggcccgcgacggtcagctaagtgagataatggctgccaacgaagctggtagaacggtcctggtcaccgccgacggcaccacggtggcctatgcggaatccttcgacgatgacgcccaggtggtcaccgaggaggtaatcacagacgactgggtgcagcaccaaggcgccgagcggtaagttttgccctactatgcatcttttgaagtttttcctattgattttctttcccgattttcagagtggagattgctgccgagcagatagctgggattagcagctcacaggaactgctggacatggagcaggatgagtacactgcgctgaggccctatccctgcgacttttgcagtcggcgctttcgcaagaaggccaccttgaataaccatatgctggcccaccaaaatgatcgaccgcacctctgcaagctgtgtggagcgcgattctcacgacgagcagagctcattagtcacttcaaggcccacgcagaggcccaggatgccgccgatgccgaggcagcagcggcggcagccgattcgtcttctgccattaaattcgagcatcagacgcagcggcaactggacgatcactactacgagcaggaatggccactcttccaacatcaacaggagcaggaaaacgcgcaacagaatgtccatcaacagcatcagattgtggaagagggcgggattcagctggtggccagttacccagacacggtagctcaaccagcagctccgtcgcgaggcagaatcagtcggttgaagcccaaggaagaaagcagccagttcattgtgatttccgacaagtcggtggaggactctaggccatacatggagcctgagccggctcagcctgtggttaccacgtcggagtttattgctgtcgaaccgcctcctcagccaaactttccggtgctggatcacagcaaaccttttgtgtgtcagcaatgcggattggcctttgcgcgggaaaaggcactagtttcacacaccaaggtaatactcaactcgaaatttttccctaaaaccagcttaaccagttcattgacaaaatcatccactaattattcctttttttcttcgttagaatcaccgcgtggactcaccgttcgaatgcaaccagtgtcaggagatgttctgggacaacagcagcttgcaggagcaccagaagactcatcagttcgaggagagcaactcggagtacgatcctgcctcagcggaggagagcggcagtgaatcggaggcagacgagcagttgtatggcgaattctattgcaacgaatgtgggatctcttttcatcgccaggatctactgcgacgtcatgccaagatgcactgtaagccatcggatcaggcagctgttggtagcaattccgatgtcactgctggcggagacgtggagcttgccaaagattcttctggtcactgttgcaacacttgcggaaagtcctttcctagcgctttagagatgctcgcccatgcagaaatccatgctaggttcccgcccttcaagtaagttcggtcaaatgaacttgatcacgagcagaaaaccgcattttaaaggctcattttgaataacttcaggtgcgtcctatgcggcattagcttttacgaggagcaggcgattaagcgtcacctgcacactcgccatcccagtgaattgaatgccaattcctgcgttctgtgcggcaaagagtgccgcgatcgcaaggctctgataaagcacgcctgggaccattcgcgcgagaagtgccattcgtgctccaagtgcggaaagaacttccacaacaaagcgcgtctaaagcggcacatggcttcgcatcgggacaagtcggttgtatgcgaggtgtgccaggaagaattccccgacggtcgtacgctctccaaccatcgacactcgcacagcactactacgcctggcaagctttttccgtgcctcgaatgcggcaagacatttggttcgcgcagttcccagcagattcacgtacggatccacaccggtgagcggccatatggctgccgctactgctggaaggctttcgcggatggtggtactctgcggaagcacgagagaatccacaccggcgagaagccatatgcctgctccgtctgcccacgcgcctttaaccaacgggtagtgctgcgggaacacattcgctcccatcattctgggctggatgtagcgcggaacacctatcactgcacagtctgttccgaagacctggcatcgtccaatgaccttattcagcacctgatccaacacagtgattcaaacacagctaagcagcgacagcccgttgtaagtaaaatcctttgtttcgagagacttgataaattaaaagaattgaattgttttttagacgggaccgcgcaagtacaagcgtcgccgtaagctacagcctcacgagatcgctcacatgcgggcggcgaacaagcatgtcaacggtgatgaggaagaggccataggagaaggcgatgcagaggagtgtgccagtgacatcgatttctgcgactttgatgtggagaacgtggacgatatcttcgacatggccgaatcacccaaaaaagaaaagcgaaagaggggctcggcagccacaaaagctgatgccaaacccgtgaccaatgggaaagcggcaaaacctgcccaagataagggcaaagctaagccaagatatgattccaccagcagtcagcaatcggatcgcctttgggaggaaaagttcctgcacgacagtcaagtggctctgtttcagatcgattcgctggtagtggtcaacgacactcatttgcagcctgctagctccgctgtgtctgctaacatacccaacacaagaggtggatcgaagcagcagggaaaagttcaggcgaagtctgtagaaggagccgaaaatttgaatagctcagctaccacatctgacactacattctccgcctccacctccactgccagcactcggagccgcaagagggcagcaaccactaaaacagccagcaaagcacctcctgccagtaattcgcgacctcgaatgattcacacagagaaagccaaggtgacaaaaggagttggcggagactccactagtagttcggcaaagaaaacgcgctcgaagacctatataagtcgcacggagtcgcacaatctgagcctcgacaaatcccgcagcagtgcctcaaatatggtggatgactatgaaatcatttctccagctactcatccgccaaatcagatcagctccagtcccttgcacatcaaacaggagcaggaacaacaacagcgtgttcaacttatgtacgatgataacctactgatagatgctgctctgctcagggagaagacttatgagaagtttaatccgagcattgttaatgatctggaggagatcctccgctctccactgaagcacgagagaaattctcgtcttcgctttaccagcgagtcatccaccacgccacaatatttgcacgaagaggagcaaaaccttataaaaattgaaccaacttctccggatctgcgggaaatgttggagggtcagcaaagagtcatcgctcatagcggcagcactccttcgtcctcttcatctgctagaacttccagacatctgcgacaaatcactgccaatggtgcacgggcaggcagcaagagaacaacaggtggcgtagccagcaagacgtcggcatccccgggagtggtggccaaaaaatcgaacactgccaccaaggtgagcagcagcagctcatcctcgtacctctcgtacggggtggattcctacaatgtaaacgtacctgccagtgccaacaacggcgatgtgggcagcggattcttttccatctcggaggtcgtttccgcagctgacgccgcggatgcggctgctaaagcggcggcagctggtaaatcggagcggaaaactcgcagtttcgagtgcgaaatgtgctcggccatcttttatgatcgcacccagctgctggaacatgtgcacattcacatttaaatggaagctacctaaaccactcgcccggagccttgtatttttgaaacatcttatccttatatacaaacaaaatcggagtaaattacctcaaggtatcgtgcatcgaaaaatatcgttgatttatgcgttatttaaaatatggaacctaaacctattatagagagaatagttcgtaaggcttttaagtttgtacctcagcttttgttttgaagaattggtatgctggaataaatacatcattaaatggtttttcattaccttaaattttgctatcacgtatagattgaatctgattgataagatgggctcatgtaaccttttctgatgtttgaaatctctcctagaaatcttaaattttcttggaaactgcgatagtggcatgtaatatactttttataattggttaaatgtttataaacttgcacatgtgggtcttaatacatatcgactgacctttgtagtacatactcatagaaacactgataagagcataccggaagtctgtgtgtaatttgaagccatgattatatgttttcatatgtggtgtacggtgacttgttttcggctcatttgcacagattttcaattaaagccgcaactgctaactgaagtagagatcaaaacgattctcacagaaaagcggctttcgcccatctgataaatcaattaattaccgccaatgagccgtattagaatataagtaaacgatttcatttgcatatgcatatttattaatcatggaaatagattcttatttaaagggggcgcacctttgaatattgactataaatatttgaatattgactataaatatttggatagtagctgcgaaaatatcaggacacgtagataccgtagtttatgttctaaaaaaaaatatttcgaatcttaaaactattttttcacttattttgcctttctaagcaattttcttaaatattgtaaaccccgagtgaggttctggttattgatagttctgatgatgggccagtcaagtcttggatcgatggcatagagagcctattgtatttttccattgttgatctcccactgagatggcaggtataaaatgggccacatcgccgggtgttcatcagttctctcagagtcgtcgagcgagcaacatgaacgtagtaaaatctttgtgtattttgggtctggttctcgtcagcttgattgccacccaagcagccgatgagcaggtggtaggcggtgtcagccagttggagggaaacagcaggaaggaggctctggaacttct

SEQ ID NO: 17573 - DNA, 4208 bp, DROSOPHILA
tgaacattttgcgagaaaacttttcgccgcatttaaaaacgttaaagacgaagcatgcgaacggcataaacactggatttaagggctagcgagtgatgaacaaccagcgatatggcggcatccagtggatacagcaccacgtttccgcgggcgactcctccgaggtggacatcctggagtcggatggtggagcaggggcctcgggtgaggatctggaccatgtggcggccgagaatcttatattcatggcccgcgacggtcagctaagtgagataatggctgccaacgaagctggtagaacggtcctggtcaccgccgacggcaccacggtggcctatgcggaatccttcgacgatgacgcccaggtggtcaccgaggaggtaatcacagacgactgggtgcagcaccaaggcgccgagcgagtggagattgctgccgagcagatagctgggattagcagctcacaggaactgctggacatggagcaggatgagtacactgcgctgaggccctatccctgcgacttttgcagtcggcgctttcgcaagaaggccaccttgaataaccatatgctggcccaccaaaatgatcgaccgcacctctgcaagctgtgtggagcgcgattctcacgacgagcagagctcattagtcacttcaaggcccacgcagaggcccaggatgccgccgatgccgaggcagcagcggcggcagccgattcgtcttctgccattaaattcgagcatcagacgcagcggcaactggacgatcactactacgagcaggaatggccactcttccaacatcaacaggagcaggaaaacgcgcaacagaatgtccatcaacagcatcagattgtggaagagggcgggattcagctggtggccagttacccagacacggtagctcaaccagcagctccgtcgcgaggcagaatcagtcggttgaagcccaaggaagaaagcagccagttcattgtgatttccgacaagtcggtggaggactctaggccatacatggagcctgagccggctcagcctgtggttaccacgtcggagtttattgctgtcgaaccgcctcctcagccaaactttccggtgctggatcacagcaaaccttttgtgtgtcagcaatgcggattggcctttgcgcgggaaaaggcactagtttcacacaccaagaatcaccgcgtggactcaccgttcgaatgcaaccagtgtcaggagatgttctgggacaacagcagcttgcaggagcaccagaagactcatcagttcgaggagagcaactcggagtacgatcctgcctcagcggaggagagcggcagtgaatcggaggcagacgagcagttgtatggcgaattctattgcaacgaatgtgggatctcttttcatcgccaggatctactgcgacgtcatgccaagatgcactgtaagccatcggatcaggcagctgttggtagcaattccgatgtcactgctggcggagacgtggagcttgccaaagattcttctggtcactgttgcaacacttgcggaaagtcctttcctagcgctttagagatgctcgcccatgcagaaatccatgctaggttcccgcccttcaagtgcgtcctatgcggcattagcttttacgaggagcaggcgattaagcgtcacctgcacactcgccatcccagtgaattgaatgccaattcctgcgttctgtgcggcaaagagtgccgcgatcgcaaggctctgataaagcacgcctgggaccattcgcgcgagaagtgccattcgtgctccaagtgcggaaagaacttccacaacaaagcgcgtctaaagcggcacatggcttcgcatcgggacaagtcggttgtatgcgaggtgtgccaggaagaattccccgacggtcgtacgctctccaaccatcgacactcgcacagcactactacgcctggcaagctttttccgtgcctcgaatgcggcaagacatttggttcgcgcagttcccagcagattcacgtacggatccacaccggtgagcggccatatggctgccgctactgctggaaggctttcgcggatggtggtactctgcggaagcacgagagaatccacaccggcgagaagccatatgcctgctccgtctgcccacgcgcctttaaccaacgggtagtgctgcgggaacacattcgctcccatcattctgggctggatgtagcgcggaacacctatcactgcacagtctgttccgaagacctggcatcgtccaatgaccttattcagcacctgatccaacacagtgattcaaacacagctaagcagcgacagcccgttacgggaccgcgcaagtacaagcgtcgccgtaagctacagcctcacgagatcgctcacatgcgggcggcgaacaagcatgtcaacggtgatgaggaagaggccataggagaaggcgatgcagaggagtgtgccagtgacatcgatttctgcgactttgatgtggagaacgtggacgatatcttcgacatggccgaatcacccaaaaaagaaaagcgaaagaggggctcggcagccacaaaagctgatgccaaacccgtgaccaatgggaaagcggcaaaacctgcccaagataagggcaaagctaagccaagatatgattccaccagcagtcagcaatcggatcgcctttgggaggaaaagttcctgcacgacagtcaagtggctctgtttcagatcgattcgctggtagtggtcaacgacactcatttgcagcctgctagctccgctgtgtctgctaacatacccaacacaagaggtggatcgaagcagcagggaaaagttcaggcgaagtctgtagaaggagccgaaaatttgaatagctcagctaccacatctgacactacattctccgcctccacctccactgccagcactcggagccgcaagagggcagcaaccactaaaacagccagcaaagcacctcctgccagtaattcgcgacctcgaatgattcacacagagaaagccaaggtgacaaaaggagttggcggagactccactagtagttcggcaaagaaaacgcgctcgaagacctatataagtcgcacggagtcgcacaatctgagcctcgacaaatcccgcagcagtgcctcaaatatggtggatgactatgaaatcatttctccagctactcatccgccaaatcagatcagctccagtcccttgcacatcaaacaggagcaggaacaacaacagcgtgttcaacttatgtacgatgataacctactgatagatgctgctctgctcagggagaagacttatgagaagtttaatccgagcattgttaatgatctggaggagatcctccgctctccactgaagcacgagagaaattctcgtcttcgctttaccagcgagtcatccaccacgccacaatatttgcacgaagaggagcaaaaccttataaaaattgaaccaacttctccggatctgcgggaaatgttggagggtcagcaaagagtcatcgctcatagcggcagcactccttcgtcctcttcatctgctagaacttccagacatctgcgacaaatcactgccaatggtgcacgggcaggcagcaagagaacaacaggtggcgtagccagcaagacgtcggcatccccgggagtggtggccaaaaaatcgaacactgccaccaaggtgagcagcagcagctcatcctcgtacctctcgtacggggtggattcctacaatgtaaacgtacctgccagtgccaacaacggcgatgtgggcagcggattcttttccatctcggaggtcgtttccgcagctgacgccgcggatgcggctgctaaagcggcggcagctggtaaatcggagcggaaaactcgcagtttcgagtgcgaaatgtgctcggccatcttttatgatcgcacccagctgctggaacatgtgcacattcacatttaaatggaagctacctaaaccactcgcccggagccttgtatttttgaaacatcttatccttatatacaaacaaaatcggagtaaattacctcaaggtatcgtgcatcgaaaaatatcgttgatttatgcgttatttaaaatatggaacctaaacctattatagagagaatagttcgtaaggcttttaagtttgtacctcagcttttgttttgaagaattggtatgctggaataaatacatcattaaatggtttttcattacctt

SEQ ID NO: 17574 - protein, 1283 aa, DROSOPHILA
MNNQRYGGIQWIQHHVSAGDSSEVDILESDGGAGASGEDLDHVAAENLIFMARDGQLSEIMAANEAGRTVLVTADGTTVAYAESFDDDAQVVTEEVITDDWVQHQGAERVEIAAEQIAGISSSQELLDMEQDEYTALRPYPCDFCSRRFRKKATLNNHMLAHQNDRPHLCKLCGARFSRRAELISHFKAHAEAQDAADAEAAAAAADSSSAIKFEHQTQRQLDDHYYEQEWPLFQHQQEQENAQQNVHQQHQIVEEGGIQLVASYPDTVAQPAAPSRGRISRLKPKEESSQFIVISDKSVEDSRPYMEPEPAQPVVTTSEFIAVEPPPQPNFPVLDHSKPFVCQQCGLAFAREKALVSHTKNHRVDSPFECNQCQEMFWDNSSLQEHQKTHQFEESNSEYDPASAEESGSESEADEQLYGEFYCNECGISFHRQDLLRRHAKMHCKPSDQAAVGSNSDVTAGGDVELAKDSSGHCCNTCGKSFPSALEMLAHAEIHARFPPFKCVLCGISFYEEQAIKRHLHTRHPSELNANSCVLCGKECRDRKALIKHAWDHSREKCHSCSKCGKNFHNKARLKRHMASHRDKSVVCEVCQEEFPDGRTLSNHRHSHSTTTPGKLFPCLECGKTFGSRSSQQIHVRIHTGERPYGCRYCWKAFADGGTLRKHERIHTGEKPYACSVCPRAFNQRVVLREHIRSHHSGLDVARNTYHCTVCSEDLASSNDLIQHLIQHSDSNTAKQRQPVTGPRKYKRRRKLQPHEIAHMRAANKHVNGDEEEAIGEGDAEECASDIDFCDFDVENVDDIFDMAESPKKEKRKRGSAATKADAKPVTNGKAAKPAQDKGKAKPRYDSTSSQQSDRLWEEKFLHDSQVALFQIDSLVVVNDTHLQPASSAVSANIPNTRGGSKQQGKVQAKSVEGAENLNSSATTSDTTFSASTSTASTRSRKRAATTKTASKAPPASNSRPRMIHTEKAKVTKGVGGDSTSSSAKKTRSKTYISRTESHNLSLDKSRSSASNMVDDYEIISPATHPPNQISSSPLHIKQEQEQQQRVQLMYDDNLLIDAALLREKTYEKFNPSIVNDLEEILRSPLKHERNSRLRFTSESSTTPQYLHEEEQNLIKIEPTSPDLREMLEGQQRVIAHSGSTPSSSSSARTSRHLRQITANGARAGSKRTTGGVASKTSASPGVVAKKSNTATKVSSSSSSSYLSYGVDSYNVNVPASANNGDVGSGFFSISEVVSAADAADAAAKAAAAGKSERKTRSFECEMCSAIFYDRTQLLEHVHIHI

SEQ ID NO: 17575 - DNA, 4117 bp, DROSOPHILA
gttcgacgcactggatgcggaggaatcttgcgagttcgaagcctcgcaaaactgcggaagcctgtccactggcagaagcatagagctcttcggcatgttaaggaaatccagttggctcttgccctctggaattgtatagaattggagaaatcctacaaaggaattttcgtggtacagcgaaaaggctgtaccattaagcgttgtcgacggataagtataatcgcttttatccggaattctgagcaaatttgtaataaactcatcgttttccagagacttgtgaaaactctgtacgtttaggcgagccaagggaagacctacttttacctccagtttttgcttcaattcaccaatggtcgcattattgtggagctcgaacatttccggcatctgtatgggattgagaaatgaaaatatgtatttattaaatttaagcttcaattattatagctccatttataagccacaattgtaaaatatgtgcgggcttaagataactgcataccacacttgtgtttccctcggcatctaatttcactttgacgaacattttatgtaagagaagatattaaaacttgaattaacaattggtaatatacaaaataagtgtgtctctcaaaatagaatattcaagatgttgatgcgcttttttattggagaatctttagaaccgttatgccaaagctttcgttttacagtatgcttggcactttacgacactgaatgctttgaacgatgaaccagtaataaataagataattatgtaaggtagtagttacctttccatcctccttgaggtactttgattcaatgtaagctagtacaaacaccattttttttaaagtttaaaatcaaaattattaatttaacgaaaagagttaaaaacacttttggagatcttgtataaaatttaatattgtaaaatatctcactcgaattttgacttgacactgggaaaatggcactctgcaacactggttttgcggcattactgtttacgaattgggtggaaagcgaaactgagtttttttgttgactgaaaagcaatgaaataaccaattgtaatggcgggtaaacgtgttttggtcatcgataatggatcctacgaatgccgcgtgggctggagcgactccaaggagccggacttgcggttccgcaatgtgctgaccaagccgcgcaaggatcgcaaaaaggaagcagctgcttcggagggatccgcatcgcagacaacagtggagcaatctgccgagatccaggtgggcaatgacatcaccaacatcgaggcggtgcgtgcgcatctgaagagtccattcgagcggaatgtgataaccaactggaatcaccaggagcagatcttcgactacatattcaccaagatgggattcgatggacaggacaagatcgaccacccaatcatcctcacagaggcgctggccaaccccaacttttgccgccagcagatgaacgagctgctcttcgagtgctacggtattccgtctgtatcctacggcatagatgcgctctacagctggaagcatcatcagcaaaagcagaaaaatgttgtttattggcccttgcaattgctaacatccaattaatacgagatttcccctttagatatccgatgccctgatcatttcctttggctacagcaccacccacgtcattcccgtgttagatggcaaactccagctggagcatgtgcgtcgcctgaatgtgggtggctaccacatcatcacctacctcttccggctcatgcaaatgaagtatcccgtccatctgaatgccatcaccatcagtcgtatggagaaattggtccatgagcactgccacattgctgttgattacaaggaggagctggtgcaatgggcccagatggactattacgacgagcacataatgaagatacaactgccgtacaatgcggtgaccgccactaacgccatgctaaccgctgagcagaagcaggagaagcgtcgcgagctggcacatcgtctgctggacataaaaaaaaaccgggagcaggagaaactgcgcgaggatgagcagcagttattcgtctacaacaagctgaggcaactgtacgagcagaaaaagctggacaagtttgagcgagctctacagcaacagcagattggtacattggaggacttggattccctcattgcaaccataaactcgcgtattaagcgtgcccaggagagagctcagagtggcccgcgccccagcaagcagcaggagaggctgaacaagatgccgaaacctccagagggcatgtcccaggcggactggttggccgaactccagggcaagcgggagaaaatactcgggcgcaagcaggcgcgccagcagcagcgatccgagcaggccaagcgacacacccacgccgcgcaggaacggatgcgaatcatttcatcactggccaagaacgagaagcggcgcaaggcgaacggcgaggaagaggacgatggctttgggatgaacgacaacgactgggatgtgtacaagcgaatcaatcgctacaacgacgacagcgattcggatgcagataacgaaaagttgatgcagttcgataagatcctaaatcactatgatgccaacaccgatggcaactccaatgttccgccacagagtgccgccgagaactaccagctgcactttggggttgagaacattcgcgtgccggaggttctattccagcccagcatgattggttgctcagaggcggggctagcagaactaatagcattcgtgctgaagctatttcccgccgctgagcagcagcgcctggttgagcacgtgtacctaaccggcggttgtgcccaattcaagggtctcaaggagcgactaatcaaggagctcatggaaatgcgaccgtttcaatcaaagttcgccatctacgagtcggatgagccaactttaagcgcctggctgggagcatgtgtgcacgcaggagagcccaccttcggtcagacgctgaccacgcgtcaggaccaccaggagcatggcagagagttctttcgggagcacacagctagcaatatcttttatcctacaccaaaagattaacatttatttgaaagcaccgaaaaatacatgtagacgcttaaaaaagaagttccgtaacatcattgccgaatagtaggttccaggacttgggcacggtgagcttaaaactgccatcgcctccgttgcgcagctgaaggaagtcttcgcagagttcgttcagttcccggacgattagagatgcatcggtggagttgtcgccctcgaggagatagcggaataacagcatgacgggcaccttctgctcatcgaaggctttaaacaactgcaaggcattgccgccgccatagatggcatcgcccttgtgctccttccacttgatcagctcctcattgcccagctgggcagcatgcgcttccttgaagttttcgctggcgcggtatgcccatggcgactcctcaatgactcgtttctcgaagccgaaactgccgcttagaatgactacgcgtctggcgcccttgaggagctccactagttccttctgaaaatgcgcggtgtggcgggcaacccatggcgcccggaattgcacgaccagtagcttatcctccgtaccctcgtacagttcgcaggaggagaccttctctttgggctcgtgctgataggcggagggtccgtagaccggaatcagggctggatgtgtgatggatccaattcgccggagttccttggacgcaatcaacaggtcacaggccagctgcgccgcgtttcccacgcaaatgctcggtatgattactgtgtgctctgctacgtccagagtggtacgcttgtcctttagaaacagcataattgggttaaatctcttggtgtccggaatgagttgaagatgctaattcaagtcaagtcaaaaatatgaaagtaatgattccagtgttggtgtgtttaccaattgacactgggtggcaactctggcaaggagcttaataaaagtgcggttcaaaaatcaaaagagataacttcgttgtttaaggtaaacaaattttatttacatttaaggacatttttttgactgctgcctacttatacttcgcatataaatgaatataagcacgtg

SEQ ID NO: 17576 - DNA, 2059 bp, DROSOPHILA
aattgggtggaaagcgaaactgagtttttttgttgactgaaaagcaatgaaataaccaattgtaatggcgggtaaacgtgttttggtcatcgataatggatcctacgaatgccgcgtgggctggagcgactccaaggagccggacttgcggttccgcaatgtgctgaccaagccgcgcaaggatcgcaaaaaggaagcagctgcttcggagggatccgcatcgcagacaacagtggagcaatctgccgagatccaggtgggcaatgacatcaccaacatcgaggcggtgcgtgcgcatctgaagagtccattcgagcggaatgtgataaccaactggaatcaccaggagcagatcttcgactacatattcaccaagatgggattcgatggacaggacaagatcgaccacccaatcatcctcacagaggcgctggccaaccccaacttttgccgccagcagatgaacgagctgctcttcgagtgctacggtattccgtctgtatcctacggcatagatgcgctctacagctggaagcatcatcagcaaaagcagaaaaatatatccgatgccctgatcatttcctttggctacagcaccacccacgtcattcccgtgttagatggcaaactccagctggagcatgtgcgtcgcctgaatgtgggtggctaccacatcatcacctacctcttccggctcatgcaaatgaagtatcccgtccatctgaatgccatcaccatcagtcgtatggagaaattggtccatgagcactgccacattgctgttgattacaaggaggagctggtgcaatgggcccagatggactattacgacgagcacataatgaagatacaactgccgtacaatgcggtgaccgccactaacgccatgctaaccgctgagcagaagcaggagaagcgtcgcgagctggcacatcgtctgctggacataaaaaaaaaccgggagcaggagaaactgcgcgaggatgagcagcagttattcgtctacaacaagctgaggcaactgtacgagcagaaaaagctggacaagtttgagcgagctctacagcaacagcagattggtacattggaggacttggattccctcattgcaaccataaactcgcgtattaagcgtgcccaggagagagctcagagtggcccgcgccccagcaagcagcaggagaggctgaacaagatgccgaaacctccagagggcatgtcccaggcggactggttggccgaactccagggcaagcgggagaaaatactcgggcgcaagcaggcgcgccagcagcagcgatccgagcaggccaagcgacacacccacgccgcgcaggaacggatgcgaatcatttcatcactggccaagaacgagaagcggcgcaaggcgaacggcgaggaagaggacgatggctttgggatgaacgacaacgactgggatgtgtacaagcgaatcaatcgctacaacgacgacagcgattcggatgcagataacgaaaagttgatgcagttcgataagatcctaaatcactatgatgccaacaccgatggcaactccaatgttccgccacagagtgccgccgagaactaccagctgcactttggggttgagaacattcgcgtgccggaggttctattccagcccagcatgattggttgctcagaggcggggctagcagaactaatagcattcgtgctgaagctatttcccgccgctgagcagcagcgcctggttgagcacgtgtacctaaccggcggttgtgcccaattcaagggtctcaaggagcgactaatcaaggagctcatggaaatgcgaccgtttcaatcaaagttcgccatctacgagtcggatgagccaactttaagcgcctggctgggagcatgtgtgcacgcaggagagcccaccttcggtcagacgctgaccacgcgtcaggaccaccaggagcatggcagagagttctttcgggagcacacagctagcaatatcttttatcctacaccaaaagattaacatttatttgaaagcaccgaaaaatacatgtagacgcttaaaaaagaa

SEQ ID NO: 17577 - protein, 648 aa, DROSOPHILA
MAGKRVLVIDNGSYECRVGWSDSKEPDLRFRNVLTKPRKDRKKEAAASEGSASQTTVEQSAEIQVGNDITNIEAVRAHLKSPFERNVITNWNHQEQIFDYIFTKMGFDGQDKIDHPIILTEALANPNFCRQQMNELLFECYGIPSVSYGIDALYSWKHHQQKQKNISDALIISFGYSTTHVIPVLDGKLQLEHVRRLNVGGYHIITYLFRLMQMKYPVHLNAITISRMEKLVHEHCHIAVDYKEELVQWAQMDYYDEHIMKIQLPYNAVTATNAMLTAEQKQEKRRELAHRLLDIKKNREQEKLREDEQQLFVYNKLRQLYEQKKLDKFERALQQQQIGTLEDLDSLIATINSRIKRAQERAQSGPRPSKQQERLNKMPKPPEGMSQADWLAELQGKREKILGRKQARQQQRSEQAKRHTHAAQERMRIISSLAKNEKRRKANGEEEDDGFGMNDNDWDVYKRINRYNDDSDSDADNEKLMQFDKILNHYDANTDGNSNVPPQSAAENYQLHFGVENIRVPEVLFQPSMIGCSEAGLAELIAFVLKLFPAAEQQRLVEHVYLTGGCAQFKGLKERLIKELMEMRPFQSKFAIYESDEPTLSAWLGACVHAGEPTFGQTLTTRQDHQEHGREFFREHTASNIFYPTPKD

SEQ ID NO: 17578 - DNA, 14078 bp, DROSOPHILA
gctatttccaattgtgctattaatctgccacatttgcacttccgcggaaaagagtcggcgggcggatgtgatctctttcgctcgtcagttggctgactcgctctgcaggggtgatttgcgggcgagcgagtgagacagagcgaggcagagtggtaacgcttggctaacctgaaaatagaaacaatcgaaataaaaatacattctcttcatgctctcgtctaataaaaaaccccaaaagcaaaacgttttccatttaaaatgtcgtcgcaactgccagcgggaagtggacgtcgagagtggcaagtgtgtggggcaaactccggccagcggccaatggcggttggccgaggccacgccccgtggctcaattaccgaccagtgctgcccatcggcgggcagagcgaaacctgtttccacgagcgagaggcagtcaggcgcatgtgcgatcagagcgggatggatggctcaagggtggaccaaccagaagaggcaggttgctggtattatggtaggttaggttcaaacaaggtggcaaactggctcttaaccgaaataggaaggaagtcggcagcggcgtcgacgtcgggcaactggtttgacttgtttccggctcactccaacagcccaaacccaccagcaatcggcagaggcagccaagtcggcagagggcaggcagagcagcggccgtcggcacaatttgattgcatttatgaaaagcgttttcgcccgctagcacgcgtccgctcccagctcgcaattcgccatccgtaatccgtaaactttaatccgtagaccgtaatccgtgaatccaaagcagttctcagttggaatttcccgcaacgggtagtgcttaagcgcggaaactgaattgaaatcaatcggacgattagtgtgtgcttcgcggttgaaacactctacatctaactattaagagaaaagagtgcccaataagattcgaaaagtgcagtgagcgagctccaaattggcgccactaattgccaaaatgtccagccacgaggaggatgaccatgagcacgagaacgagcacggcgaagaggtggaggaacaggagatccacgtggatgtggactcggactcgcggatgtcatgtggcagcggatccgatgtggatatggacggcggcagctgctacgacgagtccgaaacgccattgaggtgagaaggagagcttttaaatagaaccaggaagtaggaaaaatgtcccaaaaatatagatattatcagtatagatataccataaataagcagatcttccaattacaataagacttctacatatacatacatatattatttttttaactagattgtgataaaatgctttggcttccgtactacttacttaaaactgaagaggcctttttttttaaaattcattttggtaaatatttttcaaatatgaataacgtctgaatttatgtacgttgcaaaatcgaacaataaaaaatatttttggtttaattgtatcgtaaataatctgctacactaaacttgaaaagagattgcatctctattaataataataatggctttactttcaaattatacgatgtacaaacataataattggtctgaaacaattcattacggaaaatccccaaaaaaaatatattaaagaaaaagctcagtttttcgtttactcttgatggttatgatcatcatgcaaattaataaatatttttttgtaagtactgggcttgatttagttggccacattattcgttaattactcataagtcaaaatttagatcgacagcaatttgatcgactaactgagagaaaaagatctataagctatagttataatagttggcatacagtcttattttattgccctataaaagtcaaacaagtattgtggcggagaaaagctatttgcatttgttattacgagctcataactcccactgttttacgatctttaacattgtcactcataatgctcacaaatcctatttttcgaatcgtggctcaacgccattgaaatgcgttgatgtttaagccccattgtccgctcttacaaatggtcccattttccagcgacaaaaggggataacaagatgccagagcatccagcagaccgtgttaactgatcccattcaagcgtttgtgcgcttagaagaacagtgtgaacaaacctcttaaacgctaatgaattgaccacaaagccaccaaaagaatcaagtcgaaatgtcccataaagtgccaaagaaactccctgaatttacatagttcacggatggccagggtttccaatagacgacgacgataaaacgcacattagtaaggcgccaaaaacgggctgtgataagacattggggtccatttggggctcaatctggagttggatcttcggcttgaatgccggacaaagacgaaatcgtttgtcggattaacattttaatagagatcgtcataaaaatgccataaaacccgcgttccagcgaatgtagatcaccagatagcagcaagttttggccagtgaaataatatgtgtttgctcataacttttgatattggaaagtgtctgtgtgtcggtggttggcgatttgagatcattgttccgatacaattccattcctgttccaaatgggtttttactttttggatttataaattaaatgccgtgcgtgacttgttttcggtgcgtcagttgatggcatttgatgatttatgggcgcgtattaaatgcctctaacggccgtcagcatttgcataattacttcatttccagccgcattgcgtatacgcagcggtggccacacgggttctgcatgtcatgtcgtcaactcggcttatccgctcgcgtgggcttttggttagtggttccgagactggtacgcactgcaacagacttaattatagtcaatgttctcaggctttcccgcttatcgggcgacacattttaatgagcccgcacctccagagggcttctttcccttcgattctgatgtcttttctccggtttttattcccagcgagtccctgcagtcggagcagacgcgctcctcgtccagtgagaatctgcccttcagcatatcacgcctgctatccaagcccttcgagacgagtcaccaccaccacaacaacaacaaccacctgctcagcagcagtccgggctccagcagcaacaacaacaacagcggcgaaaagggcgaggagaaggagctactgcagcaggaggaccacgacctggcctataagctggccaccagcatcgccaactcgacatacggaagcgccgcagcactatactcgtatccgcatctctatccctcagcggccggcggtcatgtgctacgtgtaccgccccagagaacgccgctcacctgggcactaccgccactgcatcacgcggcgctggcacatcaggcggtcaaggatcggttggcaggtgagtgaatagcagcgaagtcaagagggtttgccaaatccaacccattcggggcccccatgtcgggatggcccatgttcgccgagatctttcgggggagcgatcctccaatgacccgcggtggcaattgctactgttccccaaataagcacgatcagagaagacttttaaggcaacatgcctatcggcatgtcattgttggccaacacattcgtgcaccaagagaaaatgtggcatttgaaataaaagaattggtaacattaagaataaaaatgttatatatgtgcctacataacgcgtagttggatgcattcaattgtgcaatagggtgtaggaacataattttaaacttcttgataaaacatatttttgtatattcattgttgaaaataaggtgcgaagaacgttgtctaatggtctaaaagggcttacttacatatttccttataatataattacgatggtctattagatggtattttctgtgggtaagaaacagcttaaggctagaacacaggtctcataatacgaattttcgctcagtgtacactcactctggtgagcttgggatgctaaagtataaaaacatgtttgccttcaaatgcgcaatcgcagcttaagttaaaaacttaacgctgagccgccgcccagaagcgactcaggaatgagatgcgccttcttatttgcatgcgcatgcgcagttgaatttgtatctgtatctgtcgctggtcctctgaatccgtatccgaatctgtatctgtattccatctgaatctgcaacttcacgtgcagctgggtcttctggctccctttttgttaatttgtttacattatgagcttcacttgtagctacaagcgatgggcacagcgcgagccctttgaaataatgagacggcgttgattttattacgcctcggcagccgagggatcttcaatggtgtggaagggggatcccgatagggttcggatcctataactcataatattcgggcctttttcggccttgtgatgtggaaaagctgcttaggagcagcgcagcccggcaatctgacgggcttttatggccgacatccgcccagtggttctggttagctgtttggcctttttcttcattttagttattttaatgagctggtttacatgactttttaatttcgcgctgcgctcgaaaaggaattaattacgcattgggcggtcgctgggctcagcgagtgagttttctgtcctcgccggcttatttatcgccgcataccgcacttcacatttgagtccaactgacatggtcagcttttaattagccagtcgaatgctggcgatccgagggctgcatatccatatccatacttgtgtgtatatccgccgaggaggggcattcgatcgagtggatcgtatagaatggaatgggatcggatcagtcacttcgagtcgactattccacctgaggggcacacttatgagcccgccgggtgatccaagcttctgccgctcggtttcgttttgtcaacatcttcgttttcgtcttggtcttggtctcggccaacgtctgtgtctttttgtgtttattgtgtcgcttgccttgtggctgataagctggcgccttggcttttttcattaacaagacaaacgagcgtccagggtgcggatccgatccgatccgatccgatcccttcccgcgaccaaagtgctcctctctcttccgccggggcccttagcgccatatgattaataaccatcgcatgttaattctcgttattttttgggaaactacgtcgcagcaggcgccaattacttttcggccatgcacgccctaatgcagtttcataacagccataatagcctgattggaagggagttgggcttttgtcacgacacttgcccacacgaatgttaccaatcaatggcggagtaggatctataggctagtgtatagaaattccctttactagggagctcctttagtaatttagtatttaatattaaaaaatgatgtaaactccgtgagactgtatactaatttgccatttaacagttcccatttgcatgcgctttgattggttacgtgctagtcttgaggtaactagtatataactaatccaaatcactagcaaaggtcagagtgcagcacttttgaaaagagaccaaaatagcggagtgggaggaaaccagtcccagccacaggccgtcatcaataatgcatgctaaaagctttttgcattattttaggtatttctggtgagacttctcggccgcagccacacactcaccgccatctgtatcttaaagatacttgtgttagcttgtgcgaaacatcataaataagctcggtggagcacggtggagtgccggaaagctataaaattatgcttatgcgccttaacctccctctaagcggatatgttacatccttgaaggatacacacatctgagctgcggcagaggggaaaatcccgaggctgctgcttatgtggtgcgataaatggctttttattgaaattgatattgcctgaaatattcaaatgatcggcaagccacaagacctccgacccgaaaacctttgaaaaatttatgcacccagcctcgaaagtttatcccctgggcgggaaaagcccgaaaaaagggttaccgagaaaagtcgcaataagatgcatgatttgtcagcttaacacccgccattcgttcgccggcatttgatggcttttgacagcccaacgccattttcctacgccaacttggacacccataaacacaactcagtttcaatgggagctggtcgggtttaaaacgaaaagttatatgcacattgaaaaggttttcatactttagaaagtattccaagggattgggaaaatccgacttacgctgcaaatcattgaacatttacgctccagttaacgagttgcgcgtgtattttcaaaatcatgttgaatgtatcgctaaagtttttaggttccttaaataagttaagaactgagaaagcagtacattctgctttatgcaatgctaatgagcacacttgaaattagatcatttaaacatttgccacctttactgaaactacacgtatttttctctaccaggaatgatataaacaaattgctttttgcataaatgtattaagatttctttcaatcatgttttttcgttgtctgcgattaaaatggcattcaaagaattgagtgacagttgattaatttgaatagttttgtggcattatcagtatggttttaaattaatcattgctaaattgtgttaaaaatctttattaataatgaaatagttgctattttcccggcggcgtttggccattaaattgcacaaatgctgaccagctaatttccctccaatttttcacttgacctcatctgcggatcagtcagtcggtaatccggtttcctaattgtctctcgtgttgcgttgttgtgagcgagtggccgaacgccttacagtttcggcgcgcactgtgcccgccttatcgcgcccaataaacaacaaaacacacacaacggcgactggcaggaattttaaaaggttcagcgccagcacaggctcagccaccgttccgcgcccgaatccacaaatcgagaaatccacaaaccaaaaacccagagatccagactcggacactgggtcacttatgcgtcctccgagcgcgactttatgactcaacctcaatccgaatggaaatggatgtcgcgtgctttgtctacaagaggcggcgataagggctcctgctagaccgccgcccgaaacctcaatccttggccattaggcagcaaggcagcgagccagcgcgtcagcggcctccaaattgatttcccagcgggaggggtcgtatttagccacttagccatttaggcagccaggtaacagctatgagctaacaggtatcgagtagccagcagcgctaagtactcgcaggcgcacaggtgccgccgcgcaactccggaagcggcgctcggaaatggccagttatctaggaatttattgtttgctaattgcccgccaggacacttaccgcacgcaggggagacggatacagatgcaatcgcaggactcgcatctaaaattcgagagggtttccttgctgaaaattgtataacaagccccttgtttaaaagcgtttcaagtctaagaaatgataaacattcccattttgtgagtgcactcaattgcttatcggttcttaatgaacatagttacttaacaaattgaagcttttcgaataagcaagagcataaatcttttactattgccggtattatctttggatatggaaagtttcattaaaacttaaataagaaacaccttatagaaaatgcttctatactactctagatgcacatattattaattttttggagatcatcccttcagtttattatatgactacaggtgtatgtagagagaataaagagaatctgagcgagcgttattaagtacttaacatccctctcgttacagctgcctttccgatcgcccgacggatcggacatccctaccagaatcgcacgccgccgaagaggaaaaagccacgcacatccttcacgcgcatccaggtggccgagttggagaagcgcttccacaagcaaaagtatctggcatccgcggagcgagcggcactggcccgcggactgaagatgaccgatgcccaggtgaagacgtggttccagaaccgacgcaccaagtggaggtgagtgtccagatttccaattttccctttcgcagcgcatcccgctgggctagaggcaaaaatcaatacccatacccttgagcagctactgtttttccgtgcttggaagtgctgacagcttgacacttaccctcttctataccccccacccccccgctttttcgttttttacgtgccgttttaaactacaatatgcacaaaaggcttttgttaaacagaccgagggcagaaaatagccgacgtgaaaatgccctagaaatgcgtgcttagtaattattattattttatagtaatttaatgatgctcgttcaaacatttcatgtaattttatttctctttctttttatttcaaataacaatccgccaaatagaaacattactgtagattaagttcgttcatactaaatttagataattattctttgtataattcagaaactttcttcttacacggctaatgcccagtacggtgtaactcaactagattatagggcatcaaagcccgacgcgcataaacggggagcaaatggcttatacaatatgcatgagcacattaaatgaacagcacccagccccaagaaaaaggggagcatatttacgaggcttacggagaggggtaggtagctgcattttgtagccacaaagagcgctcttgttaaacaagctaattgccaagttttttatggcagttgcaatgcctggctaactatatggcttagagtcgcattaaggcagacatagcactcgtattaaaaaattccattcaaaatcatagttatacgttttgtagttgcaataattacttgggcagttaattcgattaacattttgatacaccaataaagtgttattacgtactcttgcgagcatactctacataaatatgacaattttctaattatttacattttccgaattggttacttacattgtattgtatcaacattatttcttttagtttccttttaaataattgggtgtaccaaagctaggtgtcagatgacaaaggaatttctgatttatgtggcccctattagtaaaactcttgtactcactttcacatgcaaatgactatttatttgaaaccgaaattagtcagacaaaacatgtgcccaatttggcggggtattgatgcgtgatattgcgtgcgcctaattggtttcttttttattaccgtcaactaaaagtatttgaatatgaaattatttgagcggatgagttcggatagtcttgcactcatatgcgattagtggccgtcataaagacgatggcaaatggcggctaaatggccgaagtttcccactttcccaggaaagggagcagggaaagcggcaagtcgggaaagcagcaaggcgggaaagctggcgggacggcgcttaagtcgcgttaattgccgcttagcaggcggcgttttcaggcatttcagacatttttagagcccagtcctcctggcttatcagccattttgggcctattccagctcgtaaaaattaatgatgtaaaacgcaattttgttaacggcagcgtcaccggcaaccgcctcggccacggctcgtttgcggttaagtgaaatggcaatggcacattatagttgccatgattacgaggcggcactactcgtaaatatccagggtatatgtaatgtgctcacataattgccttaatgcacactgcgctgcatttgccagtaatttgaataattagccctgtccaacgtggcgtatgtgctatgtgccagttgcccattagacagcaaataaagattgcgaaactgttgtctcttgcccaattcttaataaatagcaactcgtttgcgacaaggtgagtgcctcattacgagaattgtctgtatattgagtgattcgattcgattggattcaacaagaacagcaacacttgccatcaattattaataacaaattgtgcggccaaatgaatgaactcctgttgcccgtcactgtctgacaatgtgtttagcaaaaaggcaagaaaaaaagacgaggagcaatctgccaaagcagatacatacacaacgcagatacagatacaaatacggatacaaaaaagtgtagcacacttccgggcgttttatccatgtggctccgaaacaaatggcagagtcggacttctgtctgggtccttttccctcattctccgggtctataactcaattagttttacacccataaatcaagctgccgctaaaccctttttaattacacgctcgttcatcatccgaaacatttccatcccactcaaaaatattcttgcaaaatcttagtttagcttagcttagctggtacttcatggtaattgcctggcatgtgcgaaagttttcctgctgaaagctggctaattaaaaatttacacacatgccagaaagcaactttgaccgcagaacaaaaatcaatttgactgaaagcaaagtttttgcggccggagccgaaaaatcaaataaaattaattacaatggcgagggccatttgtaaattaactcgcaatcttgtttcgcccgtcggcacgtgtcctgcgaagaatcttcaagttggtggtgggccgttcccttgggatcttggcctgaaagctccttggacgccttggccagtcaattgatggtctggctaaattgttatgtctttggggataattaccacaggacctttttggggaccgctatcttcatctcgacttgccgacatcgttcgcgtgcaatgtgtgaaatgattttaattaccaggacatgaccggaaaagtcttaaacagcagctgcctccgttggcgacaattggtaccctggggcgggggagctaaggagatttatgcgccgggttttaataaacattttaggctaatgtcgggccattacttatcgcggatggcaacagaaactttccacatcaacgcgatggcgcctagagactaacatttaacatttgtaaagcgtttgttacatttcccagcatcgtgcccgaagataaattacaatcgtgtctctgtctcaaccccaaacagcgaattaagcccgcacacatcccaagctcacagagccggcttcgttagcctggcctttttggagtttttaatcaattttcgttgaatttttcatgcggtagctggtaaaaatgctgcccgataaagccagcttgaaggcgaaaaggtgaaaaagtaaaagcgaagtgcttgctgcataataactcacttccaacgcgaaaacgacaattgaattgttttgccagcaattggaaatcggggtgttagttgtgttagttgtgagtaagaaagcaatttgcagttaaaaaaaaaaacacttttcagaattacctaaaataaatgtataattgattaactaaagatgttatagatcatattaaatgaaatcattttgctaactagccatatatccacttctcatttaagttggctgctagtcagccgtaaagacacaagctagttatccaatttgtgggcccaaaagtttgcactaaacgcccaggctaatgtatttttaatgaagcccacttgcgagttacgaaagcgtagtttgaacgatgacaatgctgatgaaaacctgaaaaccgtaatgaaagcatattaaacaataattatgatatatgtttgccatgtgctagcctcgcctagttgtggttataattcgggcaaccccttcctccgcctctttagtcgaaacataagaacttcattagctcatgaaatattcaagatggcgcagaacaacccctagctctgcgggggtggatataccactggatggagcatcgcttgtgaagtggaggtggagggtctctccggtgctcgggcggtggtggtgatggtggtgcgggtccatggccacaattagagcaacatgctgcgcaaacgcgggccggagttgctgcatctgcagtgcaattcagccctgaattatttatcagctggcagggcacaagttggaagttgggggagttggccaaatccctttaagctgggggcattcaaaatgcaatttacgtacacagctccagctcggcacaaaattaattttccattttccgcagaaacaagcacaatcgatggagcactgtgcctgtacagcagtcagcatatttgatttgattagttttaaatggtctttgtaggccgcccacataatgacttgatgagcccctgattaggccccaattggacaggtgtgagccactgaaatgggtttgcggcaaattggttttccataatgaatatgtacattaggcgatactatttgccagataagattcacggtcatccaatgtatcgattgagccggggcagatgttgcaactttgaaattcgttaaataaattcaatccgaaccctatatcctatacttcccataagcaatttcgtagtaattagggggaatatgtcagaatttaaatgttaatcaaggaaatgaattaagagtggatcaaactatcacaatttttaatgtattctagcaaacgtcaccactttcattttctttgaacaacttaagtttcataaaaagcgtatagtacagaacttccaaagagaacttgagccttacgaaacacaagttatccttattaagccttaaaccatatttcaataatatttaaatagattcttaatgaaagttttatccatgacctggccagttacttaccattaccttctttttctccatttcagacgacagacggccgaggagcgcgaggcggagcggcaggcggcgaacagactgatgctgtccctccaggcggaggccatcagcaagggattcgcgcctccttcggcacccctgggttcccaggggggcgtgaacggggcaccgctggctgcgttgcacggactacagccgtgggcagaggcgtcgcatgcggcgggctgctaatcggggcgccatcggcggacggagcctgaagtttggcgggagctggtttatttgtgatacacttcgctttgtacatagttcggatgaacggacagtttgcactgtactgtacataggaaagaggggcgtcgcctcgagcgcccactgtaaatacctagctttactctgtagtgacgcttacctaaccgatgccgggatgacgaggatttgcgatggtgaccccgaaacagcgctttaagtttgtgtagaatctggaatttccgttttgcgtttcgtagcggtgcatttaggatcttagttattgttcgacagtttcgacagttcggcagaagcaaaccgcatctcaaaacgtcgcagtgagcttggaagccacatttagtaataatatatttaatatacaaaattatatacggattgtaattgtaatgtattgtaattgtaacatctgtctgtaggcttaagcgaatggcattacctagtattataaattatgaaccctaaaaacatgtacgattattgaaaagtagagaggatgagcaatgaaaataaacatattattgaatcaaagaacagaggtatttggttttggcttttttacaatagtatagaactggatctttcagttctggagaataagtttcttttggttatttgaccacatcaattcttgtttggataccaaataggtagcaattgataaaaaactcccccaaaacaaacgaaatcaaaagtcaggggatgtttccctgccttttcagttgagttccgcatttaatcggctctgtctcaacccttaactagtacaaataccccattgaagatgatttatagacgcttattgacaggactgggtgtttcgatcaatagaccaattttgatagaaacctgctcctcaaccggataccattcgacgtgctaatgactgggatgctcataaaaaaatcagccatatgctcgaccccgaaaaaccaacaacaattagcggcgaatatccgaggccgttcattataagtgtattacgtgtttttgcgctgaaagcaaaacaaacaggcgccgccggacaggtagccctatacttagag

SEQ ID NO: 17579 - DNA, 1105 bp, DROSOPHILA
aaaatgtccagccacgaggaggatgaccatgagcacgagaacgagcacggcgaagaggtggaggaacaggagatccacgtggatgtggactcggactcgcggatgtcatgtggcagcggatccgatgtggatatggacggcggcagctgctacgacgagtccgaaacgccattgagcgagtccctgcagtcggagcagacgcgctcctcgtccagtgagaatctgcccttcagcatatcacgcctgctatccaagcccttcgagacgagtcaccaccaccacaacaacaacaaccacctgctcagcagcagtccgggctccagcagcaacaacaacaacagcggcgaaaagggcgaggagaaggagctactgcagcaggaggaccacgacctggcctataagctggccaccagcatcgccaactcgacatacggaagcgccgcagcactatactcgtatccgcatctctatccctcagcggccggcggtcatgtgctacgtgtaccgccccagagaacgccgctcacctgggcactaccgccactgcatcacgcggcgctggcacatcaggcggtcaaggatcggttggcagctgcctttccgatcgcccgacggatcggacatccctaccagaatcgcacgccgccgaagaggaaaaagccacgcacatccttcacgcgcatccaggtggccgagttggagaagcgcttccacaagcaaaagtatctggcatccgcggagcgagcggcactggcccgcggactgaagatgaccgatgcccaggtgaagacgtggttccagaaccgacgcaccaagtggagacgacagacggccgaggagcgcgaggcggagcggcaggcggcgaacagactgatgctgtccctccaggcggaggccatcagcaagggattcgcgcctccttcggcacccctgggttcccaggggggcgtgaacggggcaccgctggctgcgttgcacggactacagccgtgggcagaggcgtcgcatgcggcgggctgctaatcggggcgccatcggcggacggagcctgaagtttggcgggagctggtttatttgtgatacacttcgctttgtacatagttcg

SEQ ID NO: 17580 - protein, 306 aa, DROSOPHILA
MSCGSGSDVDMDGGSCYDESETPLSESLQSEQTRSSSSENLPFSISRLLSKPFETSHHHHNNNNHLLSSSPGSSSNNNNSGEKGEEKELLQQEDHDLAYKLATSIANSTYGSAAALYSYPHLYPSAAGGHVLRVPPQRTPLTWALPPLHHAALAHQAVKDRLAAAFPIARRIGHPYQNRTPPKRKKPRTSFTRIQVAELEKRFHKQKYLASAERAALARGLKMTDAQVKTWFQNRRTKWRRQTAEEREAERQAANRLMLSLQAEAISKGFAPPSAPLGSQGGVNGAPLAALHGLQPWAEASHAAGC

SEQ ID NO: 17581 - DNA, 6963 bp, DROSOPHILA
cacaagctgtcgaaactctactcacttgtaaaaggagcacatatccaggtacttctttggtacagccatcgtctgcaaatcctccagattccgggtggactgaaaatcgccacagcacaataacaagtcgatcttggtgccgccaaccttttcgatgccctctatggtgtcgtatattcgttccagctcgccatgtgcacatccttcgacagctattttcatggttaataaaggtaagttactactttataaataaaacttggttgtaaacaaatgcaaccggttgtccaaacaaataacgcgttctgatatcgcttatcgatcggcaattcagtgtgagaaaacgtctttggggaacgacaggatggacgctcttatcgataactctacttaatgaccgccaatatttaaactgctgaaatcttccggaaacaaagtctttcagcacttagcattattaaatataattatatatattagatgtacttataaaattcgttccctgaacggtttaaatacctcacaaaaaggtacacaaataagaaaaagatttctccagttcaaacgttaaaaattttttttttttatttttcaaaaatatcgcttcatttagtacagaatatacgtgtatgtgtgtataaagaaaatgtatgtgaaatgctctgcgttgaattctcattctctgacctagatgccaacttttttttggagttctacgggggcgtgctggtgggcacaatctcatttaatgagaccttctcgtcctgacgtgtttgtttttcgtttcgtttcgtttcgtttacatacaaagatttacaatggacttaagttatcataatttagttggccgccctggccacaaaataggaaataaaatataaatctacaataaatatagtgcggtctcgtcgccgctcgaccgatcgattttttaatctgattaatcgaccgattgtcgcagcatacatgggtacacggagtgtacgaaaaccaagagaatgccttcaaagccatcatcagcatgccagatgtattttgtttgatgtttttgttatttttggaaagaatatgagaaacaatcaagtcagaaatcgaaccaagtgtctggtgatctggtcaattcagtttcttaggagccgaacttaaacgacgtgggcacggcagtctgcggaaaggcgaagccaccttgcttctcgatcagcttcgattccttggcggctttgcgttggtcagccgtcaccaccacctcttgcagcgccttggcttgctcaggtgtgaggttggaggtcaacagcgcataccaggcttggtcttgtgcagaaagtgctgatggcgaagattaggttattagttagttttccaatggtgtacaaaattcagcacaacttaccagtaataacttccttaaacgtccagtactcatcgatggcgctttcgttctcctcatcgtcgatgggcgtggtaaacgactccagtccagtctcgttcagatcacccacagactcctcggcgtcaccgtccgagtcagcatcgtcgtccttgatttcggctttcacttcgaagcccgactcattgcccttggttttggcaaattcggccaatttatccagatagtccggtgccatttcgtccatgtcatcctcgtcactggacagagcctcctcacagtcgtcaccgtcctcctcctcctcatcttcctcttcctcctgagcacgagactcgtaggcgcgttttagaccatcgaaaagcaaaataagtgcgggcacaatctttccagccacttcgctcagaacctggggcttggcttcgcccagcgagatgagggtgcacagacccaggacgcaaagtttgcgatcgtggatgctggaaaacgtaacaataaactatctagatcattaaaaagcatgtccattcttaccctaggaaacagtccgtgtcgtgaagccactgcttgataaagtgcgcgctgatagagtcgttgttttgctgggacattttgtccagaatggacagcagcaactggggattatagtagagtgccgcgattaccacttgcaggcacatagtgcgcagctctgaggattgaacttcacgtgttaaccgggacagagccagctccacgaacatatgtatcactgagtcgatttgacccttgcactgcaagataatcacttccatcagtttggcggcatggcactcgggatcctcgccagggctactagtaagcatctaaaataaattataattattataattattattatagttattcgaggttcagacatatttaattattaagaatagaagcttaccgttttgcacatgtcgagaatcgccaacagcctgttgggattggagaggaaagcgggcgtgtcgaccgtcacatagttatgcagagcaggcataatgtcgataaagtagtcaataccgtccttcttgaacacctgatagatgagctccagcatctgccacatttcgggggaaatggccttggctgtcaggtcgtagaccagggagaaggtttcctcatagaagtctgaagagatgaccagatatttttataaacgatatcaacgattgagggcacagccaactaaccagttatgttgtgctggaaaatgtgtccgacaacattaatgacgatcgggtgcaagttaagcaggacatcaggatgctcttccatcacactgagcagagtttcgatagtgttaagcagactcatggccgtgatggccttctcgtcggatccctcctcagattctaggacctggctgaaggtggtggccaggtgctggcagatctcggtggccacgggcagcaattgctcggtgaaggtgcacacgatcttttgcataacgtttgttagatcttcgttctccgtctctcgaatgatggtaagcagctccttggtgatctccttgatctgtgcctccacgtattgcggcgcctcgtcctgggacgatatgaacatctgcagaccgatagctgcctccactttgacgggcagctccttgtcggtaagcaaggcgtttgtggtcagacgcattatctcggccagcacttggggattcttgatttgaacgtcacagaaatagtgcagcacccagcacgcgcgcgctctcatgtggcccgcgggattttggaattctgggaagacgtaggtggtcagcatggactccacttggtcgcggtacgaagccttcttcagcagtacgtccgccagcgttccaatcatgtgcaaggcaccatctttctgtttgttgtccgcattcggcgatgtaattatctgcataattgtggccattgccttgggcaaaatgcccttgcgctttttgcacatagaatgcagcagagattgggctgccggtacaggtgtggcataatcctcaaagatatctattggaatcggttagtaatgtagttcaagtcatttaaaaagttctcttaccgaacttaaggcgaatgtactcgtagggatcgctttcccagagctcctgatcggagtcagtaaacgacatgatgggaaagatcacgtcctggatgacagccaccatgtgaggcttaatcagcttccaggtgtaggcgtggctaaccctgcaaacggaataaataacatttaaaaaaacgagtcaactgattggaatcgacttttgtaactgcaattataaacactacatcttatcagctttaaaaattttcagactttctatcaaagattaggtatctcctaattaagtaacatcgattttacattccaactatatatcaaatgtcacatgagaatttatagaatactaaattacttacgcattcttcagatagttgagcacatcagtgaggacgcgtggtgagacgtagactctgtttcggtactggtcgaggatcttgaggagcacctccagcacgccctggctaaacgtgggcagataccactctgcgaatttttggtatttttcactaaccacattgctgggactgccataactaaatttatacatacaacgttagttatctagactatgactatagatactgccgtcaacgtaccgctcgaacatgcgaaccatgatgtgcagggcccacttcttagtcttccagtaggggaactccgttcgctcatcatcgtccaggtgcgagctatcgggcactgcgcgatcagccacctgacgacagatctccatccactgcgagaagatctccttggtaatgaggtccagtggaagggtgtattgcgtgagggcatagtagatcttgagaatttgcttttgtagcagcacagattgctcggactgctctgccagcagtcggaccatcagctggtagatcatgggcaacagtaggttcattgcctcgtttagcggcgtcctctcctcatgccgcttgtactcgtaggtcttgaccagctggtacatggttaccagagctccgttccagccgttgacatcctggttttgcagatatatgctgatgctatccaccacctgtggccagcgtccagggaaatcgcttttaatgatgtgattgacgcagacagacaactggaccctgtgtacagaacgaaattagccccctggaaaggattttcaatggatttacccacctaatcaactcgggggcgtgcacaatagcatctacaatagcgccacggatcatagcccgatcctgttcgtgtatagagaagggtattggctctccaggcttggcctcgtggtccgaccagctgctgttgatcagattcttgaggtagacagcaccggcctggcgcaccggctgttccaccgtcgtctgcataacgatctgcagtatggtgggcacaaatccgatgattttgtgtatctgtggggattttaatgtatagaaataaaatagaatggatatgtttacacagctgtttggggttgggttaaatttgaattggtcaaagaatcaatggcagaagcactttaaattccgttcacagagctcaattaatatggaggagccaagaacaactgctggccataagcgctgataaagttaattgacaacaggggggttggtgggaggcgattgggaggggcatgcaaatcgttagatgctgactcagtcgtaatgagcatgcctctacagtggggccaaagcaattggttagtggggtggggtctaattagactggccgctctgattgcccacatttatttccaagggaattgcgtaagcttcaatcaaagggcattccggcgatatttcgaaagtctcaattaaatatttattaacaattcagtggatttccgaagaatcacacgaaactcgcaataaatatgtacacatatagaaatatatatagcatacatacatatgtaggtgccccaaagatatcgacttgttgcctctggggcaacaacatagaagtcgggataatggtaaacacataaagggcaaactttttgaccgatatcggattacactatccacacccacacacttgtacaacgaccagagtgatgaagtgcgggagcgagggaggttaaaagcgaacaattaaaaaagcacatggttttcaggcgatggcgccacctccaaagacctttcgaattcaagtgcaggcgtttatttttgggagcaaactcacctgggccagttgatcctcggccgccttgcgctgttccggattcggatcaatagttgcgcgcaacagttccgtgagtttttgtgcctccatttttgctacttttgcttgattctatgtttcgccggtctttctgctgcacttcgtcgtttggcggtcaccttgtgcccactgtgcacccgctgttcttgcctttatatagaccttggtttatgctagccgaaccagtggctccaatgtgtgggccaaattgcaaatctctttttccggaggaaaaaacgtggaaaagactccacacacgcacacacacaccgccgaaattcgcgagacgaacgaagcttagaagaagaagaaacagcgcctgtgtgtgttgactaacgccgcagtgtatggggccctacagggctgcattatgttcgccggtaacagtttagccaaaaattcgagcaatattgaaaagccttcgctgcggaaaatctaggcaccatttatatatagaccacttgcttcataaggtaactatatttaaaggcttaaaaaacagcgacttttcacaattcccgataaattgccattcaagttgcatggccaatcgattgttgcagccctggcagctgctcgtacgtgaacacgcgaatgtgtgtgtgacgaagagcaaagtgacacatagttggaggtgtggttgaaaatatatagaaatctgggtttatctgcaactgaaacgaagggaaatttgtgttaaaggcgagcgaagatcgcaactgaagagctttaactggcagcaaggcaaaaggacgagcagcgaccatggcaggcaggctaccggcatgcgtaatcgatgtgggcaccgggtgagtttttagtttcgattgcccgtgggggtctccaattggacggaaaggaggtcgactgactaacactctgcttgtctgcacatccatcagctactccaaactgggatttgccgggaataaagagccgcagttcattattccctcggcgattgccatcaaggagtcggcacgagtgggagacaccaacacacggcgcatcacaaagggcatcgaggacctggacttcttcatcggcgatgaggccttcgatgccaccggctactccatcaaggtatgctcttgtatctatggtcattaagcaaccgacatcacatttatcattgcattccaatagtatccggtgcgtcatggtctggtggaggactgggacttgatggagcgctttctggagcagtgcgtctttaagtatctgcgcgccgagcctgaggatcactacttcctgctgactgagccgccgctaaatacgcccgaaaatcgggagtacaccgcggagataatgtt

SEQ ID NO: 17582 - DNA, 3541 bp, DROSOPHILA
tttcttcttcttctaagcttcgttcgtctcgcgaatttcggcggtgtgtgtgtgcgtgtgtggagtcttttccacgttttttcctccggaaaaagagatttgcaatttggcccacacattggagccactggttcggctagcataaaccaaggtctatataaaggcaagaacagcgggtgcacagtgggcacaaggtgaccgccaaacgacgaagtgcagcagaaagaccggcgaaacatagaatcaagcaaaagtagcaaaaatggaggcacaaaaactcacggaactgttgcgcgcaactattgatccgaatccggaacagcgcaaggcggccgaggatcaactggcccagatacacaaaatcatcggatttgtgcccaccatactgcagatcgttatgcagacgacggtggaacagccggtgcgccaggccggtgctgtctacctcaagaatctgatcaacagcagctggtcggaccacgaggccaagcctggagagccaatacccttctctatacacgaacaggatcgggctatgatccgtggcgctattgtagatgctattgtgcacgcccccgagttgattagggtccagttgtctgtctgcgtcaatcacatcattaaaagcgatttccctggacgctggccacaggtggtggatagcatcagcatatatctgcaaaaccaggatgtcaacggctggaacggagctctggtaaccatgtaccagctggtcaagacctacgagtacaagcggcatgaggagaggacgccgctaaacgaggcaatgaacctactgttgcccatgatctaccagctgatggtccgactgctggcagagcagtccgagcaatctgtgctgctacaaaagcaaattctcaagatctactatgccctcacgcaatacacccttccactggacctcattaccaaggagatcttctcgcagtggatggagatctgtcgtcaggtggctgatcgcgcagtgcccgatagctcgcacctggacgatgatgagcgaacggagttcccctactggaagactaagaagtgggccctgcacatcatggttcgcatgttcgagcgttatggcagtcccagcaatgtggttagtgaaaaataccaaaaattcgcagagtggtatctgcccacgtttagccagggcgtgctggaggtgctcctcaagatcctcgaccagtaccgaaacagagtctacgtctcaccacgcgtcctcactgatgtgctcaactatctgaagaatgcggttagccacgcctacacctggaagctgattaagcctcacatggtggctgtcatccaggacgtgatctttcccatcatgtcgtttactgactccgatcaggagctctgggaaagcgatccctacgagtacattcgccttaagttcgatatctttgaggattatgccacacctgtaccggcagcccaatctctgctgcattctatgtgcaaaaagcgcaagggcattttgcccaaggcaatggccacaattatgcagataattacatcgccgaatgcggacaacaaacagaaagatggtgccttgcacatgattggaacgctggcggacgtactgctgaagaaggcttcgtaccgcgaccaagtggagtccatgctgaccacctacgtcttcccagaattccaaaatcccgcgggccacatgagagcgcgcgcgtgctgggtgctgcactatttctgtgacgttcaaatcaagaatccccaagtgctggccgagataatgcgtctgaccacaaacgccttgcttaccgacaaggagctgcccgtcaaagtggaggcagctatcggtctgcagatgttcatatcgtcccaggacgaggcgccgcaatacgtggaggcacagatcaaggagatcaccaaggagctgcttaccatcattcgagagacggagaacgaagatctaacaaacgttatgcaaaagatcgtgtgcaccttcaccgagcaattgctgcccgtggccaccgagatctgccagcacctggccaccaccttcagccaggtcctagaatctgaggagggatccgacgagaaggccatcacggccatgagtctgcttaacactatcgaaactctgctcagtgtgatggaagagcatcctgatgtcctgcttaacttgcacccgatcgtcattaatgttgtcggacacattttccagcacaacataactgacttctatgaggaaaccttctccctggtctacgacctgacagccaaggccatttcccccgaaatgtggcagatgctggagctcatctatcaggtgttcaagaaggacggtattgactactttatcgacattatgcctgctctgcataactatgtgacggtcgacacgcccgctttcctctccaatcccaacaggctgttggcgattctcgacatgtgcaaaacgatgcttactagtagccctggcgaggatcccgagtgccatgccgccaaactgatggaagtgattatcttgcagtgcaagggtcaaatcgactcagtgatacatatgttcgtggagctggctctgtcccggttaacacgtgaagttcaatcctcagagctgcgcactatgtgcctgcaagtggtaatcgcggcactctactataatccccagttgctgctgtccattctggacaaaatgtcccagcaaaacaacgactctatcagcgcgcactttatcaagcagtggcttcacgacacggactgtttcctaggcatccacgatcgcaaactttgcgtcctgggtctgtgcaccctcatctcgctgggcgaagccaagccccaggttctgagcgaagtggctggaaagattgtgcccgcacttattttgcttttcgatggtctaaaacgcgcctacgagtctcgtgctcaggaggaagaggaagatgaggaggaggaggacggtgacgactgtgaggaggctctgtccagtgacgaggatgacatggacgaaatggcaccggactatctggataaattggccgaatttgccaaaaccaagggcaatgagtcgggcttcgaagtgaaagccgaaatcaaggacgacgatgctgactcggacggtgacgccgaggagtctgtgggtgatctgaacgagactggactggagtcgtttaccacgcccatcgacgatgaggagaacgaaagcgccatcgatgagtactggacgtttaaggaagttattactgcactttctgcacaagaccaagcctggtatgcgctgttgacctccaacctcacacctgagcaagccaaggcgctgcaagaggtggtggtgacggctgaccaacgcaaagccgccaaggaatcgaagctgatcgagaagcaaggtggcttcgcctttccgcagactgccgtgcccacgtcgtttaagttcggctcctaagaaactgaattgaccagatcaccagacacttggttcgatttctgacttgattgtttctcatattctttccaaaaataacaaaaacatcaaacaaaatacatctggcatgctgatgatggctttgaaggc

SEQ ID NO: 17583 - protein, 1049 aa, DROSOPHILA
MEAQKLTELLRATIDPNPEQRKAAEDQLAQIHKIIGFVPTILQIVMQTTVEQPVRQAGAVYLKNLINSSWSDHEAKPGEPIPFSIHEQDRAMIRGAIVDAIVHAPELIRVQLSVCVNHIIKSDFPGRWPQVVDSISIYLQNQDVNGWNGALVTMYQLVKTYEYKRHEERTPLNEAMNLLLPMIYQLMVRLLAEQSEQSVLLQKQILKIYYALTQYTLPLDLITKEIFSQWMEICRQVADRAVPDSSHLDDDERTEFPYWKTKKWALHIMVRMFERYGSPSNVVSEKYQKFAEWYLPTFSQGVLEVLLKILDQYRNRVYVSPRVLTDVLNYLKNAVSHAYTWKLIKPHMVAVIQDVIFPIMSFTDSDQELWESDPYEYIRLKFDIFEDYATPVPAAQSLLHSMCKKRKGILPKAMATIMQIITSPNADNKQKDGALHMIGTLADVLLKKASYRDQVESMLTTYVFPEFQNPAGHMRARACWVLHYFCDVQIKNPQVLAEIMRLTTNALLTDKELPVKVEAAIGLQMFISSQDEAPQYVEAQIKEITKELLTIIRETENEDLTNVMQKIVCTFTEQLLPVATEICQHLATTFSQVLESEEGSDEKAITAMSLLNTIETLLSVMEEHPDVLLNLHPIVINVVGHIFQHNITDFYEETFSLVYDLTAKAISPEMWQMLELIYQVFKKDGIDYFIDIMPALHNYVTVDTPAFLSNPNRLLAILDMCKTMLTSSPGEDPECHAAKLMEVIILQCKGQIDSVIHMFVELALSRLTREVQSSELRTMCLQVVIAALYYNPQLLLSILDKMSQQNNDSISAHFIKQWLHDTDCFLGIHDRKLCVLGLCTLISLGEAKPQVLSEVAGKIVPALILLFDGLKRAYESRAQEEEEDEEEEDGDDCEEALSSDEDDMDEMAPDYLDKLAEFAKTKGNESGFEVKAEIKDDDADSDGDAEESVGDLNETGLESFTTPIDDEENESAIDEYWTFKEVITALSAQDQAWYALLTSNLTPEQAKALQEVVVTADQRKAAKESKLIEKQGGFAFPQTAVPTSFKFGS

SEQ ID NO: 17584 - DNA, 2809 bp, DROSOPHILA
ttgaatatccttttaaattaagtattaaataaataattacacaaaaatggatagtcgactttaggctttttttaactattatggttttaccatagagataaggtttgatgaaaaatcccccaacagcgttattttcgtggtatttcaagtactattcctggtattggcagcttaattgacaactttccactatcagctaataggttttttttttatagagattgctaaatcctcgaggcattacaatactcttcatattgagcagaatttctagaaagctcctaccatagttaatgatcaatgataacaggtatattacttcctgctcagtaatgccttaaatatagaaagtttgttgttggtaaaaaccgcttctattgccacaaagttgattgttgtctttaaacaatctagaacggatgagacatacatatctttaaacgaacaaaacaatttgtcattgtcacaaacattctgcgccctactctagttaaaaatgattcatctacctttgcgaccctaatcaaattctttggttattttttttttgttttgatttggaacaaaatagtcaataaaatcaaatgtagggaattatgtgctggaatcgacgcttaatcgttgtcattgtgtttatcgtcgtgctaacagtagttttctttataatatttcatatatatgataagtattacgatcaatccctcttcactcgagatgtttaagtggcaaatagctttattctgtatttttattctgctggatgcaccagtacgaaaatgatggataatacgatacagatacctcggtcgaatggaaacattgtaagctccgttttccaataactctcacccatttttctcactggcgtagtgataattatagtcgacttgttatcagtctatttgttattttttcggccgatatgattaaagctttcaatacctgtagaccccaaaatgcggtcgatgacagttacccgcttcagttaatattttgtgttggtcaaccacgcatcgggaatcggaaatatactgtacagtatatctatctataatagaataacccaaaaaagtcatcaccatgtgcaacgctctctgtgaatgcctcaaatgtcccggcaaagtggtttgctggtaagtttccatcggtttctggctcactaatcatcatatacaaatatatactatatatatataaattatatgtgagagctcttgaccagctctggatgaagccaatttgggaaatttagaaatgggtatcttcagttacaagcatcctaagtattcgggattcaacctgattgaaatgaactaattgaactgatctgacaacaagatctgacatccaggatatctccatcttgatcatgtgtaaaacttttctaatcagatctttccatatccttgcagctgctgttcctgcgcctgcaagatgctcctgagcatcgtgttttctgcgctcctgatggtcgtggtgatcggcttgattgtctacttcacggtcttctatcacaaggataagaacacggatgaggtgcagaagcaggtcgcccaactgacgcccattgtgaagcgcagcatacgcgactacttcaacaaggagtactgatctgaggacatgaatttatactataggccatattaataataactccgtcgaaatcgaaattgaaacgaactaagaaccaaagccgttcagtgcatgacttaatctaatcgcgtcggatgctcgttatgggattttttcttatctatagatagtttgggactcaattgaatgggcaatttgtgcgttctttagaaaggtagataatgttggagcggcaaaaaatgtgactcactgtataccttacaatacattttgaactcgaaacccagtaaagcattcacaatatatatttaatgtataatatgtatgaatgtaaggcagattaaaaaagttatattgtactggatgacacactataaacaagacaataaaactaaaatatctatagaaaattgaaagtggaaataaaagtaagtgtatcattaattaatagcatctctacatactggcttttaaaatttgtaaatctaaaataagctaatattttaagcttgggggaaagaaattagaaaacttcgttattgaagtgtgagatattcactaataaatatttgagctagggaagttcaaatatttttttaagatgagggtttaccagcagggaaacccctcattaccacagtccttccagctgttttcctagttttatgtacaccattgtttgggatcaggtagcctagaacaccgtcgagggttgaaaagtgtccaagatctggtggtccgttcaaatgcatttcaaactcgtccccttgacttgcttcaatcaactttgggctcagttgttcgccagcatcaggttcacaatgtcctccgattccacgctgtacttcagtgccgtcgaggatatgttcaaggaagtgttaacaataggggacgagaagagggatcctggaaacgaggatttctccgaaacacctaaacgttgcgtacgattgcgccagcaaaagttgttcgcgaacgataccgcgagttttgtgataggtcgccgttcgccgaggattgaatccaaaatcgatctcaacagagatgtatctcctggaaggcgaaaggagctgcgcggcgaggaaatccttcggatgcgcaaggatcgggcggaaaaggagcgtctgaggccccaaaggcgtcttaccatgcggatttagtgccacacctatcgatatgatagctatccaccgagttcattgtgttccccaatcga

SEQ ID NO: 17585 - DNA, 530 bp, DROSOPHILA
ggtcaaccacgcatcgggaatcggaaatatactgtacagtatatctatctataatagaataacccaaaaaagtcatcaccatgtgcaacgctctctgtgaatgcctcaaatgtcccggcaaagtggtttgctgctgctgttcctgcgcctgcaagatgctcctgagcatcgtgttttctgcgctcctgatggtcgtggtgatcggcttgattgtctacttcacggtcttctatcacaaggataagaacacggatgaggtgcagaagcaggtcgcccaactgacgcccattgtgaagcgcagcatacgcgactacttcaacaaggagtactgatctgaggacatgaatttatactataggccatattaataataactccgtcgaaatcgaaattgaaacgaactaagaaccaaagccgttcagtgcatgacttaatctaatcgcgtcggatgctcgttatgggattttttcttatctatagatagtttgggactcaattgaatgggcaatttgtgcgttctttagaaaggt

SEQ ID NO: 17586 - protein, 83 aa, DROSOPHILA
MCNALCECLKCPGKVVCCCCSCACKMLLSIVFSALLMVVVIGLIVYFTVFYHKDKNTDEVQKQVAQLTPIVKRSIRDYFNKEY

SEQ ID NO: 17587 - DNA, 7382 bp, DROSOPHILA; identical to SEQ ID NO: 17572

SEQ ID NO: 17588 - DNA, 4382 bp, DROSOPHILA
tgaacattttgcgagaaaacttttcgccgcatttaaaaacgttaaagacgaagcatgcgaacggcataaacactggatttaagtaactattgaatgtcatcgaccaaagatctggcaacgccgtagtcgctctccctctcccaccgtcttcggcctttttgagcacatgtgccaccgattgttgctcgcaacggatatttttgtgcctcccgtttgtttatgtgtgcaacgaagtgagagaactgcatattttgcagggctagcgagtgatgaacaaccagcgatatggcggcatccagtggatacagcaccacgtttccgcgggcgactcctccgaggtggacatcctggagtcggatggtggagcaggggcctcgggtgaggatctggaccatgtggcggccgagaatcttatattcatggcccgcgacggtcagctaagtgagataatggctgccaacgaagctggtagaacggtcctggtcaccgccgacggcaccacggtggcctatgcggaatccttcgacgatgacgcccaggtggtcaccgaggaggtaatcacagacgactgggtgcagcaccaaggcgccgagcgagtggagattgctgccgagcagatagctgggattagcagctcacaggaactgctggacatggagcaggatgagtacactgcgctgaggccctatccctgcgacttttgcagtcggcgctttcgcaagaaggccaccttgaataaccatatgctggcccaccaaaatgatcgaccgcacctctgcaagctgtgtggagcgcgattctcacgacgagcagagctcattagtcacttcaaggcccacgcagaggcccaggatgccgccgatgccgaggcagcagcggcggcagccgattcgtcttctgccattaaattcgagcatcagacgcagcggcaactggacgatcactactacgagcaggaatggccactcttccaacatcaacaggagcaggaaaacgcgcaacagaatgtccatcaacagcatcagattgtggaagagggcgggattcagctggtggccagttacccagacacggtagctcaaccagcagctccgtcgcgaggcagaatcagtcggttgaagcccaaggaagaaagcagccagttcattgtgatttccgacaagtcggtggaggactctaggccatacatggagcctgagccggctcagcctgtggttaccacgtcggagtttattgctgtcgaaccgcctcctcagccaaactttccggtgctggatcacagcaaaccttttgtgtgtcagcaatgcggattggcctttgcgcgggaaaaggcactagtttcacacaccaagaatcaccgcgtggactcaccgttcgaatgcaaccagtgtcaggagatgttctgggacaacagcagcttgcaggagcaccagaagactcatcagttcgaggagagcaactcggagtacgatcctgcctcagcggaggagagcggcagtgaatcggaggcagacgagcagttgtatggcgaattctattgcaacgaatgtgggatctcttttcatcgccaggatctactgcgacgtcatgccaagatgcactgtaagccatcggatcaggcagctgttggtagcaattccgatgtcactgctggcggagacgtggagcttgccaaagattcttctggtcactgttgcaacacttgcggaaagtcctttcctagcgctttagagatgctcgcccatgcagaaatccatgctaggttcccgcccttcaagtgcgtcctatgcggcattagcttttacgaggagcaggcgattaagcgtcacctgcacactcgccatcccagtgaattgaatgccaattcctgcgttctgtgcggcaaagagtgccgcgatcgcaaggctctgataaagcacgcctgggaccattcgcgcgagaagtgccattcgtgctccaagtgcggaaagaacttccacaacaaagcgcgtctaaagcggcacatggcttcgcatcgggacaagtcggttgtatgcgaggtgtgccaggaagaattccccgacggtcgtacgctctccaaccatcgacactcgcacagcactactacgcctggcaagctttttccgtgcctcgaatgcggcaagacatttggttcgcgcagttcccagcagattcacgtacggatccacaccggtgagcggccatatggctgccgctactgctggaaggctttcgcggatggtggtactctgcggaagcacgagagaatccacaccggcgagaagccatatgcctgctccgtctgcccacgcgcctttaaccaacgggtagtgctgcgggaacacattcgctcccatcattctgggctggatgtagcgcggaacacctatcactgcacagtctgttccgaagacctggcatcgtccaatgaccttattcagcacctgatccaacacagtgattcaaacacagctaagcagcgacagcccgttacgggaccgcgcaagtacaagcgtcgccgtaagctacagcctcacgagatcgctcacatgcgggcggcgaacaagcatgtcaacggtgatgaggaagaggccataggagaaggcgatgcagaggagtgtgccagtgacatcgatttctgcgactttgatgtggagaacgtggacgatatcttcgacatggccgaatcacccaaaaaagaaaagcgaaagaggggctcggcagccacaaaagctgatgccaaacccgtgaccaatgggaaagcggcaaaacctgcccaagataagggcaaagctaagccaagatatgattccaccagcagtcagcaatcggatcgcctttgggaggaaaagttcctgcacgacagtcaagtggctctgtttcagatcgattcgctggtagtggtcaacgacactcatttgcagcctgctagctccgctgtgtctgctaacatacccaacacaagaggtggatcgaagcagcagggaaaagttcaggcgaagtctgtagaaggagccgaaaatttgaatagctcagctaccacatctgacactacattctccgcctccacctccactgccagcactcggagccgcaagagggcagcaaccactaaaacagccagcaaagcacctcctgccagtaattcgcgacctcgaatgattcacacagagaaagccaaggtgacaaaaggagttggcggagactccactagtagttcggcaaagaaaacgcgctcgaagacctatataagtcgcacggagtcgcacaatctgagcctcgacaaatcccgcagcagtgcctcaaatatggtggatgactatgaaatcatttctccagctactcatccgccaaatcagatcagctccagtcccttgcacatcaaacaggagcaggaacaacaacagcgtgttcaacttatgtacgatgataacctactgatagatgctgctctgctcagggagaagacttatgagaagtttaatccgagcattgttaatgatctggaggagatcctccgctctccactgaagcacgagagaaattctcgtcttcgctttaccagcgagtcatccaccacgccacaatatttgcacgaagaggagcaaaaccttataaaaattgaaccaacttctccggatctgcgggaaatgttggagggtcagcaaagagtcatcgctcatagcggcagcactccttcgtcctcttcatctgctagaacttccagacatctgcgacaaatcactgccaatggtgcacgggcaggcagcaagagaacaacaggtggcgtagccagcaagacgtcggcatccccgggagtggtggccaaaaaatcgaacactgccaccaaggtgagcagcagcagctcatcctcgtacctctcgtacggggtggattcctacaatgtaaacgtacctgccagtgccaacaacggcgatgtgggcagcggattcttttccatctcggaggtcgtttccgcagctgacgccgcggatgcggctgctaaagcggcggcagctggtaaatcggagcggaaaactcgcagtttcgagtgcgaaatgtgctcggccatcttttatgatcgcacccagctgctggaacatgtgcacattcacatttaaatggaagctacctaaaccactcgcccggagccttgtatttttgaaacatcttatccttatatacaaacaaaatcggagtaaattacctcaaggtatcgtgcatcgaaaaatatcgttgatttatgcgttatttaaaatatggaacctaaacctattatagagagaatagttcgtaaggcttttaagtttgtacctcagcttttgttttgaagaattggtatgctggaataaatacatcattaaatggtttttcattacctt

SEQ ID NO: 17589 - protein, 1283 aa, DROSOPHILA; identical to SEQ ID NO: 17574

SEQ ID NO: 17590 - DNA, 2562 bp, DROSOPHILA
acaatggccaaactgagattgatcaaactggagcggcttaaaaaggtaaagagccaaaaaacgcacttaaatttggctcttaacttttgcataagtattcatctggcaagatagttatatttaacatcaaattatgcatatattaaaaaagtcatattcacatatattttaatagtatctaataagttttaattaagaattaacattttttaattgattaaattcaacaatcgatccttataaagtattatacgatttatttcaccaaattatggtacaaaatattaaagatgagataatcaactcgttatcattttgaaatgagcagattaattaaacagattaaaagggcagtttaataaactaaacccatgatactactggtaaaactctattttttaagtaagcaattgtttttgattagttatctaaaatatatttgttcattttaaaggccataaaaataaacagttcaacctgtgtcgcaataagggaacatattttatttaaataagtggtgtcaagtagatggtattggtcggaataagtactacagatcgttttatagggcaagtacccctataatttcaaggacttgatagttaatttctgctcgacaacggatggaaagtttgtggtatttaatttggttcttaaaatctgacatagaattgcctgtatattcgcactataaaacaaataggaaggtaaagtaagcatatccttaaaaaaatagttttaacaagaaaatttgagaaaattgaaatattaatataggtaataataaaggtgcaattgaaatatgtttgctacgtttcctcgtgggatcttaaaccatatttcatatattaagcacccattattctagttcatccaaaatgtttgaaatagtttaaacaaacatagatttatgtaatttttttcttctttattttaaaacattttttaaatcgtaataaagctcttttaaaatgttatcacataagacttccgctcccgcttaaccaaagaccttcctgagggcgggcctgcggtactcctgctcgacgtattggggatgggtgcggatgtactccaagctcctaaggatggcagctgggattggaggaggagtgggcaggagagctccctggggctggtaaccgttctcgtcggccacgtacgagatctggacgagctcaccctcgggcgagtaccacgagaagcctccgttggcgtggtttcctccaattccggactcctgggcggcgatgccgttgctggtctcgtattggtagttgtagttgccctcgggctggatgtcggaaccgatcttggtgatgtaggcaccagcttcctggttgtaggtggcggcaccgtaggcgcaggccaggatagcggaggcgacgagcagctataaaagcaggtggatcccagtcagttacaaattgatcatagacgtttttggattgagtccataggagtttaaaatattttaagatgtttaaaatatcttaaagaattctaaacacaactcgttttaggtcgaagtaaatatccttttgacttacgtagcggaacatctttgctggcttggagtgcgtttgtctaaactgagagacgactctgaatggtgactttactgcagactgtttaggtttttataccaattgtcgacatcaaaccagatccaccgaaacaacttttacgctctgctgcaggaaactcatctgaataacaataaaatcgaatagccgaaattggccaaactggagcactaagagtgacttgagagccaaagagctacgcacaagttcaaaaatccactcttttcgttttcaatcaaaccaagatgtgatgcacattcaaacaactaaggtgaagatatataatataatatataaataatatataaattgtatatgtatatatatatatataatatatacaactatgtatggccttttcaaacattcatttcacataattaaagagtttttcaaatactttaaagcttaatttaataattaatttaataattaattttatgttatgtttgtatgttaactaagtttatttaggtgcttaaattttctttaaaatgtattacttgatacacattattttccttcttaggcaccttatttctagataaggtcctaccagcttgaccgctgctgtgcgtgtgggcattgcaaagagcaaaagttaatacgaaccccatgcggcaatgtcaatgtcgcagccacataggtcggcttggaggttcgagatccgcagactccagtttctggttccaaattcagtttcaggcggcgcacccaaaaaattgtattaattaaatgcatttaaaacaccgaccagtctcgatacaattttagcataatttatggttttactccggtctgctcaatggttaacttttccagttcgataagtcaaaccttttcttggctctacgcgtgtgatgaagtccgtctgaggtgctgaaatgtgtgcgtttaacaaattgggccattaaagtgagttaatgcctaattggtacacaagtgagatatcaaactggattaacccgttgccagg

SEQ ID NO: 17591 - DNA, 405 bp, DROSOPHILA
atgttccgctacctgctcgtcgcctccgctatcctggcctgcgcctacggtgccgccacctacaaccaggaagctggtgcctacatcaccaagatcggttccgacatccagcccgagggcaactacaactaccaatacgagaccagcaacggcatcgccgcccaggagtccggaattggaggaaaccacgccaacggaggcttctcgtggtactcgcccgagggtgagctcgtccagatctcgtacgtggccgacgagaacggttaccagccccagggagctctcctgcccactcctcctccaatcccagctgccatccttaggagcttggagtacatccgcacccatccccaatacgtcgagcaggagtaccgcaggcccgccctcaggaaggtctttggttaa

SEQ ID NO: 17592 - protein, 134 aa, DROSOPHILA
MFRYLLVASAILACAYGAATYNQEAGAYITKIGSDIQPEGNYNYQYETSNGIAAQESGIGGNHANGGFSWYSPEGELVQISYVADENGYQPQGALLPTPPPIPAAILRSLEYIRTHPQYVEQEYRRPALRKVFG

SEQ ID NO: 17593 - DNA, 3737 bp, DROSOPHILA
gtccgtgatacgtttcctaacactgtatcagctgattgtttgtttatatcgcagtcgtttcttgcctgttttgctttttactgtatccgaccggagttcagtacacctggccgaaaaagatgacgacgcacttcagcaatgtactgcggcaggcattcaaaacgttcgaccgggcaaatcacgccagcttcaatgcgaatttgcagcatctgcgtcaattgacggatgagctgacctaccgggatctgcacctccgcgaggagctctttcgcaacgtgggaagccatcgggcaccctgcagctacatgcatatattcgaggatgatcgcttctccatgagcctgtttatagtgcgcggagcgagcactattcccttgcacgatcaccccatgatgttcggtctgctgcgctgcatctggggtcagctaatggtggacagcttttcgcaccagttaggcccggatgagccgctcacctatgacccccatcaaacagtggtgaaggtgaatgtcgaggaacccaaattggtcacgccggctagtccgtgtgccacattgactcctagaaagagaaattaccaccagattgcccaaattggtagcggcgtagccgctttcttcgacattcttagtccgccatacgatgcggatatgccaacatatggaccgcgacagtgtcgcttctatcgcgccacggcagagggcagccaggtgcagctgcactgcatcccatcaccggatacatactattgcgatgttgtggacacgcccgaatcggtgatgcaggccgcttttcagtgcgccgacgaggtctatgccgataatgccagcgggacacagtgagtcgttatctcgcttcccagcagctaacaccctcctatttatttgcccataatcaaccgttggctgatcgtatcagccaagtatcttctgtgttatttaaataaaattgcctcctttttttgtataaatcgctccgctttcacggaatttgtttgggtttaatcttcttgcgcttggtaaatgttctgattgcgtcgcttaagttttttcacattgggactagcgggcactgatgcaggttcctctacatgaggcgtttccgttgctataattgcttcttcagcttcctcctcgggcaggtctatcacgttttcatcggtggtatcagctgctgcagttgtaggtgctggcagggataagttaagtttccttttagttggcgtaaccaatggttcagccacgtcttcttccaccgcctgcagcttagaactttttgtttccctatccttgcattcggtagctcccaccgcaggcagatctaggccattcgccaacaaaactaagcacagcggatcgtctatacccagagtggcacagaacgtattgctctgggggtttagttgaaccttgggttgatccacaaacatgtgcttataatcagactgctccgcgggatcgaaagctggcactgtgcgctcaaagttctcggggacttgaagtttctgaaactttgcggtcactgcttctagttcttcttcagtgggggtaaagtttgatcgctctgtaaactctcccgccttttttccgggcaggtaataataattctccttcactgaaatcaagtgatttgtactgtgcaagatggctagccactctgcgtcgtattccaggcggggagtgccttcgatggggtcactgggtacctctaccacttgcaggaaagcacgacgtggcaggcatttgtcgagagccagaaacttggtcacgggaacagatttggatggtggaggtacaggagcagctttctttaccttctccctttcctcgtcttcatcttcactgctgctgctggaagaggaagattcagcatctcctagcttctggctgtgattgtgcggcaccaaagcggcaaacttgcaatgcaaatgggcagcaaaccagtaggccggttggaccgctttcagtaactcctccagtggctggctacccagcttcccgctttccatgtctgcagcaaaaaatggtttcttgcggagcagttgcgccttgtttccgtattcatagatgccggtgggccagtcgtgggacaggaaaatatcaactcgcccggaaatttgtttcagccgaaagacttctagctgccgcacatggtagacactgcgacacgtggaatcggtatacggagggaattcgtgatggccgcgcaaaaagtcgtgacccttgaagattccgcttattccagctatccgaacaccgtttacattgacgacgccggcataaccaaggtagtaaatatttggagccacccaaccgccgtatgggagctcctgcaggtaattggaggcctcatggttgccgccaatgaatatggtcagcactggtgctaccagctcgccactgtagtatctttaaaaataaatggattacctcctgatccacaagctgtcgaaactctactcacttgtaaaaggagcacatatccaggtacttctttggtacagccatcgtctgcaaatcctccagattccgggtggactgaaaatcgccacagcacaataacaagtcgatcttggtgccgccaaccttttcgatgccctctatggtgtcgtatattcgttccagctcgccatgtgcacatccttcgacagctattttcatggttaataaaggtaagttactactttataaataaaacttggttgtaaacaaatgcaaccggttgtccaaacaaataacgcgttctgatatcgcttatcgatcggcaattcagtgtgagaaaacgtctttggggaacgacaggatggacgctcttatcgataactctacttaatgaccgccaatatttaaactgctgaaatcttccggaaacaaagtctttcagcacttagcattattaaatataattatatatattagatgtacttataaaattcgttccctgaacggtttaaatacctcacaaaaaggtacacaaataagaaaaagatttctccagttcaaacgttaaaaattttttttttttatttttcaaaaatatcgcttcatttagtacagaatatacgtgtatgtgtgtataaagaaaatgtatgtgaaatgctctgcgttgaattctcattctctgacctagatgccaacttttttttggagttctacgggggcgtgctggtgggcacaatctcatttaatgagaccttctcgtcctgacgtgtttgtttttcgtttcgtttcgtttcgtttacatacaaagatttacaatggacttaagttatcataatttagttggccgccctggccacaaaataggaaataaaatataaatctacaataaatatagtgcggtctcgtcgccgctcgaccgatcgattttttaatctgattaatcgaccgattgtcgcagcatacatgggtacacggagtgtacgaaaaccaagagaatgccttcaaagccatcatcagcatgccagatgtattttgtttgatgtttttgttatttttggaaagaatatgagaaacaatcaagtcagaaatcgaaccaagtgtctggtgatctggtcaattcagtttcttaggagccgaacttaaacgacgtgggcacggcagtctgcggaaaggcgaagccaccttgcttctcgatcagcttcgattccttggcggctttgcgttggtcagccgtcaccaccacctcttgcagcgccttggcttgctcaggtgtgaggttggaggtcaacagcgcat

SEQ ID NO: 17594 - DNA, 1682 bp, DROSOPHILA
ttatttgtttggacaaccggttgcatttgtttacaaccaagttttatttataaagtagtaacttacctttattaaccatgaaaatagctgtcgaaggatgtgcacatggcgagctggaacgaatatacgacaccatagagggcatcgaaaaggttggcggcaccaagatcgacttgttattgtgctgtggcgattttcagtccacccggaatctggaggatttgcagacgatggctgtaccaaagaagtacctggatatgtgctccttttacaaatactacagtggcgagctggtagcaccagtgctgaccatattcattggcggcaaccatgaggcctccaattacctgcaggagctcccatacggcggttgggtggctccaaatatttactaccttggttatgccggcgtcgtcaatgtaaacggtgttcggatagctggaataagcggaatcttcaagggtcacgactttttgcgcggccatcacgaattccctccgtataccgattccacgtgtcgcagtgtctaccatgtgcggcagctagaagtctttcggctgaaacaaatttccgggcgagttgatattttcctgtcccacgactggcccaccggcatctatgaatacggaaacaaggcgcaactgctccgcaagaaaccattttttgctgcagacatggaaagcgggaagctgggtagccagccactggaggagttactgaaagcggtccaaccggcctactggtttgctgcccatttgcattgcaagtttgccgctttggtgccgcacaatcacagccagaagctaggagatgctgaatcttcctcttccagcagcagcagtgaagatgaagacgaggaaagggagaaggtaaagaaagctgctcctgtacctccaccatccaaatctgttcccgtgaccaagtttctggctctcgacaaatgcctgccacgtcgtgctttcctgcaagtggtagaggtacccagtgaccccatcgaaggcactccccgcctggaatacgacgcagagtggctagccatcttgcacagtacaaatcacttgatttcagtgaaggagaattattattacctgcccggaaaaaaggcgggagagtttacagagcgatcaaactttacccccactgaagaagaactagaagcagtgaccgcaaagtttcagaaacttcaagtccccgagaactttgagcgcacagtgccagctttcgatcccgcggagcagtctgattataagcacatgtttgtggatcaacccaaggttcaactaaacccccagagcaatacgttctgtgccactctgggtatagacgatccgctgtgcttagttttgttggcgaatggcctagatctgcctgcggtgggagctaccgaatgcaaggatagggaaacaaaaagttctaagctgcaggcggtggaagaagacgtggctgaaccattggttacgccaactaaaaggaaacttaacttatccctgccagcacctacaactgcagcagctgataccaccgatgaaaacgtgatagacctgcccgaggaggaagctgaagaagcaattatagcaacggaaacgcctcatgtagaggaacctgcatcagtgcccgctagtcccaatgtgaaaaaacttaagcgacgcaatcagaacatttaccaagcgcaagaagattaa

SEQ ID NO: 17595 - protein, 534 aa, DROSOPHILA
MKIAVEGCAHGELERIYDTIEGIEKVGGTKIDLLLCCGDFQSTRNLEDLQTMAVPKKYLDMCSFYKYYSGELVAPVLTIFIGGNHEASNYLQELPYGGWVAPNIYYLGYAGVVNVNGVRIAGISGIFKGHDFLRGHHEFPPYTDSTCRSVYHVRQLEVFRLKQISGRVDIFLSHDWPTGIYEYGNKAQLLRKKPFFAADMESGKLGSQPLEELLKAVQPAYWFAAHLHCKFAALVPHNHSQKLGDAESSSSSSSSEDEDEEREKVKKAAPVPPPSKSVPVTKFLALDKCLPRRAFLQVVEVPSDPIEGTPRLEYDAEWLAILHSTNHLISVKENYYYLPGKKAGEFTERSNFTPTEEELEAVTAKFQKLQVPENFERTVPAFDPAEQSDYKHMFVDQPKVQLNPQSNTFCATLGIDDPLCLVLLANGLDLPAVGATECKDRETKSSKLQAVEEDVAEPLVTPTKRKLNLSLPAPTTAAADTTDENVIDLPEEEAEEAIIATETPHVEEPASVPASPNVKKLKRRNQNIYQAQED

SEQ ID NO: 17596 - DNA, 4281 bp, DROSOPHILA
agaccatcgaagcccacaaactcggtgaccatcaggcagagtggtagtagaatatgtgccaatcatttggttggtgagtttgtggagcatgcggaggactgccacatgttttacctgtgcgttgagaacggggatgcagtcctggcttcctgcccaccaacgatgctcttcaattcggagagcagactctgcgattcggcgacaaatgtaaagtgcagaaatgaaacggatcccatagagactcctccattcgatggcggaaatggtgatggagatccgaataacatggtcacggatgccgccacttattgctccacgttggtggagcaacaacaatccagcgacaggattgtatatgtcggcagctcgagtagttgcagaaagtactatatttgctactatggacaggcgatcttgcaggagtgcagctcgcaattgcactggaatgcaatgacgggtaaatgcgatattccggagagagcccagtgcaccgtaggtggtcaggaggatatgccaacgaatggaaattccggtttcccatccggtggcaccgccatttcgagtgatctcattcactgccccgcctacggacagcatctgtatccccatatgcagcgatgcgagttctttatctactgcgtcaaaggacacgccagcctgcagcaatgtcctttctattacttcttcgatattgccaccaaaagttgtcaatggtcgcgcacggctcagtgtgtgcgagatttaaatttggcaccactaataaaatagaagttttaatatatgtagcatacaattttttgaactttgggagataccaaatgcttttagagaggtttcttttaaaagtactactacttttaaaactcccgccgattacagatgaaaaccagaactaatgtgtgtacacactaactttcgacaacaatgttcgatgaatcggtttcgataaagttgactatatggccactgttcttttttgcggtagtcagacacggtcatacaaatcccacaatataatgttaaattaatcatatttatacttatcttcatttaagtaaagcgaaatattcgattgaccctcgaagtaaacaacccaggtgctcaaaaatgaagctaacaaagttagattaatcggtgtctacgaattatctggaaacacaagcatttcccgtcatctaactcaaactgcccaactcgaaaaatcaacaatatttttgcatcgggccaaaggtgcattaaaaccggagcctcaagtctcgggcggcaggtaatttattcaagttcaaaacagccacccggggattctcctagacatcggttgccacaagaaaagaagaagaattaggcgtaatcttctagaaaattggtgatttcagccgagaatgtttgagaattttcgaggtatttttcggaaacggcgtcgctgcgagtcggacacaacaccgccgccaccgccgccgcaacccgcccaggaggcggagataataaaccgatatccggaagatatagaagccgatacgcccgagtccaatgatggctttgacgcctcctggaccgaaggctcttttcacagcccacattcagataggtaattgaattctgcgcattcacgcttcctcttctctcttattgcagcttcaaagcaaaaacagataaaattaagcttaagcaacagcatcaaacacttcgacacccactcgaaaaaaaaagcttaagacattccaaaaaaagtagccagcaaagcggctaaaaaaaaataaataagataaaaccaaaacccaaaacgaaacagtaggcagctatccaaccatcttgggtgacaaacacttgaccggctttttggagggcgacaggtttaaatcaaatctggagcagccgcaggatatggaagttgatgcgccaacaacgcaggaaaccagtgacactcatcatcatcaccatagtacttatcaccagcagctgcatcagatctcgcccagcgattaccactcggaggcatccatgaattttgatcatttgcaagacctgagggccgatgccatggcctcctcatccccatccggatccggaggtggtggcaatggcgggaacagctcctacggactcgtcgacgatagtagagctctggacaggttgttattccatcataactaaaaccaaatcagacacgaaaccaaaacaataccaccgattatattcacacaacctcgtagcgaaacaaaagttatacgtttcttatctattatttcttcacactaccagctaccagcttcattcgaatcttttgttccataatagtaatggtgatagcttaaagtatctgccgcgaacgcccacacaactctcaaaagagctttgtgtgcgagcgccttttcttgtagacatattctggttataatttcgtagctctataagtggtcagtcgatctgtagcagagcgatctaacaatctaacgttgcttgtctcgtttcatgacttaaccactgaaccgcaatcacacttaaccgacatgtgacagaccatttaacgccagcgagaggtaaatcttgaatttataataaccactgagcgtgactaacctttgagtgactcgcagatttgtcaccatactggatagtttggatgcacgtgtggagaagctgcgcaaggatgcactcaacctgcaggagaagaaagactaccttctgatgtccatggatctgatcaagagcaacgaaatgatgcagaacatgagcgaaggtaagtgacagtgattcttaaaactaatttgaaccctcattgttcatagctttactaaaatgtgtattatttcgaagtcggaagtaatggtttctgatgacaaactaagtaaagggttattcatagttgactgtgagctaatgttgtaccaccttcttttgcagctgaacgagaggagatcattttgtacctacaacgggtgagctctcgcttggccaccgtggagctgcgtgtgcgcactgttcgggacaactctcaggaggattcccttagccagataaatgtattgattgacagcatgatcaagatgggtgatcccgtgatcggacgccaacgatgccagttttacttaaacgcctgctgcagcagctcaatggatccatccggacacatggacaccgtgcccgaggccgatgttgggccggtcgacaagaagttcgagagcgttttgcttggctgcactctggacgatcagaagaacatcaagaagcggctccaggccttaatggcttatctgaataagcaaactgttagccattaattaaattgttttttggtctattaactattcatagcattattatcaaaccaaacgaaatacatcaccaagctagatgaaacgaataataaagaaagcagcatatacaccaggccagcagtgtttgaatcaagtaaaatataattttaatatttatattaacaaactaaatgttataagctaggaaagcacatgtccttcgcattcaagacccgatcacttaggacccataatgcatcattggaggtgaagaaaatctgctgaatgttcttcgatgtgatatatatgatttcgttgccctcggctgtgatgttggctagtttggcacatcgtacgacagctccgaatttggggataacatagtacaatgttccgaaattgtcgatgatcatgctgcgactgctgcccagaagactgcccaaatgtgtgagtttaatgctattgttaattggtttgcttgctaattcgcttttgccttcaatttccagtctgtccaccgtactgtatagatcaccatcctggtcggagagtatgagttccccttgaattccgaagatgaaatccactggcttgatgggaaacgattgattcatattctcgtacttattgctctccaaggataggcggtgccacgtctgctccaggatgtcgtaggctagaatttctggtacctttccaaggatgaagtaaatatggcgctcgtgctcgcatcccggactcttgggtcccatttggacagtcagaaagtgggtgtcattagcacctatatggtgtccacaatcgattctcaatagctccgcgttgttacgcatcagatcgaagacaaacaaacggggtgagcacgtgctgccgggaaatccgatgtccatgacccacagtcgactcagtgcatccacctgggaccagtgtgcctgttgtaccagagagcaatcatcatgatcccccatggaatgaacatcgatgtggggaaagacgacagtgggcatgggaaaataggaaaccg

SEQ ID NO: 17597 - DNA, 1129 bp, DROSOPHILA
caaatcccacaatataatgttaaattaatcatatttatacttatcttcatttaagtaaagcgaaatattcgattgaccctcgaagtaaacaacccaggtgctcaaaaatgaagctaacaaagttagattaatcggtgtctacgaattatctggaaacacaagcatttcccgtcatctaactcaaactgcccaactcgaaaaatcaacaatatttttgcatcgggccaaaggtgcattaaaaccggagcctcaagtctcgggcggcaggtaatttattcaagttcaaaacagccacccggggattctcctagacatcggttgccacaagaaaagaagaagaattaggcgtaatcttctagaaaattggtgatttcagccgagaatgtttgagaattttcgaggtatttttcggaaacggcgtcgctgcgagtcggacacaacaccgccgccaccgccgccgcaacccgcccaggaggcggagataataaaccgatatccggaagatatagaagccgatacgcccgagtccaatgatggctttgacgcctcctggaccgaaggctcttttcacagcccacattcagatagaccatttaacgccagcgagagatttgtcaccatactggatagtttggatgcacgtgtggagaagctgcgcaaggatgcactcaacctgcaggagaagaaagactaccttctgatgtccatggatctgatcaagagcaacgaaatgatgcagaacatgagcgaagctgaacgagaggagatcattttgtacctacaacgggtgagctctcgcttggccaccgtggagctgcgtgtgcgcactgttcgggacaactctcaggaggattcccttagccagataaatgtattgattgacagcatgatcaagatgggtgatcccgtgatcggacgccaacgatgccagttttacttaaacgcctgctgcagcagctcaatggatccatccggacacatggacaccgtgcccgaggccgatgttgggccggtcgacaagaagttcgagagcgttttgcttggctgcactctggacgatcagaagaacatcaagaagcggctccaggccttaatggcttatctgaataagcaaactgttagccattaa

SEQ ID NO: 17598 - protein, 248 aa, DROSOPHILA
MFENFRGIFRKRRRCESDTTPPPPPPQPAQEAEIINRYPEDIEADTPESNDGFDASWTEGSFHSPHSDRPFNASERFVTILDSLDARVEKLRKDALNLQEKKDYLLMSMDLIKSNEMMQNMSEAEREEIILYLQRVSSRLATVELRVRTVRDNSQEDSLSQINVLIDSMIKMGDPVIGRQRCQFYLNACCSSSMDPSGHMDTVPEADVGPVDKKFESVLLGCTLDDQKNIKKRLQALMAYLNKQTVSH

SEQ ID NO: 17599 - DNA, 4942 bp, DROSOPHILA
cgctgatcgattcgcttggcaacccgttttaacgggacaacgctccataaaacaccagccaatacaaaactatactatatatactcagatacaaataaagcaaattctgaaactgcagctggagttttatctccgttcacatcgcggaagtcggcgaggggtgtttcaaaaatatgaccctcacacccacgaggcggaagtttgccgcaaacagacattcgggaaaataattaaagcaaacaaataatgcatttacatgcatgttccgtgggcacatcaaaatgctggctctttgtagagaattttaaattattggcgatcgggaattatatgaaaaaataacttacacctgtaaaacttttcttttcctttttgttgcttaaaaagaaactcatttcatagtgattgtgggtttcatagcaagtttacaagctcttgattctcttatcaatacatattttctaatgataagtatcagcgaaactgttatgacatttgtggcattgaattcttttatagtttccctgcacatttatttatgtatttccccaattggcgtgtaacatagcaaaaagaaaatcaatcaaattcaatgctaaagggatttcttgcctgcagcctaaattggcatgcgaaccggtcttgtttacaaacaaatagtacgtgaaattataagtagaggcagtaagctgataagagcgcgttacgaaactgtttcgaagaagaacagcagttggccagcagctgataagaaggtgagacaaagaagcaaaaatgccacgctgcgataagcgtggcgccttaaatcgtaaagttcttttaactgatgtatttcggtaacataggctaatagcgaatttaaattggcgcccagtagtattgggtgtttatcgattgacattcagggctacctgcctcgagaacagaagagctatcgataggcaggttgtacagggattttttagtgataaagtagagtggttttttctgcgtctttttccacggaagctgttagttaaatgaaaagtaatttaattgcagcaaactgtggctttaattaaaaaggtttctctgaaggtaaaaagtactttttccgttgaatgcaattcttcaaatgtgaacatgcttaagtgaaacgcgtgaaattccagagatttgcccattttggcaatataggtgttgttgtttttgtgctgcgatagcgctgcgcagatcgtcttcttggctgaaaatcaaccggatctggctagaaggccgccaagcgagcagagcttaaagccaaaagacacagattgatcatttctatatgtttttgcagtgtttcactcgccgtgatcagaaaacgttgtacaccaggtgcaacaggtgccgttgttcgcaagtgaaaaccagttgaaagcaactaaaaaagaaaagcccacagaatgccgcccgtgcagtaagcagaatgttccgccccactttcttaacgtccttgtcttcaaaacgcccacatattgcatcatttggcagcataataatcatcgttatccattcgcacaaataagcatttcgctaattaataaaaaaatataactaattcaggctagcagtgcctatcattcatgccctaatccagcgttaaccctctgccagtgatggtggtgctttggacccccattcaatgcaattttcctgccagatgtttactccatcgatgacgtcatggtcatattcaaatttatttttaaacgccgccactcgagtgtgtgtgtgtgtttgtgcgagagtgcgtgtctgtgtattgtttactcttcgtatttttgtgtgtattcgtcggatttgattatgatgagtgggccgctgttgtgttggcggcaaacccaattccaattggatgcttgaatttgtaaccccttttggaggccaaggaatgttcaatgactcaaccagtaatggggagttgatagttacatcttattatatatattgtttatatacaaacttttcaaatggcgctcctgcttgtaataattacttcaattactcattatagccattcattgttatccagcttaaagcgaatatgatagttcttcgtatatattttatatatgtatatataacctgttccgaaacgatatatcaccaagccatcacatctgcagcgtatcacgcttgatatccaactgccatgcgacactctctgtaatgaaagctaaacttccacggaatgccagaaagctttttggctgtgcattcgaaggaaatatgattcagacatcgtcaacagagccggcaagcgataagtctcattgttttgtccagtttctcatttcacgccctgccctaaagtcgtttttctttgcgctcaagctataaccatgatgtactctaaggctgaagtgtaatggcctctgaattggttagttacttaccaacaactgatcctgatcttcttcttaattcacagagtccaggcagcgaacatgtcgctgggtgccatgcattgtacgcgatgtgccgacggcttcgagccgactgagaagattgttaactccaatggagaactctggcacacccagtgcttcgtgtaagtaaacctcaatgtagttgtttcactaataccctcactaataaacattttctagatgtgcccagtgcttccgacccttccaggatgggatattctacgagttcgagggccgtaagtactgtgaacgcgactttcacgtgctcttcgctccctgctgcaacaagtgcggcgagttcgtcatcggacgggtcatcaaggccatgtcagctagctggcatccacagtgcttccgctgccaattgtgcgccaaggagctggctgattgcggattcatcaagaaccagaaccgcgccttgtgtcacgagtgcaatgccaaggtgaaggcggagattaccggccgctatgtatgccaaaaatgccagtaggtttcaaaggctttaggtgaaaacatgttgctaattactctgcttttcagcggcctcatcgacgaggagcctttgcgattccggggcgaagtgtaccacggctatcacttcagttgcacggcctgcggcacagagttggattccactgctcgggaggtcaagagccggccaggattggctgctaacgatatggtgggtttttttttctttagcaaataagaagcaactgaattattattccattatagaacgaactgtattgtctgcgttgtcacgataaaatgggcattcccatatgtggtgcctgtcgtcgtccgattgaggagagggtggtaacggcgctcggaaagcactggcatgtggaacatttcgtgtgcgccaagtgcgagaaacccttcttgggtcaccgacactacgagaagcggggattggcctactgcgagacgcactatcatcagctctttggcaacctgtgcttcgtctgcaaccaggttattggaggcgatggtgagtaacttaattgaactatattctgggtttatttaatgcgctcattccataatgccaacagttttcactgccttgaacaaggcctggtgtgtgcaccactttgcgtgctccgtgtgcgacacgaagatgacacaaaaatcgaaattctacgagtacgacgagaagccggtgtgcaaaaagtgctatgaccgatttccaaacgaactcagacgacgtctgcgcaccgcccacgagatgacaatgaaaaagaacacctaatgccttggagcgagtctcagatccacaccaaacagtgcctttgtcgttgtagacccgctttcactaccatttttaacatttgagaaactaaaaccaaacaaactaaaacctcttgtgcatgtcctttccgtctgttgtaatccggttgtgtgtaacttaaattttaaatcgagaatcaacggcatcaatagctagggaacataacattgtgtattaaaagcctttaacgttgttatttaatggaattttatttatatataaatgtttttaaaattataaaacgtaatgcttattcgcaataacttcgtaatgtgtttgacccgatttagttgtggtgtcaagtaaatggcatttgatgcacttaaaatttacaagctcaacagcttctgaataagacttcccgatttaattacggctatatggttgatatatttgatactatcaatatgaactgactgatggaccttcaaaacctcagccagataggaaacctgtgctgcattcgggttgtgcgggaattctataaagtgtttgttcaaatgttatgctcaagacaaatgtttaatatccataccgtcaatcacgcaaaggtttgtggcacagggagcggtgaagtctaatggatagcgacggatatccatttcggttatgtcctctacattcgtgtaatcgaggtacattacccggtactttgtctgctgccgtggaacaactataatctgttccactttgccacgataccaggaaccctcaaatctggcaagcacatattccctgacactgtcaaaaatgttaattaaatataaacttacattggtatggttatagtatagttacactggcttataaggctcgcagtctgtaatttctgataaacgagagtgcaaggcggaaaattcggaggcgtaggtgctgtcaaaggccccaaaaatacctcgatttttttttgtactatccacaacgatgagatcaatgccttccttagattcgattgaaaatctacgcatctcaaaaggctaataaataaattaataaaatgtggctctcaatgagaatttatattatcaactcacaggttttaggacatgttcgtttttcgacattacgattccatttgtttgggcattagttttatggataacgggaagttccaaattttttttatggtttggaagttgtaacggataattagcttttggtgttaagcattgtgttaaggaatgttttacgtctt

SEQ ID NO: 17600 - DNA, 1335 bp, DROSOPHILA
cacggaagctgttagttaaatgaaaagtaatttaattgcagcaaactgtggctttaattaaaaaggtttctctgaagagtccaggcagcgaacatgtcgctgggtgccatgcattgtacgcgatgtgccgacggcttcgagccgactgagaagattgttaactccaatggagaactctggcacacccagtgcttcgtatgtgcccagtgcttccgacccttccaggatgggatattctacgagttcgagggccgtaagtactgtgaacgcgactttcacgtgctcttcgctccctgctgcaacaagtgcggcgagttcgtcatcggacgggtcatcaaggccatgtcagctagctggcatccacagtgcttccgctgccaattgtgcgccaaggagctggctgattgcggattcatcaagaaccagaaccgcgccttgtgtcacgagtgcaatgccaaggtgaaggcggagattaccggccgctatgtatgccaaaaatgccacggcctcatcgacgaggagcctttgcgattccggggcgaagtgtaccacggctatcacttcagttgcacggcctgcggcacagagttggattccactgctcgggaggtcaagagccggccaggattggctgctaacgatatgaacgaactgtattgtctgcgttgtcacgataaaatgggcattcccatatgtggtgcctgtcgtcgtccgattgaggagagggtggtaacggcgctcggaaagcactggcatgtggaacatttcgtgtgcgccaagtgcgagaaacccttcttgggtcaccgacactacgagaagcggggattggcctactgcgagacgcactatcatcagctctttggcaacctgtgcttcgtctgcaaccaggttattggaggcgatgttttcactgccttgaacaaggcctggtgtgtgcaccactttgcgtgctccgtgtgcgacacgaagatgacacaaaaatcgaaattctacgagtacgacgagaagccggtgtgcaaaaagtgctatgaccgatttccaaacgaactcagacgacgtctgcgcaccgcccacgagatgacaatgaaaaagaacacctaatgccttggagcgagtctcagatccacaccaaacagtgcctttgtcgttgtagacccgctttcactaccatttttaacatttgagaaactaaaaccaaacaaactaaaacctcttgtgcatgtcctttccgtctgttgtaatccggttgtgtgtaacttaaattttaaatcgagaatcaacggcatcaatagctagggaacataacattgtgtattaaaagcctttaacgttgtt

SEQ ID NO: 17601 - protein, 335 aa, DROSOPHILA
MSLGAMHCTRCADGFEPTEKIVNSNGELWHTQCFVCAQCFRPFQDGIFYEFEGRKYCERDFHVLFAPCCNKCGEFVIGRVIKAMSASWHPQCFRCQLCAKELADCGFIKNQNRALCHECNAKVKAEITGRYVCQKCHGLIDEEPLRFRGEVYHGYHFSCTACGTELDSTAREVKSRPGLAANDMNELYCLRCHDKMGIPICGACRRPIEERVVTALGKHWHVEHFVCAKCEKPFLGHRHYEKRGLAYCETHYHQLFGNLCFVCNQVIGGDVFTALNKAWCVHHFACSVCDTKMTQKSKFYEYDEKPVCKKCYDRFPNELRRRLRTAHEMTMKKNT

SEQ ID NO: 17602 - DNA, 7978 bp, DROSOPHILA
tagtttctaagaacaaactggaccatctaaaccaaaacttgaaagccatattgcagtagtcatgtaatcgcatatataaaatatgtatgtttatatatttaatgcaaagagatgttgcgtgcggtagattttaaatgtttgctctctttttatgaatatttaaaatggcatatatctgtgtgactatgtctagatgaaaacgctactccttgctatactgaccactactctttaaaagcttaactgaaacttgctatactgaccactactatctaaaagcttaacacagattatttaaacattttcttattttaacttggtaattattattttactaaataatatttagacctcgtaaataagtaatcaaaaatgtatatagtggcgccatcggaaactaaagtcggccgctaccagaatagtagttcggaagtagaccgtaaaggtggagccactatacatgaaatgctcagcggagtttttgttcaaatttgtgtagaaataggatagaaatgcggaccatgtagaatccaaatagcagctgtggagatactgaaaaataatgccgattaaccaaacacgttatttttaaatattcttcttattaagttagtacttatgtattatcatgagccaaaatatgttaaaaaatcttagttaattaagtaatcgaacctttttagtgtactgctttttctattaatattaaaagatatattagaagtattcctgttcttgatcaagacctctgaaagtctcgagaactaaaatgcctaaaaagtttaagtacgttgtgtaagtttgtactagagaaatattggagccaaagacaatgttcttactttataaaataactgatagatattattcttatcaatgtcgaccaatttgaaatgaaagtaatcgggcaatcgagaaatcgtggtagccaccatcgatagtacatgtacctacaaatggtacatgggtttttgtcccatccgcagtctggtcacatcggtcatgtcacaaatttcgtaaacaaaagaatcgcgaaattgctagtaatagttttcactgacttggtctgctggtcgggtaatgtcacaaaagtagagtagaaaatccagccatggaggtgttccagaccgactcgcactatatcttcgtgaagcgggacaagagtttgtggtggcaccgaaggacgtctgagttctccataaaagcaggtaaattacaggtctctaaacacaattgactcaaatgaatcgcatcgtatttgtgtgggtgtcgcaatgttcatcgtttatttaataatcggaggtcaatattgctacaaagttcattcagataagtggatgtatcatacgcttaaaatgagcaattgagcgacttcctgaaaatggtcatttgttttcagtgtgtatgtgtcacacactgcgacgtttttagatatttcaaggacgcaagccttaaaagattcatcggtcatgaataatcccggaaagcgggtttctccagaaccccatctaatcgaattactaattcagttcaatctcgaaatttggcagtagctggttgacagctcaatgcttttcaagtttgattcattgcatttcattccattaactaaaaacttcgtttcgcctaaacttattattccccatcgagttgacatcctgctgttcctataacttaaacaatcaacagtcgacaatgcgtctgcaaccgttaattgcgtgtttagtgcgcagcaattacatttggatcaatttggcgacacgcaacttgcctctattaacggactgtattgggatacaagtcttcggattccaggtccttggggatggtcacagtttgtttggcatgactcatccgccgcgtgacccctgacccatacgcagcccataaatctttgccaaggtcacagcagctgctccgcccgtcaaatttcattgtttgttgaaaagcgtgtgtgctcacgatgaaaagtgttttgccaccaaaatcaacttggtctaatttataagggccacacttccatatcgatgtttagggccagcagaggaaagcgtaaattatgggttccagacagtttccggcgctatctcatttgggagaaccagataaacttgactgcaagataagattatgaaggggtctcgcagcaagtcgctttaaaatgcatgagcaacttttaaacgtgccacatataaaagaattccaaggatgcacgtatccggcacgtaaagtgcaattgcatattgctgtttttagctgcagcagtgggctgtgtgggtgcctttcagattcgctgcacagtaatgagcggttgtaaacccaaggggaaatcattccacacgcaacgccccagatgcaaatgtgtaacctgaaattacaggctttgtcacttaagggcagtcctcattagtcggcggtcaatattcgtgctcacccaacgagtaatgctctagttatttgtataagctttgccagttgtttattctgagagattgttttattcagggggcgtacgctaatcaaatcccaataaaccctaacgagcaaaaacatggtcattaggcagatgacatacctacaaatcattcataaaattgtcggacaatttattctgacatttttgtattcggactttgggaaggagattagggatcactgcaatcttattgaatcaatacatatgtgcatatttagttacaaaatatgggattttccattaaattaaccactattaaccattattaatacgttaaaacctttgagacttgtttaaacggattataagtttcaaatttgaattcctataatttcagtaataaaaagttgagttgtaatgccttgagtatattttatttccaggatgggatctcagttctgtggacgacatagaatgcattggcgtgacacacggaattgttggtgtaatctcactgcccaatgtctatgaaccccatttagttgtggtaaaggaggcttcggcagtgggcgttctatatccaccacacttggtgtacaaaatcaagtcgatatgcattctgagtgccgacgatccggacaccgatttgcccaattgcaccaagcacaccaagtgagtttatacaacaggttatgttccttagtaattcatttatatttttaaccaggagcaaccagtccacgcccacccacagcgtctccacctccaacaacaacaatgccagcgttccgtcgagcggcggaggctcctcaaagagcaccaaactattcgaaggcatgaacaagacgtggggcgccgtaaagagtgcaggcaacactattaagaatactacccagcaagctgcgaatttggccaccaagcaggttaagtcatctgtgggcattcgggagcccaggcatattgaacgccgcataacggaggaattacacaagatattcgacgagacggacagcttttatttcagcttcgactgcgatatcaccaacaatctgcagcgccatgaggccaaatcggaggaaagtcagtctcagccggatgagagattcttttggaacaagcatatgataagagatttgattaacttgaatgtatgtgtttcgaaaattcgtgcccctggcttaaaatactaaaccgctttattcgcaggacaaaacttggatactccccatcattcagggattcatgcaagttgaaaattgtgtcataggcaatgaatgcttcaccttggccttggtttcgcgaagatcgcgtcatcgtgcgggaacacggtaatactttttagcttaccggatccaattaatttattaaatattattcctacttaacaacagctacaagagacggggcgtagacgaaaagggaaactgtgccaattacgtagaaacggaacaaatactctcattccgtcatcaccagctttccttcacccaagtgcgtggatctgtgcctatctactggagccagccgggctacaagtatcgcccaccaccacgcctcgatcgaggggttgccgagacccaacaggcctttgaactgcactttaccaaggaactggagacctatgggcgggtgtgcatcgtcaatttggttgagcagagcggaaaggagaagacaattggagatgcttatgcagatcacgtgattaagttgaacaacgaccgattgatatatgtaacctttgactttcacgattactggtaaaatgcaattacttaaaactgatctgatcatctgataacatatatacttcttactctatttgtttagccgcggcatgcgcttcgagaatgtgtcggctctaatcgacgcagtaggccctgaggcaggtgcaatgggcttccactggcgggatcaacgtggaatgatatgcaaccaaaaatccgtgtttagggtaaattgcatggactgcctagatagaacgaatgtggtgcaaacggctattggcaaggctgtactcgaatctcagctagtgaaactgggcctctcgccgccttatactcccattccggagcagctgaaatctccgtttatggtgctatgggcaaacaatggcgacataataagtaggcagtatgcaggcacaaatgcattaaaggcaagtagataaacatcgaaataatcgagttgtccactaaaaatataattaaattcactacagggagactatactcgcaccggtgagcgcaaaatcagcggtatgatgaaagacggcatgaactccgccaatcggttcgtataaaaattctgagtacccacctttattgtttttgttgctgccttacatttgttccattttccttatcttgattaatccacttgtcatagtcatattcaaacttaatcgattaataataccctttttgctattaaaattaaaatagactatcggccattctgctaattatgggtaattgggcgtccaatcaatcaaaactttaatctcaatagccatgtcatgcgtttaaattttttaaaccgtttctaaatagtactcatatgctttactaacgctgcatgcctgtttcttcataatcaaaagagatcaagtttacgttttcgtctaaaattcaaacccaatgctaagcaatgggttatctttctaacaccataatactatttcaatgctcagacccgtagctaatgccgtgcccaacttcttcgtagctttttcatacaaaactttgcggactcgtttcgccaatgcatcatcgatctgatgcagggccagttgctgcgggcagaagacctgcaggaggacgaggtcctaagtaccattctccagatcctcacaccagaaacacggcccccgcttcacggctattataatcctggtgtgctgggtcccgagctacaactcctcgaatccatcgttacgaccaggtgcgcagctcaaaggcgataccaagctggagtagatggccatgcaatcgagtccagacatttaaagtttatagtttcttcaattgctatatatcctttgattattttattacaaaaggtactcttcccacatttaatacttatcctttcgtatcattcgcacattcgctttttttttaacaggcggtatattacgttttaattaatgggttttcattattttcagttattatttggcgcgatttaaggactcgtatcgacaggccaccatagatttgatgctaggcaaccaggtctcctcggagtcactcagtgctttgggcggacaagctggcccagatgaaaatgacggaacggaaaatgccgagcaagccaagttgctagtggaagattgtcgtcgcctgctgctgggaactgctcagtatcctgttggagcttggggactaatagatgctgacccaaggttagttaagaccacttacttttaattttctggatatttataaacataccaactttattccgtagctccggcgatatcaacgaaacagaggtagatactattttgttgctcacagacgattgctatattgttgccgaatacgactcacatctggacaagattgtgcgctttgagaaggtgcaactgacgcaggtgcgtctcatagagttgggcatgcatcagcagacgaaaatttttcagggatccgctccagcgcatctttgtctgcgtctgaactacagtgtagacgagcaagagggctactttcacatgtttcgctcggccaatctaagattctttaacaacatggcctatgtgatcaagacgcaggaggaggtagccgagtccatgacttcaattgtcgagatgttccgcattgccctggataatgcagggaatacagaagtacgatacattacgggtggggtgctgcagcgaagaaagagcaagttgcccactttggatgttccaagaggcatgccacgcaacctttccgaatctcagctggtacagttaagctcaaaggcactttcaaatatggcgggacagttctcgaaattgggacagaccttcaaaaagccgcaagcccatcccagcagcctggcagctactatgaatccacaagtaatgcgtcagagagacagcgaaatagaatctggccaggaagcggaaaaggcagttttcacactgggtcgcaagcatcgaaattccaacagcgcaagcagcaccgataccgatgagcatgacaacagtttgtacgagcccgaggtggactcggatgtggagatagctatggacaagtccaactacaacgagaacgcctttctgccgtcggtgggtattgtaatgggtaatcagaaggaggactcgcctagctcctccgatgaaattcgacatttggagcagaaggatagcatgtgcaaaaccacagaggatgtgctaaccatttccataacctccgtgacggaccacgttggtctgcccacgggccttctggaaaatgcaccggccatccgaccgattacgccaaatccgttgatctgtgtggaagctcacgaagcatttgatgacagggaggagggggtgaagcctgtgtccaggtctgtattctacgattgatcgttgatctttggttgtagagatcatttcgtttagaactttttgttttgtcttatgttgttaagtagccgaactatttatagtagatattgtaaatgtgtttatgtaacatttggtcagttttattcctcaagctcaaagtattattacgacccttctatacgttcaatgttttttatctttacaataaatacctaagactagcatgtattattgtacaaaaaaaaacaacagtgcctgctccataccacatacactcaggctgtttctggccaaaaatcgctcaaaataaacagaactagttaaagctaagccgtgtttgtactgtaacgcgttttcagtacgtccgccagggatctcagccttcccggtttgcccactcacccggaagccaacaagctgaagcagcttactagcccgctctcgaagctggccaagaacattggcttgaacttggacccccgcaagatagccaccaaggtatagaaacaaacttacttgcatatatttgtttatatttaattaaaccattccgaattcttttagaccggagtcctctcacctaccatcctctccgccgagaattctccgccggagcgcgacccaagctcacgggatcacttgctggagctgtgggaggccgagaagtgcaaaaccaagttaatagccttgtaagaaggtcactaggcgggcaatagccgaagctacacactttttaataaataagtgcaagtgatatatttattttcgaaatagaatgcaagaaaacgaaaattgttctacttgttgttcgaggcacttccattgatgccatattaggcataaagcaaagattaaattgtatcgtttttgtggttcttataatgtagttgatatacgccatatttgtgattgttatagcaccaagctgtagtgagtttatagatttttgggcaacccgaaaaaagattgggtatattataatgaacaccaagaataagctgcacatttaatgatcgttt

SEQ ID NO: 17603 - DNA, 3076 bp, DROSOPHILA
tcatgtcacaaatttcgtaaacaaaagaatcgcgaaattgctagtaatagttttcactgacttggtctgctggtcgggtaatgtcacaaaagtagagtagaaaatccagccatggaggtgttccagaccgactcgcactatatcttcgtgaagcgggacaagagtttgtggtggcaccgaaggacgtctgagttctccataaaagcaggatgggatctcagttctgtggacgacatagaatgcattggcgtgacacacggaattgttggtgtaatctcactgcccaatgtctatgaaccccatttagttgtggtaaaggaggcttcggcagtgggcgttctatatccaccacacttggtgtacaaaatcaagtcgatatgcattctgagtgccgacgatccggacaccgatttgcccaattgcaccaagcacaccaagagcaaccagtccacgcccacccacagcgtctccacctccaacaacaacaatgccagcgttccgtcgagcggcggaggctcctcaaagagcaccaaactattcgaaggcatgaacaagacgtggggcgccgtaaagagtgcaggcaacactattaagaatactacccagcaagctgcgaatttggccaccaagcaggttaagtcatctgtgggcattcgggagcccaggcatattgaacgccgcataacggaggaattacacaagatattcgacgagacggacagcttttatttcagcttcgactgcgatatcaccaacaatctgcagcgccatgaggccaaatcggaggaaagtcagtctcagccggatgagagattcttttggaacaagcatatgataagagatttgattaacttgaatgacaaaacttggatactccccatcattcagggattcatgcaagttgaaaattgtgtcataggcaatgaatgcttcaccttggccttggtttcgcgaagatcgcgtcatcgtgcgggaacacgctacaagagacggggcgtagacgaaaagggaaactgtgccaattacgtagaaacggaacaaatactctcattccgtcatcaccagctttccttcacccaagtgcgtggatctgtgcctatctactggagccagccgggctacaagtatcgcccaccaccacgcctcgatcgaggggttgccgagacccaacaggcctttgaactgcactttaccaaggaactggagacctatgggcgggtgtgcatcgtcaatttggttgagcagagcggaaaggagaagacaattggagatgcttatgcagatcacgtgattaagttgaacaacgaccgattgatatatgtaacctttgactttcacgattactgccgcggcatgcgcttcgagaatgtgtcggctctaatcgacgcagtaggccctgaggcaggtgcaatgggcttccactggcgggatcaacgtggaatgatatgcaaccaaaaatccgtgtttagggtaaattgcatggactgcctagatagaacgaatgtggtgcaaacggctattggcaaggctgtactcgaatctcagctagtgaaactgggcctctcgccgccttatactcccattccggagcagctgaaatctccgtttatggtgctatgggcaaacaatggcgacataataagtaggcagtatgcaggcacaaatgcattaaagggagactatactcgcaccggtgagcgcaaaatcagcggtatgatgaaagacggcatgaactccgccaatcgttattatttggcgcgatttaaggactcgtatcgacaggccaccatagatttgatgctaggcaaccaggtctcctcggagtcactcagtgctttgggcggacaagctggcccagatgaaaatgacggaacggaaaatgccgagcaagccaagttgctagtggaagattgtcgtcgcctgctgctgggaactgctcagtatcctgttggagcttggggactaatagatgctgacccaagctccggcgatatcaacgaaacagaggtagatactattttgttgctcacagacgattgctatattgttgccgaatacgactcacatctggacaagattgtgcgctttgagaaggtgcaactgacgcaggtgcgtctcatagagttgggcatgcatcagcagacgaaaatttttcagggatccgctccagcgcatctttgtctgcgtctgaactacagtgtagacgagcaagagggctactttcacatgtttcgctcggccaatctaagattctttaacaacatggcctatgtgatcaagacgcaggaggaggtagccgagtccatgacttcaattgtcgagatgttccgcattgccctggataatgcagggaatacagaagtacgatacattacgggtggggtgctgcagcgaagaaagagcaagttgcccactttggatgttccaagaggcatgccacgcaacctttccgaatctcagctggtacagttaagctcaaaggcactttcaaatatggcgggacagttctcgaaattgggacagaccttcaaaaagccgcaagcccatcccagcagcctggcagctactatgaatccacaagtaatgcgtcagagagacagcgaaatagaatctggccaggaagcggaaaaggcagttttcacactgggtcgcaagcatcgaaattccaacagcgcaagcagcaccgataccgatgagcatgacaacagtttgtacgagcccgaggtggactcggatgtggagatagctatggacaagtccaactacaacgagaacgcctttctgccgtcggtgggtattgtaatgggtaatcagaaggaggactcgcctagctcctccgatgaaattcgacatttggagcagaaggatagcatgtgcaaaaccacagaggatgtgctaaccatttccataacctccgtgacggaccacgttggtctgcccacgggccttctggaaaatgcaccggccatccgaccgattacgccaaatccgttgatctgtgtggaagctcacgaagcatttgatgacagggaggagggggtgaagcctgtgtccaggtctgtattctacgattgat

SEQ ID NO: 17604 - protein, 987 aa, DROSOPHILA
MEVFQTDSHYIFVKRDKSLWWHRRTSEFSIKAGWDLSSVDDIECIGVTHGIVGVISLPNVYEPHLVVVKEASAVGVLYPPHLVYKIKSICILSADDPDTDLPNCTKHTKSNQSTPTHSVSTSNNNNASVPSSGGGSSKSTKLFEGMNKTWGAVKSAGNTIKNTTQQAANLATKQVKSSVGIREPRHIERRITEELHKIFDETDSFYFSFDCDITNNLQRHEAKSEESQSQPDERFFWNKHMIRDLINLNDKTWILPIIQGFMQVENCVIGNECFTLALVSRRSRHRAGTRYKRRGVDEKGNCANYVETEQILSFRHHQLSFTQVRGSVPIYWSQPGYKYRPPPRLDRGVAETQQAFELHFTKELETYGRVCIVNLVEQSGKEKTIGDAYADHVIKLNNDRLIYVTFDFHDYCRGMRFENVSALIDAVGPEAGAMGFHWRDQRGMICNQKSVFRVNCMDCLDRTNVVQTAIGKAVLESQLVKLGLSPPYTPIPEQLKSPFMVLWANNGDIISRQYAGTNALKGDYTRTGERKISGMMKDGMNSANRYYLARFKDSYRQATIDLMLGNQVSSESLSALGGQAGPDENDGTENAEQAKLLVEDCRRLLLGTAQYPVGAWGLIDADPSSGDINETEVDTILLLTDDCYIVAEYDSHLDKIVRFEKVQLTQVRLIELGMHQQTKIFQGSAPAHLCLRLNYSVDEQEGYFHMFRSANLRFFNNMAYVIKTQEEVAESMTSIVEMFRIALDNAGNTEVRYITGGVLQRRKSKLPTLDVPRGMPRNLSESQLVQLSSKALSNMAGQFSKLGQTFKKPQAHPSSLAATMNPQVMRQRDSEIESGQEAEKAVFTLGRKHRNSNSASSTDTDEHDNSLYEPEVDSDVEIAMDKSNYNENAFLPSVGIVMGNQKEDSPSSSDEIRHLEQKDSMCKTTEDVLTISITSVTDHVGLPTGLLENAPAIRPITPNPLICVEAHEAFDDREEGVKPVSRSVFYD

SEQ ID NO: 17605 - DNA, 2526 bp, DROSOPHILA
acaagcagggatagttcctccatcctgtaatcgccgctgagcgctgtgtcttgttacgttaatttaaccccttagtctatagtccttcatcatccgaacgttttgctgctaaaatataatttgtaaatgtacagaggcaaacttcttgctgatgaaacctgatttgagaagttggagacaaagttttggtagatgtaatcgctgtaaaaataaactcgtcatggaagatacgaatgtatataaaaacatgatcagctataaatgaaattggtgagtgttttcagttcagataagatacggtcccgaaagacaatcaaatatacaattaattgcggatagctaacgcattactataaaaaatatggaaatgctcagcaaatactattagtctcagtttaaatgccgtgcaatcaaaaaccatcaatcaatcgaagccggtgtgaattttcaagttgctgacctcgattattagcttttagttagcataggctcaggtaataaataaaagatttaatagcaattataataactagagaagtagaagcaaagcatttacatgtttttaatggcaaaccataaagattggttggatagtttaaaaaccattttggattatttatctatccaaacaagtctagtcatagacataaaaacaatgatgattcctaaccatacgtggaatgcaaacttgaaataggaaataatttagtttctctgacagacaattcgatttgagtaaaaggttattattactacttaaccagctgagaaagagtacccaataattaaatgatgtatggcgaatgtccatgttattgctacctactaataactaacaattaagataataaacattacaatgtctgaaaaattaaaatcgatccaaatttcgggaaaggaaaacaggcacaaactgcttttaaaacaaaattattattactaaaccaacatcattatatatatatttatatatatctaaaacgaggataaaatcatgtagttaacccttggcggcgatgcactggttgatcacctcggcgaggtgattgttctccagggcggcggccactcgttccttgtctgccagctgcttgttcaccgccagctcggaggcgtgggtgccgggcgttatttccacggtgaccttaaagcgaggtggcagcgagcggagcaacttcacccggatggagaggccaatcaaagtggccatcgagcaatggggaatcgtcggggtgaagctgatgtgcacggaattctggctatcgtttatccggattagatcttcctgcaccacatgcagctcctccagggtcaaaggatgttccgggtcattaatatttctgatgagatctgggaaatacgcgagtcataagatatattccttagctatcttctttgaactcaccgaaaatctctcgtttgtcaaatggatcgggcacgttttcgtcttcttcgttggcggttaataccctttccttgattctgtcgtagacattggggttgatgttctcgatttccgtgggcattttgtattgttcttttcttgaaaaccctttatttacacgtttttttggcgaagagcaaagagaaacaataagctatgtctttcagtgtgtccgcagtttttagactataagatacaaaataacaccacgtctagtttatggtgtgcacacactttttgggcgccaacattatttgaattcgaaattgatctcattttcatagtttcatctaacagagcatttaattagttatacatttatgcgcatcttacgctattaaagttagttaatgaaatctttttaattaatgacagtagccttttttaaggttggaattatttgaatacaaattcaagaaaatcagggcaattactagatcaatcaaatcacaacgtacacttccaggaaaacatcgcacaattgatatgtttacctgtcatcttacgtaaagggcgtaattacagacgcctcgcgatccatatttatgtgctcttcaaattagctgcgggaatacttaacttaagttagccgagcttaacttttttgcgagccagtgctaaatggccagcagatgtggatgtggatgagtccgtacttggctgcgctgctgactaagccttgagcccatttcgccggccaaacccgcttttattttccatatttttattccattttgccgcttttacgagaagcagcgttgccgagaagccggcgcacttgacgccgatttcctcgggttataattagccagacttatcaatatcaacgtagaaaagcagatttacattgtgaacgggtttccgcgcacttggcgtgcatctattcgcaattagcaccgaattacaaactggttaacagccgctgccaacggagtggagaagcctgcggtcgcccatttgggtttataaaatgggtcgccacttggctgagatcagcagtttgggtcacatctccaagcggtcagcatgaagtcggttgtaagtcaagatctcagttctcttgaagattatccctgagtttt

SEQ ID NO: 17606 - DNA, 471 bp, DROSOPHILA
atgcccacggaaatcgagaacatcaaccccaatgtctacgacagaatcaaggaaagggtattaaccgccaacgaagaagacgaaaacgtgcccgatccatttgacaaacgagagattttcgatctcatcagaaatattaatgacccggaacatcctttgaccctggaggagctgcatgtggtgcaggaagatctaatccggataaacgatagccagaattccgtgcacatcagcttcaccccgacgattccccattgctcgatggccactttgattggcctctccatccgggtgaagttgctccgctcgctgccacctcgctttaaggtcaccgtggaaataacgcccggcacccacgcctccgagctggcggtgaacaagcagctggcagacaaggaacgagtggccgccgccctggagaacaatcacctcgccgaggtgatcaaccagtgcatcgccgccaagggttaa

SEQ ID NO: 17607 - protein, 156 aa, DROSOPHILA
MPTEIENINPNVYDRIKERVLTANEEDENVPDPFDKREIFDLIRNINDPEHPLTLEELHVVQEDLIRINDSQNSVHISFTPTIPHCSMATLIGLSIRVKLLRSLPPRFKVTVEITPGTHASELAVNKQLADKERVAAALENNHLAEVINQCIAAKG

SEQ ID NO: 17608 - DNA, 4145 bp, DROSOPHILA
cgccatagatggcatcgcccttgtgctccttccacttgatcagctcctcattgcccagctgggcagcatgcgcttccttgaagttttcgctggcgcggtatgcccatggcgactcctcaatgactcgtttctcgaagccgaaactgccgcttagaatgactacgcgtctggcgcccttgaggagctccactagttccttctgaaaatgcgcggtgtggcgggcaacccatggcgcccggaattgcacgaccagtagcttatcctccgtaccctcgtacagttcgcaggaggagaccttctctttgggctcgtgctgataggcggagggtccgtagaccggaatcagggctggatgtgtgatggatccaattcgccggagttccttggacgcaatcaacaggtcacaggccagctgcgccgcgtttcccacgcaaatgctcggtatgattactgtgtgctctgctacgtccagagtggtacgcttgtcctttagaaacagcataattgggttaaatctcttggtgtccggaatgagttgaagatgctaattcaagtcaagtcaaaaatatgaaagtaatgattccagtgttggtgtgtttaccaattgacactgggtggcaactctggcaaggagcttaataaaagtgcggttcaaaaatcaaaagagataacttcgttgtttaaggtaaacaaattttatttacatttaaggacatttttttgactgctgcctacttatacttcgcatataaatgaatataagcacgtggccaagccattaaatttcaaagttttgtcttaaataaataaaacttaatttaaagcaagaaagtaattttataacacatattaattaaatattaaacatttttaaatatcaatattttatacattacattcgttactaacctggaaaaaagtgttgtttttgagcactcatttatcgatagccggccgcagacgttttgcagcactattctttagttttgctttgacaaaccaaatgttttgtttcccggcgcaaatatgtcgaattccgtgaatatatcagtggaaacgacttgcgagaaccagatacgtgagattggctacgatggcaccgaattgtatcagccgtatgtgtttccgctagccagcaagccctcttctcaatgatttattgggttctttgtttttttctccttaggccgccgactttgtcggaaagtctggcgaaatgtgcggcgcgcatagacttcagcaagacgtcgctggacgacctcaagaaggaggagaagtcggcggcagcggccgccgacgaggacaaggacgccactcagttccaagagagcctgtggccctgggatgcggtgcgcaacaagctgaaggatgcgctcacggagatatgtgtgctgtccgatgtgatctccattgccaaggacaagcgctatttagtgctcgatccactgctcgaggaggctgacgacaccaagcccattgtgcaggtgtacagccgcaagaaagccatctctcaggcagcccaagtgctcctaagtggcgctgaacgcctgcggaacgcgcacagcgagcagcgcaatcgcaatgtctcagatttccacatagaactactgcgcctgcgacagaactggcgcctgaagaaggtgtccaatgcgattatcggggatctcagctaccgcaccgcgggctccaagtttggcatgagcggtaccttcgaggtgaccaaagcagaagagaccggtgatgaggacacagccagctcatccaacagtagcagtagcgtatccggcaacaatggcatgcaacttaaggccagctccgcattgcgagtgattgttccagcggaactgcagggtgtcgcctacataaaggtgatcacacagaaggatcaggaggatttgtgcaccgctcagctgaatctgatgggtcacggacccaatataactgcccaggtgggtgtctggcagaagacactggagttcgcccagaatgtgctcttctgcaaggagctattcgctcagttggcacgtgaagctatccaattgcaggcaccaattccacatgtggtcatcggcaaccaaattcgcgccactctgctgcctaacattcaacttattatctcgttgtgccactcaaccaccttcgattccagccagccggcgccaattaacgatcatgatcatgttctggaacactcgctgcatcagcttctgcgcgaggtgcactacaagaactcacaccatccctttccccatccggccagtgcaccactgggacccactaagaagcgcatgctagccggtccgatggccgccgatcgggaaacgttgttggacatgaccaagtcacagaccatactcgaacagatcatcgcccaggcgcagcacattttcatgcgaaagcgaacacaatatgtgctcgatacgctggccagggatgtgaaggacccgcagatagtgtcgcattggaatgccatgaacagtccaaccatgtcgtgtgtgaagattaacattgtaacgcatggttacgatgccattggacgcacctcgctggtcattcacgtgaaggagcgctctcttaaatgcatttgtcgcgatggacgtgttatgcgactgtcctacgagccgcaggaacttcgcgacctgatcctctgccagatcaactctcaccagatctcctgcctgatcagtctagcgcgctgcatgtcctggaccgtgctgtcgaacagcaaccacttgggtatcggcaaggtggagccgctgggaaatgccagttcctgccttctggcatctcccaatagcgatcgcatgattgccgttcagattcgctgcgatccgcagatagatgttaaagtttatatagcgagaagtccacgacaggatttctttcccagtccactggtgccggaaaagctatgggagaatctgggaggcacattcaaggaggtgagtccactattggaaagcagtcgaaaaaaaacagagccattaattttgatttgtttctaggtgaggttcgacaaaatcgaaggcaagagctttctcaacaaaatggagtttctgatggcctcgctgacaagtaacacggcctgaaaacccgtcacatgcatacccactagattgtaaatcaaattagaattaattaaagtaaaaaaatttgtaatttacatacgagacttctgctattgcaatgtttagatataatctattgaggtgctttcagttcagtgcatcaggctgtagctgacgttgttcttccacaggcgtggctggtagttcatagactccggcgacatattgcgctgctgcatgatgctaaaggtgtcctccaggctgaccacattcgcccgattggtgctctgcagacagagagagatagagagttgtgtgacctccgtacacggattacttccctacgaaattgaactcacccagcgctccagatcgcagaagctgatgttgtagttctgtccgcttggctgcagtgtcatcacctccatctgatctgccagtggttgggccaggcgcagatagagtccacggttggtggaaaacaggacgggtactcgcttggctggcgctgatcctgcgcccgttccggcacctggaatctgtcggtaggtcgggcaatgattgagcgtagacaccgcctcctccggcagctgtgcatcgctggcgccgccaactgtccgcatcagacccatgcaagtgtaaaaacaggacgccactttgccgcatttatgggtctggtggccgtactcgatttactgatctcgctagcagccgccggatgaacttcgctgtatttgcatggttccacacacttctgctgaacctattgattttgtgcagcgccaagccaaaccaacgtcaacacgctgccagtgtccagtcgctgtgtgtatccagctcccaccatttgtatgggccacaatcgaacggccggttgccccgacaacctggtggtagccctacacccgttccctgaccgctcgctggtgttcattcattaggcatgtgcgtgtgccggaccaattgtctcagccagagccagataggcagatagtcaagccagccagccggccacacgcgtttctgcaaaattgttcaattactgccagcgggaactgaaatctctttgatgatgta

SEQ ID NO: 17609 - DNA, 2011 bp, DROSOPHILA
caaatgttttgtttcccggcgcaaatatgtcgaattccgtgaatatatcagtggaaacgacttgcgagaaccagatacgtgagattggctacgatggcaccgaattgtatcagccgccgccgactttgtcggaaagtctggcgaaatgtgcggcgcgcatagacttcagcaagacgtcgctggacgacctcaagaaggaggagaagtcggcggcagcggccgccgacgaggacaaggacgccactcagttccaagagagcctgtggccctgggatgcggtgcgcaacaagctgaaggatgcgctcacggagatatgtgtgctgtccgatgtgatctccattgccaaggacaagcgctatttagtgctcgatccactgctcgaggaggctgacgacaccaagcccattgtgcaggtgtacagccgcaagaaagccatctctcaggcagcccaagtgctcctaagtggcgctgaacgcctgcggaacgcgcacagcgagcagcgcaatcgcaatgtctcagatttccacatagaactactgcgcctgcgacagaactggcgcctgaagaaggtgtccaatgcgattatcggggatctcagctaccgcaccgcgggctccaagtttggcatgagcggtaccttcgaggtgaccaaagcagaagagaccggtgatgaggacacagccagctcatccaacagtagcagtagcgtatccggcaacaatggcatgcaacttaaggccagctccgcattgcgagtgattgttccagcggaactgcagggtgtcgcctacataaaggtgatcacacagaaggatcaggaggatttgtgcaccgctcagctgaatctgatgggtcacggacccaatataactgcccaggtgggtgtctggcagaagacactggagttcgcccagaatgtgctcttctgcaaggagctattcgctcagttggcacgtgaagctatccaattgcaggcaccaattccacatgtggtcatcggcaaccaaattcgcgccactctgctgcctaacattcaacttattatctcgttgtgccactcaaccaccttcgattccagccagccggcgccaattaacgatcatgatcatgttctggaacactcgctgcatcagcttctgcgcgaggtgcactacaagaactcacaccatccctttccccatccggccagtgcaccactgggacccactaagaagcgcatgctagccggtccgatggccgccgatcgggaaacgttgttggacatgaccaagtcacagaccatactcgaacagatcatcgcccaggcgcagcacattttcatgcgaaagcgaacacaatatgtgctcgatacgctggccagggatgtgaaggacccgcagatagtgtcgcattggaatgccatgaacagtccaaccatgtcgtgtgtgaagattaacattgtaacgcatggttacgatgccattggacgcacctcgctggtcattcacgtgaaggagcgctctcttaaatgcatttgtcgcgatggacgtgttatgcgactgtcctacgagccgcaggaacttcgcgacctgatcctctgccagatcaactctcaccagatctcctgcctgatcagtctagcgcgctgcatgtcctggaccgtgctgtcgaacagcaaccacttgggtatcggcaaggtggagccgctgggaaatgccagttcctgccttctggcatctcccaatagcgatcgcatgattgccgttcagattcgctgcgatccgcagatagatgttaaagtttatatagcgagaagtccacgacaggatttctttcccagtccactggtgccggaaaagctatgggagaatctgggaggcacattcaaggaggtgaggttcgacaaaatcgaaggcaagagctttctcaacaaaatggagtttctgatggcctcgctgacaagtaacacggcctgaaaacccgtcacatgcatacccactagattgtaaatcaaattagaattaattaaagt

SEQ ID NO: 17610 - protein, 642 aa, DROSOPHILA
MSNSVNISVETTCENQIREIGYDGTELYQPPPTLSESLAKCAARIDFSKTSLDDLKKEEKSAAAAADEDKDATQFQESLWPWDAVRNKLKDALTEICVLSDVISIAKDKRYLVLDPLLEEADDTKPIVQVYSRKKAISQAAQVLLSGAERLRNAHSEQRNRNVSDFHIELLRLRQNWRLKKVSNAIIGDLSYRTAGSKFGMSGTFEVTKAEETGDEDTASSSNSSSSVSGNNGMQLKASSALRVIVPAELQGVAYIKVITQKDQEDLCTAQLNLMGHGPNITAQVGVWQKTLEFAQNVLFCKELFAQLAREAIQLQAPIPHVVIGNQIRATLLPNIQLIISLCHSTTFDSSQPAPINDHDHVLEHSLHQLLREVHYKNSHHPFPHPASAPLGPTKKRMLAGPMAADRETLLDMTKSQTILEQIIAQAQHIFMRKRTQYVLDTLARDVKDPQIVSHWNAMNSPTMSCVKINIVTHGYDAIGRTSLVIHVKERSLKCICRDGRVMRLSYEPQELRDLILCQINSHQISCLISLARCMSWTVLSNSNHLGIGKVEPLGNASSCLLASPNSDRMIAVQIRCDPQIDVKVYIARSPRQDFFPSPLVPEKLWENLGGTFKEVRFDKIEGKSFLNKMEFLMASLTSNTA

SEQ ID NO: 17611 - DNA, 3422 bp, DROSOPHILA
ataaatgatttaaaccctaaaaaaaggtgttttattgtttttgagttggttttcagtagacacccgctactgagtatgttggcctggtaccaaaaatccaaaatttgccactaaaatgctaattttgtaagcaaaatttagagattttcggtttaaattaccaggcgaacaggaattccaggaggcgaccaacgattagttggttttcagtagacacccgctactgagtatgttggcctggtaccaaaaatccaaaatttgccactaaaatgctaattttgtaagcaaaattaacagattttcggcttaaattaccaggcgaacaggaattccaggaggcgaccaacgattagttggttttcagtagacacccgctactgagtatgttggcctggtaccaaaaatccaaaatttgccactaaaatgctaattttgtaagcaaaattaacagattttcggcttaaattaccaggcgaacaggaattccaggaggcgaccaacgattagttggttttcagtagacacccgctactgagtatgttggcctggtaccaaaaatcccaaaatttgccacaaaaatgctaattttgtaagcaaaattaacagattttcggtttaaattaccaggcgaacaggagttccaggaggcgaccaacgagaacagaaattccaggagataattattttcgataatttattgaaattcattccttagggctatgaaaaaaattcacttataagttaaacattaatagctagctgggacttctacaactatagatgattccattgatagttaactggtgggattgcgagatgcactacagctaatacattttccaaatataacgtatactccaaggacttaaagtacttaaatgcgagcgtgtaaaaaaaaaagaaagttgagccccctaaactattcacagataagctgacccaaaaactggacatacgattcggatcctcgcgttcaacgcatcaagagaggagtggacctttaggcggtggttactttggcggaggtgaaggcggccagctggaccttgagggcgtcgatctggcacaagagctcgatgttctggcgttccagataggcggccctgatggcgatctcatcctccttgatgcggcggcgatcgcgggacttcttggcggcagcattgttcttgcgacgcctctcgtagtatgcggcatccttaacctggctgcccgagctgatgcccgagtttgctgcagtagcgttagccaagttgctggagctgctggtggcggacttgctctcgaagttgcccgcctgggagtcacagtcgcttgactcctccgcagcagcgcgatcctcgctttcgctgttgttgtttgaggagctgccttcgttgacggatccacttcttgagttggtccttcgcatttttgggttggttacggtgcgcgatcctccgttggagctgcggatttgctcaagcactcgcttccggtattccgtgtagcgctccactcgcggattgtccaaaaggacatcagtggctgcgaaattggcagctatgaccaagggatcccggggaaaggccttgaagggacgggtgttctttcccgcctcgccgctgctggaggtggttggcgtggtggcctcaacagccggtgacaggggattctccagaacgtctatctgcatggtgctggcgttgctggcgggtcttggtgagttggtcgaagaagcggcagcagcagcggcggccgcagcagaggcggcagcaaaggtttgcagaaggttagcggttggtgtaaccttgggcggagcagcagtgggcgtggcttgctcctgcttgatgttgctgtagtaaaaagcgggatacagggaggctaattgttgctgctgctgctgttgctgttgttgctgctgatgttgctgctgttgcatttgggcggcatacagaagattgctggtgggcgaagccgagggggaaccactgccgtagctatagcttgtttgatacggcgagggagtcttcctgggtgtctctacgctgtcacatcgacgggaaagatccaggacctctgcagaggaggtatgctgctgctgcagctgctgatgttgctgctgctgctgttgctgttgttgctgctgactgagggcagctcccagcaactgctgctggtaggcgtaggccgtgtacagatccattttgggtaggcccaaggatccctgaaccggcaattggctgtgcggcaagtggtgcagtggttgctgctggtggtgctggtactggtggtggtgcatcaggggcttgcgatctgcaaagattgagagagagaggggatttgttagtttacggatcgaggagaaaccaaggggcgtggccaacttaccagtcttgagatcgaagaactgcccggccatgagtttctcgtgcattagcatggtgttcggtgtatggtctctgggtttaatccaactgattgacgctatatagactggtgatctagctctgatgttgctatatcttcacgctgacgatgtcgaacgcaaactgatttcctctcgtcggaaccccctgcatttataccgaaaatccggaggctgcgccgacgcctcattcacatcgaaatggcggacacgagcggccagccgaagcggtacgaagcaggtaggcggtacaaaggccaaagggcaaaggggtgattctggctttgcttctgactctgtcccgctctggcctgttgccctctctgtctcaccgctttcgaaagggttttacaagggtgcggctgccctttccctcatttggttttcgcagttttcgcaaaaatcatagttctttgtgctattgttagttcgccatttaacgtaattttaaaaagaaagtacaaagagttttcgaactttacgtttcatcagtttccgcgaaaggatatggttttttcttggttttaatattcaatgggaaaaaataggaaaattcgtaccacctctgcagtgctttacatttcgttttcatggaattggttaaaaatattcataatcaatatagagttataaacttcggctctattttcataggcgttcattgcgatgttataagtccaagtttgaggaaaccccagatttttgtatataccagcattgtgcatttgattttttattacaattgtacctaacttacttgctttgacatccaactgataaaacccttacccaaaaaccaatcttaaaaatcttaagttattaaacctttagatttaagtaactgctgtatatattgctttcaaatataaagaataaaccgcaattaaacatcgtaggctattctcttcagcactgaaataaaccatacttctgaatcttctagaacatttcgcatatcaaagaccccccgaccgtagactattataattacactcaaatcatacttttctggcca

SEQ ID NO: 17612 - DNA, 1347 bp, DROSOPHILA
atgctaatgcacgagaaactcatggccgggcagttcttcgatctcaagactgatcgcaagcccctgatgcaccaccaccagtaccagcaccaccagcagcaaccactgcaccacttgccgcacagccaattgccggttcagggatccttgggcctacccaaaatggatctgtacacggcctacgcctaccagcagcagttgctgggagctgccctcagtcagcagcaacaacagcaacagcagcagcagcaacatcagcagctgcagcagcagcatacctcctctgcagaggtcctggatctttcccgtcgatgtgacagcgtagagacacccaggaagactccctcgccgtatcaaacaagctatagctacggcagtggttccccctcggcttcgcccaccagcaatcttctgtatgccgcccaaatgcaacagcagcaacatcagcagcaacaacagcaacagcagcagcagcaacaattagcctccctgtatcccgctttttactacagcaacatcaagcaggagcaagccacgcccactgctgctccgcccaaggttacaccaaccgctaaccttctgcaaacctttgctgccgcctctgctgcggccgccgctgctgctgccgcttcttcgaccaactcaccaagacccgccagcaacgccagcaccatgcagatagacgttctggagaatcccctgtcaccggctgttgaggccaccacgccaaccacctccagcagcggcgaggcgggaaagaacacccgtcccttcaaggcctttccccgggatcccttggtcatagctgccaatttcgcagccactgatgtccttttggacaatccgcgagtggagcgctacacggaataccggaagcgagtgcttgagcaaatccgcagctccaacggaggatcgcgcaccgtaaccaacccaaaaatgcgaaggaccaactcaagaagtggatccgtcaacgaaggcagctcctcaaacaacaacagcgaaagcgaggatcgcgctgctgcggaggagtcaagcgactgtgactcccaggcgggcaacttcgagagcaagtccgccaccagcagctccagcaacttggctaacgctactgcagcaaactcgggcatcagctcgggcagccaggttaaggatgccgcatactacgagaggcgtcgcaagaacaatgctgccgccaagaagtcccgcgatcgccgccgcatcaaggaggatgagatcgccatcagggccgcctatctggaacgccagaacatcgagctcttgtgccagatcgacgccctcaaggtccagctggccgccttcacctccgccaaagtaaccaccgcctaa

SEQ ID NO: 17613 - protein, 448 aa, DROSOPHILA
MLMHEKLMAGQFFDLKTDRKPLMHHHQYQHHQQQPLHHLPHSQLPVQGSLGLPKMDLYTAYAYQQQLLGAALSQQQQQQQQQQQHQQLQQQHTSSAEVLDLSRRCDSVETPRKTPSPYQTSYSYGSGSPSASPTSNLLYAAQMQQQQHQQQQQQQQQQQQLASLYPAFYYSNIKQEQATPTAAPPKVTPTANLLQTFAAASAAAAAAAAASSTNSPRPASNASTMQIDVLENPLSPAVEATTPTTSSSGEAGKNTRPFKAFPRDPLVIAANFAATDVLLDNPRVERYTEYRKRVLEQIRSSNGGSRTVTNPKMRRTNSRSGSVNEGSSSNNNSESEDRAAAEESSDCDSQAGNFESKSATSSSSNLANATAANSGISSGSQVKDAAYYERRRKNNAAAKKSRDRRRIKEDEIAIRAAYLERQNIELLCQIDALKVQLAAFTSAKVTTA

SEQ ID NO: 17614 - DNA, 2874 bp, DROSOPHILA
tattctaaaagcatgttaaagcaagtgacatcaaaaagaacacctaatatctcttaggtttttaatagataaaatgcattgttacattagcaatttgcctcataacctaattttaagaaaatgctaatttttaggtaaataaatgcacttacaatccatctatcataactttccttttgattaagcttataaataaatttcacgatgaaaaatgtagaagttagctaagaccatgaccgatcataatttaaaaatgcaaagtaaacgcataaaatatattatttcgaacgttagagctaaaaatattatagttatgagataagtgtaatctaagatacttttctagacaccctgtttcgttgaaatttggatgcgaaatggaacgtgcatggagataatttcctatctacacttatgccttattcgaaatgacggggtaaaagaagtcttttttgacagggtatattccagtctgatcataaccaaactagtcttcagcttgaagtcttggagtttggctatccataaacaaaatacggccaatgcggcgtttgttgaggtcaatgatttctgttgcgttgtctttttcatgcttttttgacgctttttgttcatatgttcgtatgtacgtatgtatgtattgaatattaatttttaaagtttttcggcttgtgtaaacatattcagcgaaatacttaagtggaaccatcgaccgctgtaatgtcgattctgcaagcaaatgatgacataatggaagatagttgaaacttgaaagaacaggaatgctgtgattcacggggaccagaatattttgtaatacaatgaaccgcgtctagagctatctcgaaggtcttttcgataaaacgatattcaattatactaaaaagaaatgcatgtcggttacttcttagggggaaaaaaatcatcgcagtaggtccataaatataatgggaaaaccgtcgacttgattcagtagaacattccatacggagccaataaaatgtccaaatatctgatacacctgtgcctggtgctgctctggagctctcggataaatgcagatcactttgacgaatgtgacgggatggacgatggggcatttgtacaaagttgggagagctgccaatcctacgtgtactgcgagggtgaggaatccctaaagggcgattgcgaggatggtgaatactttgattccgaggcgggaacctgtgatattgcggccaatgtgtcatgtttcctggacgaagtcgatgaaccctcggacccggaaccggaaacagacgaagaagaggaggaaatacccgcgacaccaagaccaaccgaaccaccgattgtggagaccccaaccgaagtggatatcataaatattgcgcccgttgtaaggcccaactgtccgatcagcgatgatcccggccaggttatattcatggccagcaataattcatgcaccaactattatctctgctatcacggccatgccatggaaatgcactgtgataatgagctgtactttaattccctcaccggacagtgcgattacccagataaagttcagtgtgccgtaagtatcttctgctgatccttttacccatcgatctaaattctgatctaaattccacttgcagttcgaagatccgcgatcccacaagtgcctgccacacatgaccgagttctttccacatccggacaactgcaattacttctactactgcatcaagggctttctgaccctgcaacagtgccccttctactacggctgggacatagaacgccggagttgtgtgcagataggtgtggcgaaatgctatggaaactccagaagaataggtcggaaagccccattgccacccagaaaacaactcatcaagtcttaaggggagttgtctactagataagagctctatttattgacaagttacaagattgtggcgacatgagacctttaattaaatataacttattaaagaagaccttgattttgattgacttgccaccgggctgagctataaaaagcttagcccaccaccacgaactccacaatgatcgagaatgcagcaatctttgcgcgtggaactgctattgatcgtttacgggttgattctcgttgtctggggaatcaatggattaaacatacccgagtgcagtggccagaatggatttattaacaatacgcgatccaattgcaattactccctcatcaattgctctggccagaactcgatgttctgcacggacaacacgacctgcaatgccaacttcacctgtagcgacatacttccggtggataattcaacagcactacccataagcacaactcccaatgtggtaaccacagcctcgacaactgtttcaccttccgatattcgacgagagtgtcgtcagggtgttaccaaaagatttagctatccgcagaattgtaactacttctactattgcgttgatggctttctgctggtggagcaatgtcctattggctacgcattcgatccccaaactggagcttgtggtggacgtacgtaatcgctccagcgattgtactttaaagtgaaaataatcgcaccaaacttttaattaagcctcttgtcgtgtcaaattaaacaattatagctagaaaataaaaatgaatttagagtcttatcagagaacaagcaaaccgcacagcatttccacctataaagaaggcactgatctcggcgatgaggcagtgcagaaagcctattgaatgtggcaattgttgatagtcttggcctgcctgttacctggctacctctgggtgcaggtgcaggcggtttttctcgaggaatgcaaaggtgtgatcatcaataaggtgaccaatgagaatcaggagtgcagtgagtttgttcactgcgatgg

SEQ ID NO: 17615 - DNA, 807 bp, DROSOPHILA
atgtccaaatatctgatacacctgtgcctggtgctgctctggagctctcggataaatgcagatcactttgacgaatgtgacgggatggacgatggggcatttgtacaaagttgggagagctgccaatcctacgtgtactgcgagggtgaggaatccctaaagggcgattgcgaggatggtgaatactttgattccgaggcgggaacctgtgatattgcggccaatgtgtcatgtttcctggacgaagtcgatgaaccctcggacccggaaccggaaacagacgaagaagaggaggaaatacccgcgacaccaagaccaaccgaaccaccgattgtggagaccccaaccgaagtggatatcataaatattgcgcccgttgtaaggcccaactgtccgatcagcgatgatcccggccaggttatattcatggccagcaataattcatgcaccaactattatctctgctatcacggccatgccatggaaatgcactgtgataatgagctgtactttaattccctcaccggacagtgcgattacccagataaagttcagtgtttcgaagatccgcgatcccacaagtgcctgccacacatgaccgagttctttccacatccggacaactgcaattacttctactactgcatcaagggctttctgaccctgcaacagtgccccttctactacggctgggacatagaacgccggagttgtgtgcagataggtgtggcgaaatgctatggaaactccagaagaataggtcggaaagccccattgccacccagaaaacaactcatcaagtcttaa

SEQ ID NO: 17616 - protein, 268 aa, DROSOPHILA
MSKYLIHLCLVLLWSSRINADHFDECDGMDDGAFVQSWESCQSYVYCEGEESLKGDCEDGEYFDSEAGTCDIAANVSCFLDEVDEPSDPEPETDEEEEEIPATPRPTEPPIVETPTEVDIINIAPVVRPNCPISDDPGQVIFMASNNSCTNYYLCYHGHAMEMHCDNELYFNSLTGQCDYPDKVQCFEDPRSHKCLPHMTEFFPHPDNCNYFYYCIKGFLTLQQCPFYYGWDIERRSCVQIGVAKCYGNSRRIGRKAPLPPRKQLIKS

SEQ ID NO: 17617 - DNA, 4918 bp, DROSOPHILA
aattttgaagatctaaaagtcagtatccagatttaattgaaataaaacatgttttttatgaacttttcttaattttgtagtctgttgaaatgtggcgcaaccttctcgatgatgctcgcaagaggaaagtttacttcaatttggaccgcgatgatgtgaacgacctagaccgttccttaatcaaaaagatgatggtgaatactatcaacttaatttaggggacacaacgttccctattagttaatgagattaaaactaccttttagatgctaagatatcacaagtgccatggaagagaagcgcttcccacattgtttaaaaaaaggctttgttatttttatatatatttaacatagagactgtaagatttaatattgaaatctttgtacatttagttctttaaaacgccgacgaattgcattttcgttcttaaatgccgtacagtataacaggatttataagtaaccgattatatatcatctatgtactttttgagaaagattcacgggttgaggatgttgcactatgcatggcgtagtgtatgaccgaataaaagtaaataaataaatattgaaatggttaaatcaattatttaacgtctgcatattgcactattatatatagaattacagcattgcaagagttttcctggtatcttgatctcataatttcgtccctcaggtatttaactaaaatgcgctttaattatgctaatctccagattctggcgttgtctgcctgatcatctctaagctatagttatcgtaattaaattcactaacaacacgcacacacacatagtcgatattaaattcatagttattctgtttgccttgccttgacgccttgtcacgagggcattaaaattaatggaatcgcttaacaatacgattgcactgtgtagagttctgccaaataaaacaatcgcaataacttaatgcaagataaaataaaaactaacttaagaatttaactaaaatgtagcaacaaaatctaactaaggactaataacataacaaaaattatgcccgtaattaacttattttatgtggctgctcaaactgccggcccgtttgcttacagatatatatcaatgtatatatatagaaatttctgcattacatatagaacgtacgactcagcaaacgtcttgtccgaatcttactggtaaccgatcaagtttaggttaacatgtcgcccaagttgtccttgagggactgataaatttggtattgttgatctggcttaaggttgtaaatctgtgtcagcagcttagccggcgacggagttctgatgaagctggatatataaacgttaacgaaggtcgccataagaaactgacaatcgaaacgatccataatgccgccatgtccgggtatcatgtcgccaaagtcctgcaaaacaagatggtgtgttgcgttacattgaaaagacctgtgttccgaaaagattacttaccttaattttgaaagctctcttaaatccagaggcaaagaagccaccaaagggtccaataatggaactaaacaggctcagggagatcgagtgccagataaaggggtaaagatttagagtcttgccaatgccaaactggaaatgaaaaaaattattactgtagctatcagcacaacaaatcggtaacccataactccatagaaatacattatcacttaccaatttaaggctgtattcctggggcgtgaacaaatagcttggcacacaggacattgtcatgcgtccctgttcctccgagtactggatgggacagataaagtactggtagttgcacagcacatacgagaacagaatgccaaagaggacggtggcgaagccacccccgatgaagccctcccaggtcttcttggggctgagcttgatgaggggagtgcgcccaaagaagaaaccgaacacgtacgccatgacatcattgcacactatcatcgaaacaggtacgatgaaccaaatgagcccctcaaatatattctgtatgatgaggtaactctgggtgacgacaatcagcagggatacatgggtccaggcaaacaggctgaattgtttgatgtaatacttcttcaccagtgagagcacgaaccaaacgaacccgatgatgtacagggcgaaggaaaggaaccggtgataggtcaccaggaacttcagatattcctgtagatgaaattgcatatttaccaggcgatataatcaggttattgtattatttactgaccacccgattaattacaacgccaaagtagtctaccagattctctccgtaaaagaagtaatttgaggtaagcaggaaataccaggaaaggcttcggaaccagggcaagccatgaattcgataaacctggtagccaatcgagatgatctcctggaagcacttcacctgcaccagtaacgtctgcaaagagaaagtaggacaacgattatttgaagactcgtttaagcgaattccattaaacctaccgtgatcatcaaggccagcggtccaccatagatgatcaatgcgaagccgcagatcataatccatgtgaagatgccgcgaatcacccagttcttccatctgtggaatgcgcaaaaaataattgtttgtaattgtacatatttacttttaatatttgctcgccaactgtagacagctgtggatatggattatttttggaacgcactcatactcattctgtcggatttataaaattcgcacttcaataaaatattttttgaatcatcaattccaaatcgacctttagctattcatcatgatctttaaagatcccaactacgcatatggatttgtttcacatacctatccggcagatccttgagggccgagtccaatatctcgggcgttttgtcggttccctgcggcagattcttggccagttcgtcgacgaacttctcctcgggaatcttctcttcctcggagtccacctggcaggaggaggagcaagggaaagggaaaattcacttattgattgcattggctgggactgcaaagtaggtttcctatcagattcgatacgaccggagtgcagggtttaaatactttctattggacgacgccgagcaaagtccatgatacgtgtatgtatgtgcctatatacccataatcagaatcactcgtttatccaatacacaggcacataaaatagagaggggaaccaagtggggagaaaaattgcgggtttttttgggtggcgtgttttgttgccaaatagcttggttgataaggaggcattatcacccagcaataacaaaaaaagtccaagccagaaagggagtctggtcatggtaatggtttcggctctgggttcttggcccagtgcttccctaattggcgtagtccatctaattggatttgctggtcataatggcgctatattgcaacacagcaggtgggtggttgggtggcaggcaggctggctggctagtggtgtgttttgtgtttgttattggattttctccaggagagagctctctcttctttctcccacctgcttgtgcgtcagagaataacaaaaacacatagccacacacatttgttggtatacacacattggcttttctatgctccaagaattatgcaaattggtgtccggaacagctgccgctcggctgctccacatacaagtcattgctacttacatggtccgaggagtcggcggcggagttgcgcttattggctgcgtcagatccggagatggccgtgtcctccagtggctcatcctcgcccttcctgcgtcgcacttcggccattattcgatgttcgccagatctattcacaatgtattgattcctattgattccgcttgagcagttctcgtccgtgttccgctctccgcgtttgccgtttgccgtgacccgtgctgcgtgatccgtatgtcgacttcgtccgaattaaaatgcttttctctatttctgattagcccagcatgcagtgtgcccagcttgcgcaaagtgggctggtggagcaaaagtgttggcaagtatgctcaattgctgttaggttttacaagttgacttttcggacagaaaatgtttgatgtcttttaaaagaactttctttttctgtgcaattaacggtgacttttgtcgtaatatgtaaaataaaatatattaataatactagaaaagttaatttaagtgataataagagtcacccatatcagccatccctggtagagaatatccgtagctttatacgtttcccaacacctgcaccggcggcgtcacttttctcggcttttccgtatcgcaattttgcaattttctcgccaaaaataagaaaaaggaaaacgtaaattcagaaaatggcagcagctatcaatggtgttttcccacccacattgcaggagctggtaaagaagtccaaggtgctggtcgtgggcgccggcggaatcggctgcgaggtgctcaaaaaccttgtgcttagcggctttacagacatcgaaattgtaagttttttcgaaaaaagtattccatattattaatttataaacgttacccagatcgatctggacacaattgatcttagcaacttgaaccgacagttcctattccatcgcgagcacgttggaaaatctaaggcacgggtggctagggaaagcgcactgagcttcaatccggacgctaagataaccgcttaccacgacagtgtaacatcgtaagttgggatagctttgcctttacatcttgctaacaacacataccttttagtactgattatggcgtcaacttctttaagaagttcgatttggtgctcagcgccttggacaacagggccgccaggaatcatgtaaatcgcatgtgcctcaatgcggatgtcccgctgatcgagagcggcaccgccggctacaatggccaggtggaactgatcaagcgtggactcacccagtgctacgagtgcactccaaaagac

SEQ ID NO: 17618 - DNA, 1687 bp, DROSOPHILA
aaatagagaaaagcattttaattcggacgaagtcgacatacggatcacgcagcacgggtcacggcaaacggcaaacgcggagagcggaacacggacgagaactgctcaagcggaatcaataggaatcaatacattgtgaatagatctggcgaacatcgaataatggccgaagtgcgacgcaggaagggcgaggatgagccactggaggacacggccatctccggatctgacgcagccaataagcgcaactccgccgccgactcctcggaccatgtggactccgaggaagagaagattcccgaggagaagttcgtcgacgaactggccaagaatctgccgcagggaaccgacaaaacgcccgagatattggactcggccctcaaggatctgccggatagatggaagaactgggtgattcgcggcatcttcacatggattatgatctgcggcttcgcattgatcatctatggtggaccgctggccttgatgatcacgacgttactggtgcaggtgaagtgcttccaggagatcatctcgattggctaccaggtttatcgaattcatggcttgccctggttccgaagcctttcctggtatttcctgcttacctcaaattacttcttttacggagagaatctggtagactactttggcgttgtaattaatcgggtggaatatctgaagttcctggtgacctatcaccggttcctttccttcgccctgtacatcatcgggttcgtttggttcgtgctctcactggtgaagaagtattacatcaaacaattcagcctgtttgcctggacccatgtatccctgctgattgtcgtcacccagagttacctcatcatacagaatatatttgaggggctcatttggttcatcgtacctgtttcgatgatagtgtgcaatgatgtcatggcgtacgtgttcggtttcttctttgggcgcactcccctcatcaagctcagccccaagaagacctgggagggcttcatcgggggtggcttcgccaccgtcctctttggcattctgttctcgtatgtgctgtgcaactaccagtactttatctgtcccatccagtactcggaggaacagggacgcatgacaatgtcctgtgtgccaagctatttgttcacgccccaggaatacagccttaaattgtttggcattggcaagactctaaatctttacccctttatctggcactcgatctccctgagcctgtttagttccattattggaccctttggtggcttctttgcctctggatttaagagagctttcaaaattaaggactttggcgacatgatacccggacatggcggcattatggatcgtttcgattgtcagtttcttatggcgaccttcgttaacgtttatatatccagcttcatcagaactccgtcgccggctaagctgctgacacagatttacaaccttaagccagatcaacaataccaaatttatcagtccctcaaggacaacttgggcgacatgttaacctaaacttgatcggttaccagtaagattcggacaagacgtttgctgagtcgtacgttctatatgtaatgcagaaatttctatatatatacattgatatatatctgtaagcaaacgggccggcagtttgagcagccacataaaataagttaattacgggcataatttttgttatgttattagtcct

SEQ ID NO: 17619 - protein, 447 aa, DROSOPHILA
MAEVRRRKGEDEPLEDTAISGSDAANKRNSAADSSDHVDSEEEKIPEEKFVDELAKNLPQGTDKTPEILDSALKDLPDRWKNWVIRGIFTWIMICGFALIIYGGPLALMITTLLVQVKCFQEIISIGYQVYRIHGLPWFRSLSWYFLLTSNYFFYGENLVDYFGVVINRVEYLKFLVTYHRFLSFALYIIGFVWFVLSLVKKYYIKQFSLFAWTHVSLLIVVTQSYLIIQNIFEGLIWFIVPVSMIVCNDVMAYVFGFFFGRTPLIKLSPKKTWEGFIGGGFATVLFGILFSYVLCNYQYFICPIQYSEEQGRMTMSCVPSYLFTPQEYSLKLFGIGKTLNLYPFIWHSISLSLFSSIIGPFGGFFASGFKRAFKIKDFGDMIPGHGGIMDRFDCQFLMATFVNVYISSFIRTPSPAKLLTQIYNLKPDQQYQIYQSLKDNLGDMLT

SEQ ID NO: 17620 - DNA, 6416 bp, DROSOPHILA
atatacaatatattttagatctagcattaaatttgatttacacttttaatagtttgtttctctcttccactaattatgcagtttcgctttgtcacttaattgtacacatttactttctgttcgttatagttaatattatcttaatatttcctcagctggtctgttaaatttcgtttatcgtttaccaagctaaatcatttacttttaatatgtagataggctttaaaaaataattaaaattatgcaacaattaaaatgtaaatgttttcattttataaatgtaataaaattgttgggatttcacttgtatgtattttgtgtttctcgattttcgtttttgttttgtttttctttgctcatgttttgttgttgcgctgatttaatagattgttttttttttttttaatactttgtaaatgaacaagaaacattttgcaacaaaagtctgggataaggcaaaacaaaaaatgtaattttcaaataaacgaacaaaggactttctgctgcattttaaattcgtaaatttcattgaaggaattttcatgctctcaactgaattggtttcttttttttttaattttttatatggtataatgactgtttgttaatttttacgctttagtgtgcattttttttgtagttttcatgggtttttctcagttagctttaaattaaatgccaattaatttaattaattaatttttaaatcacatttcattgtttttcaacacgggcaaattcaaatttccgcttcgatttctcatccagtgtgttgtttgtaatagtttatccattttgttttttgtttttgttttttttttttgtgtatttttacttgttgctgctgttggtttgtgtgaggaaacgaaaatgttggttgaagtacgcgactggcgtctagtgcacatttcattaaaattaataatactatatacaatttatggtattctgccacttcaattctccaactctctcccagcttcgcccctgcctttttttggcctagtcgaataacgtggccagcaagtcgtcgctggcgttgttgttgctgctgccactcgagggcggcgtgttaagatcgggctgaggatccagataggacagaatctccatgggatccacatcttgcagcagctataaatgatttcgaaaatgcgtaaattaatatttttcccattgttcagaggtgtaagctttatactcacattcagatcgtgggctgtatcgtttatggccgctgccgccgcatcgaagctctgcagctcggcactcagatcgctttcgctgaacttcagctgggtctgactgctcatcagggagttgaggagctgctcctgctgctgctgttggctatccgctgagcctgatccgcccatgccgccgcccatccgactgggcgtgcccggcgtttggggcgagttgtggcccgtgctgctgttgttgttgccgcttccgttggtggcacttccgcttccgttggcattgggcgtaccgccgctgatcggttcgttgtgggagctgctgacactgggcggtccgccaggtgtcatcggatgactggccgctccaggagtgtgcggggtgtggggcatctgaaggagaggagggaaaaatatagaaattagtacggatttaaaaaaaaaaaaccaaatgtatttgttatttatttataatctataaattgtagattcctacctgatcgctgagtgacttctccatggcgttcagctggtcgagggagttgacacctccatcgccgccaggtaatccgccacttccatcgctgtggttgccactgaagccgtcgtagctgctgcgattgccactaaaaggtggtaaataatacattaaatcactggctacaaagtcatatattttttatttaatactcactgctggttggtgttgccgccattgcccatcatgttgccgctggcaatggagttcatgtcgtgcatattgtagggactcatggcctgcgcactgtcccaagtgggcaattgggtggatcccggcgacatgaccttggcgatgtcgtcgcacagttcctgtttgatgaccggcagggtggggttgacacttccgttgccggaattggagccgctgccgccactgggattgctaggaacattcgaggggggcggtgcatttggcatgccgccattgtgctgcagcgcccgccaattggccgatgaatcgatgatcacctcgtccacatccgagttgcccagcgtgttgagtatggcccagatgtactgatcgatctccagggtatcggtgatcgccgacttgctgcactccgggcatcgccacgatccacgctcgctgttgatcatcagatacgcctccaaatcgaagcactgcacatgcttgcactcgtgtccccgcgctggtagtcgtatccgggacttggtgatggggcacttcaatgagatcttggcgcactgctgcccgccgccctgctgctgctgctgctggggcgtggcatctggcccggcattcgcctccggctggctcagattgcgcttgatcttctgcacactgtgctccagtggcagcagattgcgcttgtgcagcgtctgcagcacctggcgcaccgatggtcgatggactagctgcagcacgaacaggtgcgactgcaagcggaaaaggatttaaaggatttattaataccacttgccagttggtttgtttgagcttgaagtacttacacaacagcaggaactggcggtcagctgaagcgtattccttcccggttggcacaccgccttcaagtagagcggtcgtagggcggtgctgttcttctcggaccgctcgatgttcaggggcgtggcattcgcggagacggtgacggtatgcggccaattggtgttcatctgccggtcgtcctggtggaagcacttcagctgcagctccaaatcgtttctgcaaattaagaagaatatatattaataaaatgccaattcgatgttaattggtcagagggtcctacctgcacatcagggtgttgtagacattctgcttgagatggaatacatggttgctgaccgacaggttgtgcagcaggcggaaaggagccaggatgatgccgtcgcgcaccgggaatgtcagtctcatttcttcgcctaaggaaaaagtgaaatatgtatgttaagagactttcgaagatggatgcactcaagcgcaacttactgttgtccataggtggcttgatatccggattggggctaacatagggcacactgcaggcgggcgtcagcggtggcgtgggattgccaggaactggactgtgctgatagttttgctggaaactgagcacaagagaaatacattattaactgattcattggtatggagtttcagaactcacccttgattctggtagggattgccggtggtggcgacggcgcccggacccgccgggcacatgccacctgcctgctgcattccagcactttggccactgcccggatagaactgaccctgatgggaagcggctcctccgactccaccatagcccactccgggcatgccgccaccggatccttggggcatgaagcgctgctggctcatgcagcctggtccgggacccattcccccggcggtcatgccaccgggacccataggtcccatcactggtcctccggtcgggcccatgccattgcccgccgacatacggccgtagcctccattgccgacgcccatgggtccactgcgtccgtaaccatttcctgctccacccgcctgcatgggcagtggaacgcctccgccggaacccggatgcatctgctgatttccgtacatctgcgcctgctgctgctgcatgggattacccgggtacattccgcccgctccccccacaccggccgccgcccgcttctgggccatgtgcatctgggggtggggatatggggccattcgtcgctgctgctgttgctgctgttgctgggtgagactgggtggcgcctgctgcggatatccaccattggccatgccctgcatcttggccatcggattcatgccgcccatttgctgctgcgccgcctgttgctggaggggattcatgccgccgcccatgccgccacttcctccgactcccgggcccatcgacatattctgcatctggttcatgggcgtcatctaaacaaaaaaaaagtgggggaggccattgataaggggacattcttgacttcttatatgaaatttcttggaaaatagaattgctactccacgcttatctttttaaacaattcacagtacaattaagtgggatttccatcttaaattaggcgtcaaactttttgccagcaaccagcaaccaaaaactgggggactggagcaaataaagccagagagcttgagcggattactgtcgctctggcagtcagaaatttgtcatttgcaaagttgcggacttctgttttgggtgcgatccgaatgattcgttaatgggtaaacgctttcaaagcgaaatcagtttactgccgcaaatgaattgtcaacagctggtcatataaaagttgcggcagtgaagtcatccgtccatgtccaaaaaaaaaaccccttaaatacattccaactggtactcacttgatgatgcctctggggtcccatgctgccacctccgccatagcccatgcccatgccctgggctccattgtagccaccctggccggagccgccgttcatgtactggccattcatgttgcccatcatgccgctgttgggtccagggtgcatgccgccacccatctgaaggataagagataaatgcgttagcgaagatacttaaaatagtaagggggtgtatctaggatatttggtgcacttgggtggtgtgcagttcgatgtgcatttctcaaatcgtcatcctcacctgactgtaaccgcccatggcatccatgctgcccatgtgctgctgctgctgctgctgctgctgctgttggtggtgatgtggctgttgctgctggtgttgctggctggcagcaaccatgcccgtgtatccttgactgctcgaactgctcaatccgctcagcgaggaggatgccgaactgttggcgccgccgagcgacgtgaactctgagttgggaccgaaggtgttgttcaggctgcgcaggctgtcgccgccgacaaggtcattgcccagcataaagttaccaccgccgcctcccgatcgctggagctgctgctgttgctgctgctgctgttgctgctgttgctggtaggctaggaagttgtcgcgctgatgctgctgctggtactgttgctgctgctgctgttgctgctggttgtagtactgttgctggtgctgctgttgcaagtgttgctgctgctccacgccgactgttgtggcacctggcggtgagatttggcccccggtggctggcgcccttgaggagcccgcctgctggttcatttcatcatttttcctgcaaagttcgtagacgagataaagccatgagttagttggaatccacagtgtgataatatagtatggccactgcgtataataaacgggaatcacgcaatgaggcatatttccacttaaattcccgaattgagcagaaaagttcaagatcaatcatgcactagataattttggctgtatgtgaatggtcctaggagacaaattagctcgggaaactaaatcccatgcctgctcttactcggaaatcttattttgtaaatacttcacggattctaagaaattgtgatattactgcgcattgttttgtgtgttcttatggcctatttatatatttcgtattcttaaagttcatagcctgcagtacatattctaatatttaagtacttttcttatcgttattgttattagcattttttttatggaatctcttgggttttttcaattcgtacagttctttagatctgtttttggtttttaccaaccagcgattctcttatcttgccattcagtttgtcacatctgaagaattgagtatcgcttctgattctccgatgccctgctggtggaatcattatacgacctccatggatgatgtcagcctaaggcaacttatgttcgtgattttaccccagtatccgcagcacccatttccatacatccacccgtttctagtgccgcaaacaaccaaccccccaccccaccgcacaaaaagcccccttttccaaccacctagccatatctccatcatcgtcattgtcaacgtcattcattgtactgttgtgtgttgctgtgtggcaattgccttgcgattgcaattgcattttccatcttctctacactgcttataattcccattgcacttgtttcccctcgatttgctatgacatttaagcccgaaaatgtcaaatgggctcagggtttaggtttaggttttggtttagatttgggtatgagtatcggtttgttttgccctcgacatcgctccctg

SEQ ID NO: 17621 - DNA, 2112 bp, DROSOPHILA
atgaaccagcaggcgggctcctcaagggcgccagccaccgggggccaaatctcaccgccaggtgccacaacagtcggcgtggagcagcagcaacacttgcaacagcagcaccagcaacagtactacaaccagcagcaacagcagcagcagcaacagtaccagcagcagcatcagcgcgacaacttcctagcctaccagcaacagcagcaacagcagcagcagcaacagcagcagctccagcgatcgggaggcggcggtggtaactttatgctgggcaatgaccttgtcggcggcgacagcctgcgcagcctgaacaacaccttcggtcccaactcagagttcacgtcgctcggcggcgccaacagttcggcatcctcctcgctgagcggattgagcagttcgagcagtcaaggatacacgggcatggttgctgccagccagcaacaccagcagcaacagccacatcaccaccaacagcagcagcagcagcagcagcagcagcacatgggcagcatggatgccatgggcggttacagtcagatgggtggcggcatgcaccctggacccaacagcggcatgatgggcaacatgaatggccagtacatgaacggcggctccggccagggtggctacaatggagcccagggcatgggcatgggctatggcggaggtggcagcatgggaccccagaggcatcatcaaatgacgcccatgaaccagatgcagaatatgtcgatgggcccgggagtcggaggaagtggcggcatgggcggcggcatgaatcccctccagcaacaggcggcgcagcagcaaatgggcggcatgaatccgatggccaagatgcagggcatggccaatggtggatatccgcagcaggcgccacccagtctcacccagcaacagcagcaacagcagcagcgacgaatggccccatatccccacccccagatgcacatggcccagaagcgggcggcggccggtgtggggggagcgggcggaatgtacccgggtaatcccatgcagcagcagcaggcgcagatgtacggaaatcagcagatgcatccgggttccggcggaggcgttccactgcccatgcaggcgggtggagcaggaaatggttacggacgcagtggacccatgggcgtcggcaatggaggctacggccgtatgtcggcgggcaatggcatgggcccgaccggaggaccagtgatgggacctatgggtcccggtggcatgaccgccgggggaatgggtcccggaccaggctgcatgagccagcagcgcttcatgccccaaggatccggtggcggcatgcccggagtgggctatggtggagtcggaggagccgcttcccatcagggtcagttctatccgggcagtggccaaagtgctggaatgcagcaggcaggtggcatgtgcccggcgggtccgggcgccgtcgccaccaccggcaatccctaccagaatcaaggtttccagcaaaactatcagcacagtccagttcctggcaatcccacgccaccgctgacgcccgcctgcagtgtgccctatgttagccccaatccggatatcaagccacctatggacaacaatgccccacaccccgcacactcctggagcggccagtcatccgatgacacctggcggaccgcccagtgtcagcagctcccacaacgaaccgatcagcggcggtacgcccaatgccaacggaagcggaagtgccaccaacggaagcggcaacaacaacagcagcacgggccacaactcgccccaaacgccgggcacgcccagtcggatgggcggcggcatgggcggatcaggctcagcggatagccaacagcagcagcaggagcagctcctcaactccctgatgagcagtcagacccagctgaagttcagcgaaagcgatctgagtgccgagctgcagagcttcgatgcggcggcagcggccataaacgatacagcccacgatctgaatctgctgcaagatgtggatcccatggagattctgtcctatctggatcctcagcccgatcttaacacgccgccctcgagtggcagcagcaacaacaacgccagcgacgacttgctggccacgttattcgactaggc

SEQ ID NO: 17622 - protein, 610 aa, DROSOPHILA
MNQQAGSSRAPATGGQISPPGATTVGVEQQQHLQQQHQQQYYNQQQQQQQQQYQQQHQRDNFLAYQQQQQQQQQQQQQLQRSGGGGGNFMLGNDLVGGDSLRSLNNTFGPNSEFTSLGGANSSASSSLSGLSSSSSQGYTGMVAASQQHQQQQPHHHQQQQQQQQQQHMGSMDAMGGYSQMGGGMHPGPNSGMMGNMNGQYMNGGSGQGGYNGAQGMGMGYGGGGSMGPQRHHQMTPMNQMQNMSMGPGVGGSGGMGGGMNPLQQQAAQQQMGGMNPMAKMQGMANGGYPQQAPPSLTQQQQQQQQRRMAPYPHPQMHMAQKRAAAGVGGAGGMYPGNPMQQQQAQMYGNQQMHPGSGGGVPLPMQAGGAGNGYGRSGPMGVGNGGYGRMSAGNGMGPTGGPVMGPMGPGGMTAGGMGPGPGCMSQQRFMPQGSGGGMPGVGYGGVGGAASHQGQFYPGSGQSAGMQQAGGMCPAGPGAVATTGNPYQNQGFQQNYQHSPVPGNPTPPLTPACSVPYVSPNPDIKPPMDNNAPHPAHSWSGQSSDDTWRTAQCQQLPQRTDQRRYAQCQRKRKCHQRKRQQQQQHGPQLAPNAGHAQSDGRRHGRIRLSG

SEQ ID NO: 17623 - DNA, 3015 bp, DROSOPHILA
aagaaatttgactccatatataacaaaccttcttgcaaacttcgtcaaacgctctttcagcagattcgctggcatcgcgaatatagcaacgattactggatatgaagtccgtaatgtataccatagcaccgctgggcgggatgatcgcttttggcggagaaacgggaatatcatctttggctgcaatgatgctggaacggccggcgttattgcactgcaaatccggaagaataggtgaacggctgaggggtattggcgacgcctcaactacagatttgtcagcgtttaacgaacaggccccctccaaagttgattccctgtcgctctggaacacggaatattcattgggagaaaccaacgcgggcagcgggatgcagatgtaacgatgacgtagccaatcttgccgctgacaatgcttggagcagtaaaagtccccgcagcgctgacagaccctttccgctgcgtttgcgcaatggacgcattttcctttggcttgcgcaagctgaattacaaaacaatattttggtgttcggctacttttttaaaagttggttcttacttcatcagcaccggcaactgacttttgtgctagcatgttgtcacactttatttccgatcgaaaaggaagagtttttcagcgttagttctccaatgatacagctgaagccccacggtgttaccagatacggaaatccgattaacggaacttagaagtgcacattagtaatgaaatgccgttttcccacttatttatttataacacgttaaactgacaaatatttgttggctgttagtattaaatatattcatatatttatattcataattaattattatcttatagtttggaagtagttagctcttaatatatgagacatactttaaagtgtagtttagtataatcagctgtttgttgcttatcggtcttatcgataattgtgggtagctgcatttgatttggcagttcaatttttaaatatttgcaagcttttaactgaaaatgtcgccaccatctggtgaattccgttgccgagtttgtcttaaacaggatgaacttctggtggatatctatgagatcgtggaggagatgcaagtggacctgtgtaccttgcagccaatgtatttatgccaggagtgcaccaacgagcttctcatcgccgccaagtttcgcaaaatatgcgtggagtcggagaagttgcgcgatatggctccggagataaacatagacacggcagaacccctagcttcggaggaaataattattattgatcccagcgactatattgaacagctctccgctgtggaggatcccgaaaatgaacctattggagtttcacgctggaactgccagcattgtggcgctggtttccagctatcggaagtactgcgtcggcacatccaagaagtacatgcttcaataactattatagactgtagggagcgcaggcggatctttacgaaattgggttgctaccaggtccacaattgctcctatgccaagacacccaaacgtgggcacaagtgcctggagtgcggtaagtgccttcaatccgcctctagtctggcaagccacattcgcctgcacaccgacgaatggcccttcacctgcgatcagtgcgccaaggccttcaggaccaatggagcattggaggttcatcagaggcgccataagcaggtcttgcagcacaagtgcctgcactgcgggcgtggttttgtagaatcagcgacgccacatagttaacaggcacacggaggaacgtccgcatctttgcaacgtctatcagcgcagtttctccagggtctacatgctcgagctgcatctccgcacaaacactggcgaaagaccctacgcctgccagcatcgtgacaaacgtttcgcccaactgggagtcctcaagattcacgagcggatccataccggcgaacgcctgcaccgctgccaagtgtgcgaaaaaccttttacacgggcgggacagctccgaaaacacgcgttgcgtcatgaaacgggacagtgataagttgcagattgccgatttgggccaatgatctctgatcgcggtcaaggtaacagatataagcagccttattagtgacttaggcagcttcttttaatgccaaggtgggcccacagcgatttgttttgcacattccaaggctcttcatacatcggataaagatcaggacagcgaccgctaccactttggctatcactttgttgccaaatgaagtgccatgggacgattttgagagttgtttccctatactgtgaggccttaggtgtctgtaagtttggtatgcgttctgactgcttttttttttactaaataccgttcccgaattccttttccagcattgtcttccttcttagatgaaattacgaacagtgactgtaagaaaatcagttatgcttaatatatccctaacccagaaagtacactattcagttttgcattttgaaattctttattgcatgcaggtaagagttagtaatgtttccttttgtaattggtttacttttgctttgacttgcaattatcctaaaagttacaacaagtgacgcaggtatatgctataaatatccgtataatgtatagatgtatatcgggcttgtatggtatattctttagatgaattcaaattataattgaagagacaaacttgtactcgtaaataactaggttgagagcatgaattgtcgtttgatttttatttccatatctaaccatagctctcggtacatcttcgatcctatttgtacaataatgtttatgtatatttatatatggttgtatttataaatatggttagtcatcttttgatttgattttcatgcagtttcgagtaattggcttaatgtaactatgcgtaaattacgaaattagtttagttcttttgggtgctattcctcgtatggcttaattctctttgggcttgcttcgggtcgtatctttgtcttccattatggcggcgggatagctgcacttgttccacatctacatcggattcgggttcggt

SEQ ID NO: 17624 - DNA, 972 bp, DROSOPHILA
atgtcgccaccatctggtgaattccgttgccgagtttgtcttaaacaggatgaacttctggtggatatctatgagatcgtggaggagatgcaagtggacctgtgtaccttgcagccaatgtatttatgccaggagtgcaccaacgagcttctcatcgccgccaagtttcgcaaaatatgcgtggagtcggagaagttgcgcgatatggctccggagataaacatagacacggcagaacccctagcttcggaggaaataattattattgatcccagcgactatattgaacagctctccgctgtggaggatcccgaaaatgaacctattggagtttcacgctggaactgccagcattgtggcgctggtttccagctatcggaagtactgcgtcggcacatccaagaagtacatgcttcaataactattatagactgtagggagcgcaggcggatctttacgaaattgggttgctaccaggtccacaattgctcctatgccaagacacccaaacgtgggcacaagtgcctggagtgcggtaagtgccttcaatccgcctctagtctggcaagccacattcgcctgcacaccgacgaatggcccttcacctgcgatcagtgcgccaaggccttcaggaccaatggagcattggaggttcatcagaggcgccataagcagaatcagcgacgccacatagttaacaggcacacggaggaacgtccgcatctttgcaacgtctatcagcgcagtttctccagggtctacatgctcgagctgcatctccgcacaaacactggcgaaagaccctacgcctgccagcatcgtgacaaacgtttcgcccaactgggagtcctcaagattcacgagcggatccataccggcgaacgcctgcaccgctgccaagtgtgcgaaaaaccttttacacgggcgggacagctccgaaaacacgcgttgcgtcatgaaacgggacagtga

SEQ ID NO: 17625 - protein, 323 aa, DROSOPHILA
MSPPSGEFRCRVCLKQDELLVDIYEIVEEMQVDLCTLQPMYLCQECTNELLIAAKFRKICVESEKLRDMAPEINIDTAEPLASEEIIIIDPSDYIEQLSAVEDPENEPIGVSRWNCQHCGAGFQLSEVLRRHIQEVHASITIIDCRERRRIFTKLGCYQVHNCSYAKTPKRGHKCLECGKCLQSASSLASHIRLHTDEWPFTCDQCAKAFRTNGALEVHQRRHKQNQRRHIVNRHTEERPHLCNVYQRSFSRVYMLELHLRTNTGERPYACQHRDKRFAQLGVLKIHERIHTGERLHRCQVCEKPFTRAGQLRKHALRHETGQ

SEQ ID NO: 17626 - DNA, 5999 bp, DROSOPHILA
ctatttctcgtcgacagatatacgcaggcgggctattgtcccggcgcaaaccgcgcgtccacatcgactcgaatacgctgctgccggaggagcagccggcggaccttccagcggaggagccgtctccgggtcgggagtgagccggagccaccagccgctgggcggacggattgcccagcatttctacgatgactttgcctactgaaaagttcgcttgtaataaggtgcgtttttagtttgataacatagcatagcatatgtagtaaaatggtgtcatatctttggttttcagtttcttcagctgtaaataagtttccccaacacaaggagagttccaatttggtgcacggctccaacttcttaaacaaatctgtgtctactttagtcgtttagccgcacaaaacgtactcgtaattcgaaatggctcgggacatatgaagcaatagccgccgaaaaacaacataaccgatgataacctacagcaatcatttatctgagaattttttgggtacattctgcagaaagctcttttcaaaatttaccttcgatcgattatgctatttttgctgtatgagctatatatgtccagaacccccctacttatatatacgttgtataatactcaaatgtcgtgatagtagcagcttgcgaatttgtctgctagctcgtatctagtagtttataaaaataactccctcctacttgattatgtccaattaatcgagaagcataacataaaatatccagcagaacagaacaataaggaaaatatgcattgatgtccttgatttacatatagaatgaaaaatacctaatgtgttaatttaaaactgcaatttgcatacaaattgtctataatatttaagcttcgtcggagatcgtgttcgttgtagagaacccagatgcaagacttaaatcggagtgcataacaatcaaaacaaaaactgaaataaatttaaaacccacttaagctgctgtttttacttgtgtttacgtcctgctaatttttatcagacgtttttaaacagtccttcaggttctccgtttcctcttccaggtggtcgagctttttcattaaaattatctagaaggaatccaatataagcttattaaatgggttacagaatcaaaagaacaacgtgtacctttgctgccgagacaatttccgtggccactctaagcggcatgtgctctaaggattggactaagtgcgacggcctcactctggctatatccccaatggtttgaaaacccgcagcatacaactgcctggcacgattctagaagagtaatgcaatttggaatagtcatatctacttttctgttaaggacaagattattttgccactcacgatcttaaccgctggcagttccattagcggctccagctcaaatgtgccgcatcgatccattttgtgcaagatccgctcaaacaatggtttatagcaccaaaactcttccagctcctcgcacaggcgaacaatggcactcgccgctgctgtggattgactgatcagatgctgcagagttccccgctccacgttgtacttgctggccacggagggaatcggtaggaggttaagtatatccgccagaataagcaccttgtagaggcgattcagctgcagggacaatggaccttgcaccgactgcgtcttaaatagcctagctgcatgggcctctgtaaatccaagttgtttgaacattgcctgcgagtccagtggaagcgaggtgtaaactccaaacagaatgctggcatctgccggaaacaactcgtctcctctttcgttcgagttaaagcacacgacaaggtacagtaggtgcaagtagttggtcagaatgagctgctgctgggcctgcttgagctccttgtgaatggcatttgcacgcttgtagtcgatgcccgccttgaaggcagctcttccaatattggtcagcttaaatggcgtcgactgtccaatgagcaaacgtcgatcgccagcgggcctatttgcctgactaacatcctgcgatgttataatatccgaagaattgatcttagatttcgcctgcggttcggcaagctgcagcactttatttttgaacatctctcggagaatacggagcacgatctcgttcacggccacctccagggatttggcctgcacagacaacagtgtgctgtttaccagccgattcaagtctctacgacattctgctaaattcaagccaaccacgctgagaataagcgactagggaaaaaaattatattatgtttatgcatatcgtaatttggattaatcaaataaaagcataaaaagagatagaactgccttctgtcccattactgccaatttgaaaaaaaaattacaaatctatatagaagggatcagcaaaattaaaagcacattttgcaataatgtaggatgtggccaaatttggtagttaggacgcggtcactttgtttagaaaaatgtaaaggtaacacttttcatttcccttcttcagtctttaaacagatttcgcctaggaagtcagtgacagcaagaaactacataaaaatctgcgattttaaaaaaataattgcaatttaaggaaatattcatcggtgtaagtaaaaaaatagtaaataaaataagagaaactccggaaatttttacgtttaaacaaacgataaaatgcaaaatgagtgttttaacaaaattaatattttctttctcatcaagatctgcgtaaaaaattcacctaattttcgctaattaaaaacttacttgcagtccaactgcctcattttgatccaaggaacttaaagccttatccataggcgagaaaagcatttgtccgaccagcagattgtctttgctctgggctatcaggatactctcgccagcttcacccaatccggcgcgacctgctcgtcccaccatttgcttatacttgcacaaagtcagaaattcttgacccacataaggagcacgtatgattacccgcttggctggtaggttgacccctgcagccaaagtggaggtgcaacaaatgactgtgacgactccaaatctatacgcagtctcaatgtacttcctctcatcggttgtcaagcccgaatgatgataggcaatcccgtagggtagggttttcgccaacaccgggctgagtatgccgcacatcttgtccagggcatccattagatccaacttctcgctacgccgatgctcaaaaaatttatgctttggcacaatgcgactgagaagtagcgccacgttctcacagtttttgcggctaggacagaaaaccaagcagcagtgttccggagcacattcgcttatcaaaccagccagatggtcgggatcggcgcgtttgacggcttcactgtactgcaaataaaaattagatcaaaatcttttactttcggcaacattttccaaacgtctaattcgaatattccttacattgtactctacactgcgactggggacgaatatctcctccagcgtttgaccagccgaatttatttccaacaaatcggggccacatttgatgtactcctttagctcaactgggcgaaagcccctggtgtatacatcagcattcaaaaaagaggatatttcgctgagatttcctattgtggcactcatgccaacaatttgaatattggctagaaaacaaaaattccattaatctgtacaaaaagtaccacaaaatatccacttaccatttagaaacatcactttggtaaggaaagcctccaaggtggcccctctacccttttcgcctatcaaatgcagttcatccaccaccaccagacctatctcatgaggacgttgtacgtctatcaggctgtccattagaacagctcccttttcgatggaggcaatgaagagactacgtcttttgcgacgcggctgaggcggacacttgcccttgccggccgtgtattcctccacaatgaaatccaggtcgattgcaaatggagacatggcgctcaccttctcctggacaatcgacacatatggcaggatgaacagcacattgcgttcgcggcaaagtaattcacgcagcataaggatttcggctactagagtttttccaccacttgtgggcagagcgtagatcagatttttgcgctgcctgatggcaggtagatttaggcactcgtcctgccattctgcggaattaatgggatcgtaaactaagcttatattggttttcaattagcagtcataccataaagactattaatgcctttgtgttccagaatcatctttttgaccttatccggcaggccatagaattcgcccttgctgggaaacttgtctatatcttggttattcttctcgaagtccgcaaaagcctgagtctcccaattgactggatctaggagggattggttcttcagctcttcgcaggtcacatactgagtgccctgcactaggccctcaatcacagatttggaaatgaaagacatggaatcgtctttaaggggggccagtagcttctctggtgttttgggcttcttaaaggtcattgcgtccaagaagagttgtgtgttttgaaccatgggatcactaaaatcatcggcgccatggaaaatatcctccatttcggcaatgctcagatcgttgaggttgattttcttaaacagcttgtcggcgttttcctcgtccgccaggtcgatttgatgtttatcagttggtgcactggcttcatccggtttagaggcactgttgggtggaacactctgtgcacttggaaaggatgtgtccgcaaagagtcccagtccatcatccgacccactttgcgtcatcttgttggtacttgtggttgcttgcgtgccaaagagctcctcctttcgtccgtccagcaaatcctccagatgcgcgttggaaaagaagctgtcgtcgtcttcgccctccggccaaaagaggttttcggtgcactgacgcttggcatggctttcgcttgttgattcctcgctcaaatccaaacttctttttttgcacaaattatgcttatttgccatttggcgcgaaatagtgtgaacttcgcgtgaaaatgaaggaaaactcaggccagggctgcagcatgtaagccaagtttataaccgggatcgtgtctcaacttaagtgttgataaagtcgtattccctaacgatcgttccttttatttataaatataacatttacggtatacgattttcttcttttcgtgtttcctattaaataggcaaaatctggcaaaattttaagagctacgctaacaaaataattacaaccggcttaaatgtactttaacgttgcactcccctaattcgtttaacagcactgccatttactgtttaccgctgaccaaaaagtgcgtcttgttgctagtttaaaaaacgtaattaatacgggttttgaataccagaacaccttcgcgttttaaaaagtagattgaaatacttatgtttcttattacgggaattttgtatttgcatagagaaatccaacaatcaatgcagtaattcactaccacttggcagatttgttgttatagtaagtgcatgaagcgtcgcgcacattcaatgttcaattttcactcaaagttagcagttttcacaatttccttcagttgagtacgagtgtaacgtaacagttggtcaggatgagcagcgtgtggtacctggaacatgtgaccactggcgcacggctcatcctgcacaacggcactaatttgatgggtcgccactcgcgttgcaggataatcttgggtggacagtaccaatttgtgtcccgggagcacgccaatatcatcgtgagcgaaaagggcgttgaggttgagtctctggtaggttattgcagctcacctaagatgtacatgcttttaatagtttatgcttttatcacagaaccccctgaatgggctcttcatcaacgggggcaaattgggcgacaagatcaaccgtctggcagtagctgagggctccacaatcagcctaggagtcacgggagtcaacctaaatgaaataactggcatacatg

SEQ ID NO: 17627 - DNA, 3156 bp, DROSOPHILA
atggcaaataagcataatttgtgcaaaaaaagaagtttggatttgagcgaggaatcaacaagcgaaagccatgccaagcgtcagtgcaccgaaaacctcttttggccggagggcgaagacgacgacagcttcttttccaacgcgcatctggaggatttgctggacggacgaaaggaggagctctttggcacgcaagcaaccacaagtaccaacaagatgacgcaaagtgggtcggatgatggactgggactctttgcggacacatcctttccaagtgcacagagtgttccacccaacagtgcctctaaaccggatgaagccagtgcaccaactgataaacatcaaatcgacctggcggacgaggaaaacgccgacaagctgtttaagaaaatcaacctcaacgatctgagcattgccgaaatggaggatattttccatggcgccgatgattttagtgatcccatggttcaaaacacacaactcttcttggacgcaatgacctttaagaagcccaaaacaccagagaagctactggccccccttaaagacgattccatgtctttcatttccaaatctgtgattgagggcctagtgcagggcactcagtatgtgacctgcgaagagctgaagaaccaatccctcctagatccagtcaattgggagactcaggcttttgcggacttcgagaagaataaccaagatatagacaagtttcccagcaagggcgaattctatggcctgccggataaggtcaaaaagatgattctggaacacaaaggcattaatagtctttatgaatggcaggacgagtgcctaaatctacctgccatcaggcagcgcaaaaatctgatctacgctctgcccacaagtggtggaaaaactctagtagccgaaatccttatgctgcgtgaattactttgccgcgaacgcaatgtgctgttcatcctgccatatgtgtcgattgtccaggagaaggtgagcgccatgtctccatttgcaatcgacctggatttcattgtggaggaatacacggccggcaagggcaagtgtccgcctcagccgcgtcgcaaaagacgtagtctcttcattgcctccatcgaaaagggagctgttctaatggacagcctgatagacgtacaacgtcctcatgagataggtctggtggtggtggatgaactgcatttgataggcgaaaagggtagaggggccaccttggaggctttccttaccaaagtgatgtttctaaatgccaatattcaaattgttggcatgagtgccacaataggaaatctcagcgaaatatcctcttttttgaatgctgatgtatacaccaggggctttcgcccagttgagctaaaggagtacatcaaatgtggccccgatttgttggaaataaattcggctggtcaaacgctggaggagatattcgtccccagtcgcagtgtagagtacaattacagtgaagccgtcaaacgcgccgatcccgaccatctggctggtttgataagcgaatgtgctccggaacactgctgcttggttttctgtcctagccgcaaaaactgtgagaacgtggcgctacttctcagtcgcattgtgccaaagcataaattttttgagcatcggcgtagcgagaagttggatctaatggatgccctggacaagatgtgcggcatactcagcccggtgttggcgaaaaccctaccctacgggattgcctatcatcattcgggcttgacaaccgatgagaggaagtacattgagactgcgtatagatttggagtcgtcacagtcatttgttgcacctccactttggctgcaggggtcaacctaccagccaagcgggtaatcatacgtgctccttatgtgggtcaagaatttctgactttgtgcaagtataagcaaatggtgggacgagcaggtcgcgccggattgggtgaagctggcgagagtatcctgatagcccagagcaaagacaatctgctggtcggacaaatgcttttctcgcctatggataaggctttaagttccttggatcaaaatgaggcagttggactgcaatcgcttattctcagcgtggttggcttgaatttagcagaatgtcgtagagacttgaatcggctggtaaacagcacactgttgtctgtgcaggccaaatccctggaggtggccgtgaacgagatcgtgctccgtattctccgagagatgttcaaaaataaagtgctgcagcttgccgaaccgcaggcgaaatctaagatcaattcttcggatattataacatcgcaggatgttagtcaggcaaataggcccgctggcgatcgacgtttgctcattggacagtcgacgccatttaagctgaccaatattggaagagctgccttcaaggcgggcatcgactacaagcgtgcaaatgccattcacaaggagctcaagcaggcccagcagcagctcattctgaccaactacttgcacctactgtaccttgtcgtgtgctttaactcgaacgaaagaggagacgagttgtttccggcagatgccagcattctgtttggagtttacacctcgcttccactggactcgcaggcaatgttcaaacaacttggatttacagaggcccatgcagctaggctatttaagacgcagtcggtgcaaggtccattgtccctgcagctgaatcgcctctacaaggtgcttattctggcggatatacttaacctcctaccgattccctccgtggccagcaagtacaacgtggagcggggaactctgcagcatctgatcagtcaatccacagcagcggcgagtgccattgttcgcctgtgcgaggagctggaagagttttggtgctataaaccattgtttgagcggatcttgcacaaaatggatcgatgcggcacatttgagctggagccgctaatggaactgccagcggttaagatcaatcgtgccaggcagttgtatgctgcgggttttcaaaccattggggatatagccagagtgaggccgtcgcacttagtccaatccttagagcacatgccgcttagagtggccacggaaattgtctcggcagcaaagataattttaatgaaaaagctcgaccacctggaagaggaaacggagaacctgaaggactgtttaaaaacgtctgataaaaattag

SEQ ID NO: 17628 - protein, 1051 aa, DROSOPHILA
MANKHNLCKKRSLDLSEESTSESHAKRQCTENLFWPEGEDDDSFFSNAHLEDLLDGRKEELFGTQATTSTNKMTQSGSDDGLGLFADTSFPSAQSVPPNSASKPDEASAPTDKHQIDLADEENADKLFKKINLNDLSIAEMEDIFHGADDFSDPMVQNTQLFLDAMTFKKPKTPEKLLAPLKDDSMSFISKSVIEGLVQGTQYVTCEELKNQSLLDPVNWETQAFADFEKNNQDIDKFPSKGEFYGLPDKVKKMILEHKGINSLYEWQDECLNLPAIRQRKNLIYALPTSGGKTLVAEILMLRELLCRERNVLFILPYVSIVQEKVSAMSPFAIDLDFIVEEYTAGKGKCPPQPRRKRRSLFIASIEKGAVLMDSLIDVQRPHEIGLVVVDELHLIGEKGRGATLEAFLTKVMFLNANIQIVGMSATIGNLSEISSFLNADVYTRGFRPVELKEYIKCGPDLLEINSAGQTLEEIFVPSRSVEYNYSEAVKRADPDHLAGLISECAPEHCCLVFCPSRKNCENVALLLSRIVPKHKFFEHRRSEKLDLMDALDKMCGILSPVLAKTLPYGIAYHHSGLTTDERKYIETAYRFGVVTVICCTSTLAAGVNLPAKRVIIRAPYVGQEFLTLCKYKQMVGRAGRAGLGEAGESILIAQSKDNLLVGQMLFSPMDKALSSLDQNEAVGLQSLILSVVGLNLAECRRDLNRLVNSTLLSVQAKSLEVAVNEIVLRILREMFKNKVLQLAEPQAKSKINSSDIITSQDVSQANRPAGDRRLLIGQSTPFKLTNIGRAAFKAGIDYKRANAIHKELKQAQQQLILTNYLHLLYLVVCFNSNERGDELFPADASILFGVYTSLPLDSQAMFKQLGFTEAHAARLFKTQSVQGPLSLQLNRLYKVLILADILNLLPIPSVASKYNVERGTLQHLISQSTAAASAIVRLCEELEEFWCYKPLFERILHKMDRCGTFELEPLMELPAVKINRARQLYAAGFQTIGDIARVRPSHLVQSLEHMPLRVATEIVSAAKIILMKKLDHLEEETENLKDCLKTSDKN

SEQ ID NO: 17629 - DNA, 4599 bp, DROSOPHILA
accgtgccagttttgctggctgtgccatcataggataggataccatctaaccagcctcggagcctccatcgagcacttttatccaactatttgtgcgttatatcccacctgtgcgaggatgcctagctggctggctgcttttatggctcggctggaggctcatttaaataagctgtccgttgtgcctatttaatgcgaatgcgaccaaactatcaggagaagccattaagaccattccatttacctgtggtctagaccaggtaaatatcaactttatggctgagtattaaaatgaagtgcacattaaaatacaatatgcttgaacttaaagtttatatgtaatttaggaaactaaaaactagagagtgaaggatagaaagttaatcactttagttccgaagtttgatcaatattcccgaaataagcgcaacgtgttagtaacatctaaatatgcgagtcattgcaataagtacaatatattctagtttttttttttttgatccactttggtacaccgcagtggagcacagccgccggagttgggcaaacacaaaggcggcagccaagacccacaaggaaacccaagaagaacaatggaaggagcccttaactcaacctcaatgagctgctcagaccgtttcggtggcgtatgagtaacgtgcggctgggggcgccggttgtgggcggatttatatagcataactccgggggctacttgttggatcttcaaatatttatgaaaagtgatgcaagtttttactcagcagcattgcagtggctgacttgccacagcgtcacactgatgaaaaaaactatgctactatttacattgtaacttatgatataatttgtatatcaaataaacctatcccaaattattagaaaatatttacatatatatataaatattaaatataaaatgtatctcttttatagcttcctgttttgcatcattattatattacttcttttacacaaccatattttttccgtactgtagatgcactcaaatctttggatatttatttggcgccggaaactttccttcctgctcgtcgtgtctggcctggtgcttctcggcctctggacatgggccatactaatcgatacgacagcctcagcacagcctcctgccgcccccatttccaattctgagcgccagcagcagcagcagcagtccacgggttaccagcaggtgcacatcatccagaagcttatcgagcaggcaaaccgggtgctgcgtgccgagcggctcaaggataacgctgtcgagaaatcgccatcgccagtccagcggctgggaaacgtgcgttccctgcgacccacacaggccaagaaggcgccgctgcccatgtccgagagcttcctgttcgagcaggagcgcctcaagattctggagcagcagcagcgccagagaaacgccggtatggaggaactgaacgccaatgccgaggacgagcgaatgctcagttcggcggagcgacagactcagtacgagcacgagcttcagaggatgggcgtgccggtggtggctggcatcgggccggatggtccgagagctcccgccgagcgtctcgttcatctggacttgaagggtgctccgcctaagctaagctttctcaagcaactgctgcccgtgctgcgggcactgggagccactggtctgctcatagagtacgaggacatgtttccctacagcggagttcttcagccgctggccgcgcacaatgcctacaaggaggacgaactgcgggtgagtctggaaatctttaggctgagatatatctaatatatgttcttctgcaggacttcctcgagtgcgctgcccttcatggactgagcgtaatgcctctcgttcaaacctttgggcacatggaatacgtcctcaaactctcgggcttcgagcagctgcgtgagctggctgagagtccacagtcgatttgccccagccagccacagagcatggccctgctggagcagatgctcacccaagtgatcgaattgcattcgcagtgcttgggtcaggcgacgcccgccaccaacgttcccgtggcgcgaatcaggttcacccatattcacatcggttgtgacgaggtgcagcgcatgggcgagtgcactacatgccgccagaggctacgcagtgagctcttcctctcgcacgtggtaagcatggcgcacttcattcgccgccagtggccgcacctgggtgtggtaatctgggacgaccagttgcgatcgatgtccctcagcgagctgcagcactcgcaagtgggcagctacgtggagccgatggtttgggtgtatgccagtgacatataccgattcattcagccacagctgtgggatacctatgccaaggtctttcccagcgcctggacggcgtcggcttttaagggagcctttggtgagagcttgttggtgccgccgctgcagcatcatcttgagaacaacatccgatggctggcagtgatcgccaaggaaggcggacgcttttcaaagggattaagaggtctggcactgaccggatggcagcggtatgatcatttcgcagtactctgtgaacttctgccagtaggcattcccagtctgatgacgtcgctgtcgaccgtctccaagggctacttcagcactaatccgcgggacaatgagctgctgcgtgtgctgcagtgcgtcttccagccggacagtcggcgatcgggtcgaccctggctggaactgcatccgaatgcccatcacagtcagctctttgctgtctgcaactatccgggtcacctggtcttcaaatatgccctgcgcctgtttgacaagctggccgagatccgactctatttgcagcagacccgggaccagagcgcctggctctccgactacaatgttcggcacaacttcagttcgccgctgagggtgcgcgaactgactgcgaggacgccgatgttgatcgaggagctgcgggcgatggcgagggaggcacagcagctgctgtgggaggtatacgacgagtacacggtgacggagtttgtggagcagcacatttatcccaccatcgaggcactgcagcgccagttggccagggcggaaatgctgctccagcgacgcacttggccacagagaccactgcctctgcccttgaaagtgcaggaggacatgggactggtgacgcatcagcaggagcaacaatgagaggcgccaggtgagtgccctgttggcagttaccttaagtatacctgaaatataatgccataccatttaacttttagccaaaatctgacaattggcctcgggccaaatatgagttacattgctttaatggactaatcgccaactggctggcagttcctgctccggatcttaatctactcgcatagtgatggcgttcgaaacgcccaagcccagcatcttgtggcttataagccaggataatacgaatgttaacagcagcagcggcttctcggcccaaaatacatacataatggtagcattagccacttgtaatactaataacatcaaatgttcattttttctagactactttgtaagcagcggctcaattatacaaacatagaacatattcatactgtaataaaaaataaatcaaaaaacctcttattgccgtcttccaattgaacgcatttttagtaaaaacgtttagtaaagcgcgtaggtgtctagaatctgtatgctgaatctgaaccttgtagacatttatacagaaagacggaaatggccagatcgactcggctcttgatcctgatcaagaatatatatactttttatggtcggaaacacttctagtccagtatacccttttactctactagtaacgggcgtaaaaaggtaataatcaattgcatagttctttctgaaatatatgtgtattaaaaaaggaatgaatgaacggatgctcattacttttattacactttcttataaagtaaattggtttatattcattttttaacgtatctcaatacctacaagaactttttgaacaatcattacgtattatatgtatttatatcgcaacgtaacgatatatcgcataacgtaagaccagggctgcaactacgaaatgaataataataaggtgcaattagttgcaaagttcaaaacttgtcagaattatcatatctattgtaattagccagcaaaagatttttcgagacaatacacaaaataaaagccacttgccaaataaataaagccggaagcagtcacaaaaaatctatattgaaaacctatatattgacaagaagatgaggtcgtgaggccgcgatgcgtggtccaagcttctggagttcaaaaaaggattttttgttcatgctttgccgccttgaaaattaattctggcggcttcaagacttcttcctattggtacaggatttcggtttgcatttgcaatgggatcgtttttggagagcgaaatccttcagacaaggactcatttacactgcttgaactcatcgtactacaattatacagaaaatttgcacaaattctgaaaaaaagggagaggagagcttaatatggcgtttatttgatatgcaagatgccagctattaactgtgatggagtatgttcctcctgcatgtgcgtgctggg

SEQ ID NO: 17630 - DNA, 2469 bp, DROSOPHILA
atgcactcaaatctttggatatttatttggcgccggaaactttccttcctgctcgtcgtgtctggcctggtgcttctcggcctctggacatgggccatactaatcgatacgacagcctcagcacagcctcctgccgcccccatttccaattctgagcgccagcagcagcagcagcagtccacgggttaccagcaggtgcacatcatccagaagcttatcgagcaggcaaaccgggtgctgcgtgccgagcggctcaaggataacgctgtcgagaaatcgccatcgccagtccagcggctgggaaacgtgcgttccctgcgacccacacaggccaagaaggcgccgctgcccatgtccgagagcttcctgttcgagcaggagcgcctcaagattctggagcagcagcagcgccagagaaacgccggtatggaggaactgaacgccaatgccgaggacgagcgaatgctcagttcggcggagcgacagactcagtacgagcacgagcttcagaggatgggcgtgccggtggtggctggcatcgggccggatggtccgagagctcccgccgagcgtctcgttcatctggacttgaagggtgctccgcctaagctaagctttctcaagcaactgctgcccgtgctgcgggcactgggagccactggtctgctcatagagtacgaggacatgtttccctacagcggagttcttcagccgctggccgcgcacaatgcctacaaggaggacgaactgcgggacttcctcgagtgcgctgcccttcatggactgagcgtaatgcctctcgttcaaacctttgggcacatggaatacgtcctcaaactctcgggcttcgagcagctgcgtgagctggctgagagtccacagtcgatttgccccagccagccacagagcatggccctgctggagcagatgctcacccaagtgatcgaattgcattcgcagtgcttgggtcaggcgacgcccgccaccaacgttcccgtggcgcgaatcaggttcacccatattcacatcggttgtgacgaggtgcagcgcatgggcgagtgcactacatgccgccagaggctacgcagtgagctcttcctctcgcacgtggtaagcatggcgcacttcattcgccgccagtggccgcacctgggtgtggtaatctgggacgaccagttgcgatcgatgtccctcagcgagctgcagcactcgcaagtgggcagctacgtggagccgatggtttgggtgtatgccagtgacatataccgattcattcagccacagctgtgggatacctatgccaaggtctttcccagcgcctggacggcgtcggcttttaagggagcctttggtgagagcttgttggtgccgccgctgcagcatcatcttgagaacaacatccgatggctggcagtgatcgccaaggaaggcggacgcttttcaaagggattaagaggtctggcactgaccggatggcagcggtatgatcatttcgcagtactctgtgaacttctgccagtaggcattcccagtctgatgacgtcgctgtcgaccgtctccaagggctacttcagcactaatccgcgggacaatgagctgctgcgtgtgctgcagtgcgtcttccagccggacagtcggcgatcgggtcgaccctggctggaactgcatccgaatgcccatcacagtcagctctttgctgtctgcaactatccgggtcacctggtcttcaaatatgccctgcgcctgtttgacaagctggccgagatccgactctatttgcagcagacccgggaccagagcgcctggctctccgactacaatgttcggcacaacttcagttcgccgctgagggtgcgcgaactgactgcgaggacgccgatgttgatcgaggagctgcgggcgatggcgagggaggcacagcagctgctgtgggaggtatacgacgagtacacggtgacggagtttgtggagcagcacatttatcccaccatcgaggcactgcagcgccagttggccagggcggaaatgctgctccagcgacgcacttggccacagagaccactgcctctgcccttgaaagtgcaggaggacatgggactggtgacgcatcagcaggagcaacaatgaccaaaatctgacaattggcctcgggccaaatatgagttacattgctttaatggactaatcgccaactggctggcagttcctgctccggatcttaatctactcgcatagtgatggcgttcgaaacgcccaagcccagcatcttgtggcttataagccaggataatacgaatgttaacagcagcagcggcttctcggcccaaaatacatacataatggtagcattagccacttgtaatactaataacatcaaatgttcattttttctagactactttgtaagcagcggctcaattatacaaacatagaacatattcatactgtaataaaaaataaatcaaaaaa

SEQ ID NO: 17631 - protein, 708 aa, DROSOPHILA
MHSNLWIFIWRRKLSFLLVVSGLVLLGLWTWAILIDTTASAQPPAAPISNSERQQQQQQSTGYQQVHIIQKLIEQANRVLRAERLKDNAVEKSPSPVQRLGNVRSLRPTQAKKAPLPMSESFLFEQERLKILEQQQRQRNAGMEELNANAEDERMLSSAERQTQYEHELQRMGVPVVAGIGPDGPRAPAERLVHLDLKGAPPKLSFLKQLLPVLRALGATGLLIEYEDMFPYSGVLQPLAAHNAYKEDELRDFLECAALHGLSVMPLVQTFGHMEYVLKLSGFEQLRELAESPQSICPSQPQSMALLEQMLTQVIELHSQCLGQATPATNVPVARIRFTHIHIGCDEVQRMGECTTCRQRLRSELFLSHVVSMAHFIRRQWPHLGVVIWDDQLRSMSLSELQHSQVGSYVEPMVWVYASDIYRFIQPQLWDTYAKVFPSAWTASAFKGAFGESLLVPPLQHHLENNIRWLAVIAKEGGRFSKGLRGLALTGWQRYDHFAVLCELLPVGIPSLMTSLSTVSKGYFSTNPRDNELLRVLQCVFQPDSRRSGRPWLELHPNAHHSQLFAVCNYPGHLVFKYALRLFDKLAEIRLYLQQTRDQSAWLSDYNVRHNFSSPLRVRELTARTPMLIEELRAMAREAQQLLWEVYDEYTVTEFVEQHIYPTIEALQRQLARAEMLLQRRTWPQRPLPLPLKVQEDMGLVTHQQEQQ

SEQ ID NO: 17632 - DNA, 1837 bp, DROSOPHILA
tatatatatatgtatatatatatatatgtgtgtgtgtatatatatatgtatatatgtgtcattcaattgagtggggaattagtaaaatcagcgaacgatcaaacctgcttaacaaagcctaatccttgaaaattctttcttttcttatacatttaagcattattactcttttcgcaatttcttatttatttagtttggtttggtttggttttcgggctggcctaacaagcttttgttcaaaattgattttctttgaagtaagcccatttttgagtgggtctttcgtttcgtttcttttctttttttcttttctttcttttcaggggcgaaatggaagtaaggtggcttgtcggactcgacatcttctgactgcgaaccggcggacccgactccacctctaaaccggagtcggagataccggtgcctcagaaaacctaacgtgtagcgattactcacttagtacttgcaagtcgatggacacttcgggcagttgctgcccacggtccacgtcgtatgagttgcagatgtagcgacccgcatcctcgggtcgcaaattggtcagcaccaggatctggctatccgtacgggcgttgttcggcaggggtcttctgtcgtcgcggaaccagttgaacctgacattattgctgagtggagccccgtcagagcgttcccacaccacgtctgtgtaggtgtcatcggaggagtagcactcgacatcggtggattcacccgctcgcaggttcgaggactgatcgtccagtttgaggctatagtcgcggctctttgctggcaattgcggtggcaggtagatggggctgttgggtggcggggtagccgctgatatcgccaaccatcagccgtcaatcgtcaataggacaccagatacacacgcacattgaaagaaggcgacaggtcgacaaggtggacaaggatggtcggcggaacgatcacaattcagcgacaattcacaagtgcgcatgggtgcatgtggtgtgttcgtgtgtttatgtgtgtgtatttgtgtgggtggtttattcgtgtttgtgtgttggtgagcgatggaaatgggagtaagatagtaaaaaatacacagaaagagaaaacagttagcaaaattacatgtctaaattggtcgttcaaacagaaggagatcgatagtcatcgaacgatacgttcatatttgttctgcatttatgtatatataaacaaaaaatgtacaaaacatgtatttcaattaattttaaggattatcgttcgacttccatcgcatctcggcattttttagttgtttcgttttggaatttggtttcctagttagacaatacatagatataccgatatacatttagagaggcgacagagagggactttgtggattggtgaggtgaactacattatatggagctactattattcaatactgctacggatcgaatcacacaaatacgaatacatggggtgttacatatgggatcttttagattggttttgtactggttttcgttcatcattcatctggagcgttttgaattctacagttctaatttggacacgggttaccactaaaatcacagatgattgatttcggtttttggtttgacaaatatacatataaggtagatacggttaagggtacactttacaaaatttcgagtacttagctatcgaagatcatgtgacttagagtgcgcgctcatatgtgtaggtgtattgttggcagtgtctcgtattatttacaaaatgtttattgttcttatgtctagattgggttattaagttagtaactctgtagccagccgcatgcaaattcacaaacatccacggttagaacctgtta

SEQ ID NO: 17633 - DNA, 12603 bp, DROSOPHILA
cattcgatcggggtgaaacgcacctaaactggacagccagttcggctgtaagcttcgttcgcataataaataacatgaatacaatacaagtgtttctcgcagtgcatcgctgcactgacaactgtcactggtttttgacacggattccctatccttcgcgagttaagctaactgcaaccaaaagctaaacactcgggggcaacctttatgacctccgaaacgcctgaccccctaacccccagtcctcagccccccctagctaatgactctttaaataacgcgctgcaccaaggggttaaggctcagaggggatggatgaggatgtggaatgtgtgcatattcatgagcttcgtgttaagctgccattttgacgtcgactgttggcagtgtttacatagccgaaaaagccgagcgaagaacaagtgccaggccaacgagtttagatgcaataatggcgattgtatcgatgccagaaagcgttgcaacaacgtttcggattgtagcgaaggcgaggacgagaacgaggagtgccccgccgcctgcagcggaatggagtaccaatgtcgcgacggcacgcgctgtatcagtgtgagtcagcaatgcgacggtcactccgattgcagtgacggcgacgacgaggagcattgcgacggaattgtacccaagctacgatacacgtgccccaagggaaaatttacgtgccgggacttgagctgcatatcgattgttcatcgctgcgatggtcgggccgattgtccgaacgatcgatcggacgaggagggctgtccctgtctgtacgacaagtggcagtgtgacgacggcacctgtatagctaaggaactactctgcaatggcaacatcgattgtcccgaggacatttccgatgagcgctactgcgagggtggctatgatagcgaggaatgtcggtttgatgagttccattgcgggactggtgagtgcataccaatgcgtcaggtgtgcgataatatctacgattgcaacgattattccgatgaggttaactgcgtcgaaggagaagaggaggatagggtgggcatacccattggccaccagccgtggaggccagcgtccaagcacgacgactggctgcacgaaatggacaccagcgagtaccaggtgtaccagccaagtaatgtctatgagaaggccaattctcaaaatccatgtgcaagcaaccaattccggtgcaccacgtcgaatgtttgcataccgctgcatttgcgctgcgatggcttctatcactgcaatgatatgagcgacgagaagtcctgcgagcagtatcagcgtcacaccactacacgacgcccattgaccttggccacgcccacctcgagaatcaccacccagggcccaggtcttctggagcgtcgtaataccaccacagccaccgaagcatcgcgatggccatgggcaacgaaaacgacaacaatcgcgaccacgacttctaacccaataacaacagttggcgtagcgaacagcccaccccagacatgcctcgaaaacatcgaattcgcgtgccacaatcgcgattgcatttcgattgagagcgtctgcgatggcatccccgactgcggacgcaatgaagacgaggacgacgctctgtgcaagtgcagcggcgacaagtacaaatgccagcgcggcggaggctgcattccgaaatcccaggtgtgcgatggcaaacctcaatgccacgaccgcagcgatgagagtgcatgtcacctccatggaaggttaaataaaactcgtttgggggtcaagtgcctggagagccagtatcaatgtggcgatggaagctgcatctccggctacaagcgctgcaatggcatccacgattgcgccgatgcctccgacgaatacaactgcatctatgactacgaagacacctacgacaccgacccgaacaacaatccattgaatgaatgtgatatccttgagtttgaatgtgactacagtcagtgtttgccgctagagaagaaatgcgatggctatgcagactgcgaagacatgagcgacgagctcgaatgtcagtcgtacacagaccattgtctagagtctgagttcgaatgcgatagctactgcctgccccgcgatcagttgtgcaacggaatacccaattgccaagatggcagcgatgagcgcaactgcaccttctgccgggaagacgcctacctttgcaacaccggcgagtgcgtggccgataatcagagatgcaacggcatcgccgattgcgccgatggcagcgacgagcgtcactgcgcaaggatatattgtccacctaacaaactagcctgcaatggcacttgtgtcagtcggagaataaagtgtgatggcatccgcgactgcctcgatggctatgacgagatgtactgtccggagaccaacaaccactatcccacacaaaatgtgaatgttatacgaccaaaactgggccccaatcctataccaaaatcgtgccgcccccatgaatggcagtgtgcgaatctcgagtgcatcgatagcagtttgcagtgcaatgaaattaaggattgttccgatggatccgatgaggaactcagcgtttgctttggcactgccaccacccgactcaagcccagcgactgcagtccggaacagttctactgcgatgagtcgtgctacaatcgatccgttcgatgcaatgggcacgtggattgctcagatggtagtgatgaggtgggctgttcactgccatgtccgcaacaccagtgtcccagtggccggtgttatacggaaagtgaacgatgcgatcggcacagacactgcgaggacggctccgatgaggccaactgtactgccatcttgtgcaaggataacgagttcctctgcttcgatcgtcagttttgcataaatgcaacgcaacaatgtgatggctactacgactgccgcgatttttccgatgagcagaactgcattggctgttacgcaaaccaattccgttgcaacaatggtgactgcgtttccggatcggctccctgcaacggatattccgagtgcagtgatcactccgatgagctcaactgtggtggaacccaggagtgtctgcccaatcaattccgctgcaatagtggccagtgtgtgagctcctcagtgcgatgcaacggacgaaccgattgccaggatagctccgatgagcaaaattgcggtcatcgtcatacagaggtcagtcaaggcctggaaaccactggagtttttaccacctccacgaccagcaccactgccatgacgccattgagaatcatctgcccgccaacctcatttaaatgcgaaaatggtccctgcatttcgctgggtctcaaatgcaatggacgagttgattgtccctatgatggtagcgatgaggcggattgtggtcaaattagcaacgatatcgatcccgccgatagtaatgatcgcagaccgaaccaactgaatctcaagacctatcccgacagccagatcatcaaggagaataacgacgttggatcccgtccggaatcagcctgcacggaatatcaggccacctgcatgaacggcgaatgtattgacaagtcgtccatctgtgacggaaatccggactgttcggacgcctccgatgagcaaagctgcagtttgggtctcaagtgccagcccaaccagttcatgtgctcgaactcgaagtgcgtggaccgcacctggcgatgcgatggcgagaatgactgcggagataattccgatgagacctcctgcgatccggagccaagtggcgctccctgccgctataatgaattccagtgccgcagtggtcattgtatacccaagagcttccagtgcgacaatgttcctgattgcacggacggtaccgatgaagttggatgcatggcacccttgccaatccgccctccaccccaatctgtttcccttttggagtatgaggtgctcgagcttacgtgcgtggccaccggaaccccaactcccacaattgtatggcgtctgaactggggtcatgtgcccgataagtgcgagtcaaagagctacggtggaacgggaacacttcgttgtccggacatgaggccgcaggacagtggagcctactcgtgcgaaattattaacacacgcggcacccactttgtgaacccggacaccattgttaccgttagaccagtgcgtacagatgtgtgcgaggccggattcttcaatatgttagcccgcaaagcggaggagtgcgtccagtgcttctgtttcggagtagctaaagcctgcgacagtgccaacttatttacatatgccatccacccgccgatcctttcacaccgcgttgtcagcgttgagctgagtccacttcgacagattgtgatcaatgaggcagcgccaggacaggatctgctcacactgctacatggcgttcagttcagggccaccaatgttcacttcagcggccgggagacgccttatttggccttgcccgcggattacatgggcaaccagctaaagtcttatggcggaaatctacgatacgaggttaactaccgcggcagcggaagacccgtcaacggtccagatgtaataatcactggcaatcgttttacactaacttatcgagttcgcactcagccgggtcaaaacaacagggtgagcattccattcgtgccaggtggatggcaaaagcccgatggtcgcaaggcgtcgcgtgaggagatcatgatgattctggccaatgtggacaatatcctgatccgactcggatatctggatagcaccgctcgcgaagtggatcttataaatattgccttggattcggcaggcactgccgataagggactgggtagtgcgtctcttgtggagaagtgccagtgcccacctggttatgttggtgattcgtgtgagtcctgtgcctccggctatgtgcgacagcccggtggaccatggttgggtcactgtgtgccgttcatccctgattcttgtccatccggaacttatggagatccccgtcgtggtgtgccctgcaaggagtgcccatgtccactaaccggcagcaataactttgccagcggctgtcaacaaagtcctgatggcgacgtggtttgccgatgtaatgagggctacacaggcaggcggtgcgaacagtgcgccgccggataccagggcaatcctttggctgcgggaggaatttgccgcagaatacccgatacttcctgcaacgtggatggcacctactccgttcatagcaatggaacctgccaatgcaaggatagcgtaattggcgaacagtgcgacacatgcaaatcaaagagtttccacctcaattcgtttacatataccggttgcatcgagtgcttctgcagcggagtgggcttggactgtgatagtagcacgtggtatcgcgatcaagtaacgagcacgtttggaagatctcgtgtcgatcacggatttgttttggttactaactacatgcaacccacgccagacaccgtacctgtctcaatggccgcagaacccaatgcgttaagctttataggatcggctgatcaatctggaaatacgctctactggagtctgccagccgcctttttgggaaacaaactttcttcatatggaggcaagctgacttacaccttaagctacagtcccctgcccaacggcattatgtctcggaacagtgccccagatgtggtgatcaagagtggcgaggatctaaggctcatccattataggaaatcccaggttgtgcccagtgtggccaacacctattccgtggaaatcaaggaaagtgcttggcagcgcggcgacgaagttgtggccaaccgtgagcacgttctgatggcacttagcgatattacggccatctacataaaggccacatacaccactagcaccaaggaggcctcgttgcgacaggtgactttggacgttgccactccaacgaaccttggcactccacgtgccgtcgaagttgaacagtgccgctgtcccgagggctatttgggtctttcttgtgagcagtgcgctcctggctatgcccgcgatccggagggcggaatctatctgggactctgcaggccttgtgagtgcaatggacattccaaatattgcaacagcgataccggtgactgcgaagaatgttctgacaataccgaaggtcctagctgtgaacgatgcgctgctggctatgtgggtgatgccacccgtggaacaatttacgactgccaacccgatgaaggctacccgatcccgagtcctccggcacccggcaaccaaactttggaatgcacggcctattgccaaatagagggcatctatgattgccgcggcaacgaatgcctgtgcaagagaaacgtgattggtgatcaatgcgaccaatgccgccctggaacctatggactgtctgctcaaaatcaggatggctgcaaagagtgctactgctctggattggccagccagtgtcgttcggcagctctgtaccgccagctaataccggtggactttattcttaacgcaccattaattacagacgaaagcggagctgtccaggacaccgagaacttaattcccgacatatctaggaatatgtatacctacacgcacacctcctatctgcccaagtactggagtcttaggggaagtgtgctgggcaaccagctattctcgtacggtggccgcctgtcgtacagtctaatagtggagtcatatggcaactatgagcgtggccacgatattgtgcttattggcaatggattgaagctcatctggtcgcgacccgatggaaatgagaatcaggaggaatacaatgtccgattgcacgaggacgagcaatggacccgccaggatcgcgaatcggcacgaccggcttctcggtctgatttcatgactgtgctgtcggatctacagcacatcctaatccgagccacacccagagtgcccacacaaagcacttcgatcggcaatgtcattctggagagtgcggtgaccacaaggacgccaggagctacgcatgcttccgacatcgagttgtgccagtgcccatccggatacgtgggcacctcctgtgaatcatgcgcacctcttcactaccgcgatgctagcggatcgtgcagcctgtgtccttgcgatgtttccaacacggagtcgtgtgacttggtcagtggcggatacgttgaatgtcgttgcaaggcacgttggaagggcgatcggtgtcgcgagatcgacaccaacgatccaacggatatcggtacagaagatcccgtgctcacccagattatcgtatcgattcaaaagcctgagatcaccattgtgcccgtaggcggttccatgaccctcagctgtagcggtcgaatgcgttggagcaatagtccagtcattgtgaactggtacaaggagaacagccgcctgccagagaatgttgaagtccaaggcggaaatctgtacctgtacgatctacaggtcagcgattctggagtctacatctgccaggccgtcaacaatgaaaccgccagcgtgtttaaggacactgtatccattaccataaccaagaaagaccagctctcaccggctgagattgtgaatttgccgagccacgttacatttgaggagtacgtgaacaatgagattatctgcgaagtacttggcaacccagcacccagagtcacctgggcgcgagtggatggccatgcggatgcccaaagtacccggacatacgacaaccgcttgatctttgattcgccaaggaaatcggacgaaggccgctatcgctgccaggcggaaaatgaccagaaccgagatgagaagtacgtgatcgtctatgttcagagcaatccgccccagccgccgccgcaacaggatcgattgtacatcacaccggaggagattaatggcctggccggcgagtccttccagttgaattgccaatttacaagtgttgcctctctgcgctacgattggtcgcacaatggtcgctccttatcctcttcgcccgcgcgaaatgttgagatccgtggcaacaccctggaagttcgcgatgccagcgaaagcgactccggcgtctacacctgtgtggcgtatgacgtacgcacccgccgcaactttaccgagagcgcccgtgttaacatcgaccgacgcgaagaacaaccatttggcaacaaaccgatcatcgagagcttggagcagaatatcctgatcatccagggcgaggactatagcatcacctgcgaggcgagtggatcgccatatccatcgatcaagtgggccaaggtgcacgacttcatgcccgaaaatgtgcacattagtggcaacgtgctgaccatctatggagcacgattcgagaatcgcggtgtctactcctgcgttgccgaaaatgaccacggatcagatttgtccagcacaagtatcgacattgaaccccgggagcggccgagtgtaaagattgtatcggcgcccctgcaaacattttcggttggcgctccggcatccctctactgcacggtagagggaattcccgatccgaccgtcgaatgggttcgtgtggacggccaaccgttgtcgccgcgtcacaagatccagtcacccggctacatggtaatcgacgatattcagctcgaggatagcggagactatgagtgtcgcgcaaagaacatagtcggcgaggcgaccggcgtggccaccattaccgtccaggagccaactctcgtccagataattcccgacaacagggatcttaggctgacggagggcgatgaactctcactgacctgcgttggcagcggcgtcccaaacccggaagtcgaatgggttaatgaaatggccttgaaacgggatctctacagcccaccgagcaatacagcgatccttaagatctaccgagtgaccaaggcggatgcaggcatatacacctgccatggcaaaaatgaggcgggtagcgatgaagctcacgttcgcgttgaggtccaggaacggcgaggagatatcggaggagttgatgatgattccgaccgggatcccataaactacaatccgccacaacaacaaaaccctggcatccaccagccgggcagcaaccaactcctggccaccgacattggcgacaatgtgaccctgacctgcgacatgttccaacccctgaacacgcgctgggaacgcgtcgacggggcaccactgccccgcaatgcctacacgattaaaaacaggctggagattgtgcgcgtggaacagcaaaatctgggccagtaccgctgcaatggaatcggtcgcgatggcaacgttaagacctatttcgttaaagagctggtccttatgcccctgccccgaatcaggttctacccgaatattccgctgaccgtggaggcgggtcagaatttggatgtgcactgtcaggtggaaaacgtgcgtccggaggacgttcattggagtaccgacaacaatcgaccactgcccagttcggttcgcattgtgggcagcgtcctgcgcttcgtgtccatcacacaggcagctgccggtgaatatcgctgctctgccttcaaccaatatggaaaccgatcgcagatcgcaagagtggcagtaaagaagcccgccgacttccatcaggttccgcagtcccagttgcaacggcaccgcgagggcgagaacattcaactgcaatgcacggtgaccgatcaatatggcgtaagggctcaagacaatgttgagttcaactggttccgcgacgacagaagacccctgccgaacaacgcccgtacggatagccagatcctggtgctgaccaatttgcgacccgaggatgcgggtcgctacatctgcaactcatacgacgtggaccgtgggcagcaactgcccgaagtgtccatcgacttgcaagtactaacggctaccccgccacccaacagccccatctacctgccaccgcaattgccagcaaagagccgcgactatagcctcaaactggacgatcagtcctcgaacctgcgagcgggtgaatccaccgatgtcgagtgctactcctccgatgacacctacacagacgtggtgtgggaacgctctgacggggctccactcagcaataatgtcaggcaagtgggaaatcgtctggtgatcagtaatgtgtcgccaagcgatgccggtaactacgtgtgcaagtgcaagacggacgaaggggatctgtacaccaccagctacaaactggaggtcgaggatcagcctcatgaactcaaaagctccaagatagtttacgccaaggttggcgccaatgccgatttgcagtgcggggccgatgaaagtcgacagcccacctatcgctggtctcgccaatacggccaacttcaagcgggacgcagtctaatgaacgagaaactgtccctggacagtgtgcaggcaaatgatgccggtacgtatatttgcaccgctcaatacgccgatggtgagactgcagacttccccaatatcctggttgtgactggggcgattccccagttccggcaggaacctcgcagctacatgagcttccccacgctgccaaactcttcgtttaagttcaacttcgagctgaccttccgaccggaaaacggtgacggtctcctactgttcaacggacaaacccgcggaagtggcgactacatcgcactttcgctcaaggatcgctatgcggagttccgttttgattttggtggtaagccaatgctggtgcgagctgaggaaccactggcgctgaatgagtggcacacggttcgtgtgagtcgcttcaagagggatggttacatccaggtggacgaacaacatccggtggccttccccaccctgcagcaaataccccaactggatctgatcgaagatttgtatattggcggagtgcccaactgggagctcctgcccgccgatgctgttagccagcaagttggcttcgtgggctgcatcagtcgcttaactctgcaaggacgcaccgtggaactgatccgtgaggcgaagtacaaagagggcatcacggactgccggccatgtgcgcaaggaccttgtcaaaacaagggagtctgcttggagagccaaaccgagcaggcctacacctgcatttgccagccgggttggactggaagggattgtgccattgagggcacccagtgtacgcccggagtctgtggcgccggacgctgcgagaatacggagaacgacatggagtgcctgtgcccactgaaccgatccggagatcgatgccaatataatgagattttaaatgagcacagtctcaactttaagggcaacagctttgcggcctatggaactcctaaagtcaccaaggtcaacataacgctctccgtacgtccggcaagtttggaggactccgtgattttgtatactgcagaatcgactctgcccagcggcgattacctggcactggtactgcgtggtggtcacgcggagctcttaataaatacggcagctcgattggatcccgtggtagtgcgatctgctgagccactgcccctgaaccgctggacaagaattgagatcagacgtcgcctgggcgaaggaattctacgggtgggcgacggaccagagcgaaaggccaaggccccaggctcggatcgaattttgtcccttaaaacgcacctctatgtgggcggctacgatcgctccacggtcaaggtcaatcgggacgtgaacatcactaagggcttcgatggctgcatctccaggctatacaacttccaaaaacctgtcaatctcctagcggacattaaggatgcggcaaatatacagagttgtggggagactaatatgatcggaggtgacgaggatagcgacaatgagccaccagttccgcctccaactccagatgttcacgagaacgaacttcaaccatatgcgatggcgccgtgcgccagcgatccatgtgaaaacggaggaagctgcagtgaacaggaggacgtggccgtatgctcctgtcctttcggattcagtggcaagcactgtcaggagcacctccaactgggcttcaatgcctcgttccgaggcgatgggtacgttgagctgaatcgaagtcacttccaaccagctttggagcaatcctacacttctatgggcatcgtcttcaccaccaacaagccgaacggtctgctgttctggtggggccaagaggccggagaggagtacaccggacaggactttatagctgccgcagtggtggatggctatgtggagtactcaatgaggctcgatggcgaggaggcggtaatccggaacagcgatatccgcgtagacaatggggagcgacacattgtgatcgctaagcgggacgaaaacaccgccattctagaggttgatcgcatgctgcattcgggtgaaacccgacccaccagcaaaaagtcgatgaagctgccgggcaatgtttttgtcggtggcgctcctgacctcgaggtgtttacgggtttccgatacaagcacaatttgaacggctgcattgtggtcgtcgagggcgaaactgtgggccaaattaatcttagttctgctgccgttaacggagtgaatgccaacgtctgtcccgctaacgacgatccactgggaggaaccgaaccgccagtcgtctgaggacacaaccaacagccgaaactagctttttaattaaacatt

SEQ ID NO: 17634 - protein, 4072 aa, DROSOPHILA
MSFVLSCHFDVDCWQCLHSRKSRAKNKCQANEFRCNNGDCIDARKRCNNVSDCSEGEDENEECPAACSGMEYQCRDGTRCISVSQQCDGHSDCSDGDDEEHCDGIVPKLRYTCPKGKFTCRDLSCISIVHRCDGRADCPNDRSDEEGCPCLYDKWQCDDGTCIAKELLCNGNIDCPEDISDERYCEGGYDSEECRFDEFHCGTGECIPMRQVCDNIYDCNDYSDEVNCVEGEEEDRVGIPIGHQPWRPASKHDDWLHEMDTSEYQVYQPSNVYEKANSQNPCASNQFRCTTSNVCIPLHLRCDGFYHCNDMSDEKSCEQYQRHTTTRRPLTLATPTSRITTQGPGLLERRNTTTATEASRWPWATKTTTIATTTSNPITTVGVANSPPQTCLENIEFACHNRDCISIESVCDGIPDCGRNEDEDDALCKCSGDKYKCQRGGGCIPKSQVCDGKPQCHDRSDESACHLHGRLNKTRLGVKCLESQYQCGDGSCISGYKRCNGIHDCADASDEYNCIYDYEDTYDTDPNNNPLNECDILEFECDYSQCLPLEKKCDGYADCEDMSDELECQSYTDHCLESEFECDSYCLPRDQLCNGIPNCQDGSDERNCTFCREDAYLCNTGECVADNQRCNGIADCADGSDERHCARIYCPPNKLACNGTCVSRRIKCDGIRDCLDGYDEMYCPETNNHYPTQNVNVIRPKLGPNPIPKSCRPHEWQCANLECIDSSLQCNEIKDCSDGSDEELSVCFGTATTRLKPSDCSPEQFYCDESCYNRSVRCNGHVDCSDGSDEVGCSLPCPQHQCPSGRCYTESERCDRHRHCEDGSDEANCTAILCKDNEFLCFDRQFCINATQQCDGYYDCRDFSDEQNCIGCYANQFRCNNGDCVSGSAPCNGYSECSDHSDELNCGGTQECLPNQFRCNSGQCVSSSVRCNGRTDCQDSSDEQNCGHRHTEVSQGLETTGVFTTSTTSTTAMTPLRIICPPTSFKCENGPCISLGLKCNGRVDCPYDGSDEADCGQISNDIDPADSNDRRPNQLNLKTYPDSQIIKENNDVGSRPESACTEYQATCMNGECIDKSSICDGNPDCSDASDEQSCSLGLKCQPNQFMCSNSKCVDRTWRCDGENDCGDNSDETSCDPEPSGAPCRYNEFQCRSGHCIPKSFQCDNVPDCTDGTDEVGCMAPLPIRPPPQSVSLLEYEVLELTCVATGTPTPTIVWRLNWGHVPDKCESKSYGGTGTLRCPDMRPQDSGAYSCEIINTRGTHFVNPDTIVTVRPVRTDVCEAGFFNMLARKAEECVQCFCFGVAKACDSANLFTYAIHPPILSHRVVSVELSPLRQIVINEAAPGQDLLTLLHGVQFRATNVHFSGRETPYLALPADYMGNQLKSYGGNLRYEVNYRGSGRPVNGPDVIITGNRFTLTYRVRTQPGQNNRVSIPFVPGGWQKPDGRKASREEIMMILANVDNILIRLGYLDSTAREVDLINIALDSAGTADKGLGSASLVEKCQCPPGYVGDSCESCASGYVRQPGGPWLGHCVPFIPDSCPSGTYGDPRRGVPCKECPCPLTGSNNFASGCQQSPDGDVVCRCNEGYTGRRCEQCAAGYQGNPLAAGGICRRIPDTSCNVDGTYSVHSNGTCQCKDSVIGEQCDTCKSKSFHLNSFTYTGCIECFCSGVGLDCDSSTWYRDQVTSTFGRSRVDHGFVLVTNYMQPTPDTVPVSMAAEPNALSFIGSADQSGNTLYWSLPAAFLGNKLSSYGGKLTYTLSYSPLPNGIMSRNSAPDVVIKSGEDLRLIHYRKSQVVPSVANTYSVEIKESAWQRGDEVVANREHVLMALSDITAIYIKATYTTSTKEASLRQVTLDVATPTNLGTPRAVEVEQCRCPEGYLGLSCEQCAPGYARDPEGGIYLGLCRPCECNGHSKYCNSDTGDCEECSDNTEGPSCERCAAGYVGDATRGTIYDCQPDEGYPIPSPPAPGNQTLECTAYCQIEGIYDCRGNECLCKRNVIGDQCDQCRPGTYGLSAQNQDGCKECYCSGLASQCRSAALYRQLIPVDFILNAPLITDESGAVQDTENLIPDISRNMYTYTHTSYLPKYWSLRGSVLGNQLFSYGGRLSYSLIVESYGNYERGHDIVLIGNGLKLIWSRPDGNENQEEYNVRLHEDEQWTRQDRESARPASRSDFMTVLSDLQHILIRATPRVPTQSTSIGNVILESAVTTRTPGATHASDIELCQCPSGYVGTSCESCAPLHYRDASGSCSLCPCDVSNTESCDLVSGGYVECRCKARWKGDRCREIDTNDPTDIGTEDPVLTQIIVSIQKPEITIVPVGGSMTLSCSGRMRWSNSPVIVNWYKENSRLPENVEVQGGNLYLYDLQVSDSGVYICQAVNNETASVFKDTVSITITKKDQLSPAEIVNLPSHVTFEEYVNNEIICEVLGNPAPRVTWARVDGHADAQSTRTYDNRLIFDSPRKSDEGRYRCQAENDQNRDEKYVIVYVQSNPPQPPPQQDRLYITPEEINGLAGESFQLNCQFTSVASLRYDWSHNGRSLSSSPARNVEIRGNTLEVRDASESDSGVYTCVAYDVRTRRNFTESARVNIDRREEQPFGNKPIIESLEQNILIIQGEDYSITCEASGSPYPSIKWAKVHDFMPENVHISGNVLTIYGARFENRGVYSCVAENDHGSDLSSTSIDIEPRERPSVKIVSAPLQTFSVGAPASLYCTVEGIPDPTVEWVRVDGQPLSPRHKIQSPGYMVIDDIQLEDSGDYECRAKNIVGEATGVATITVQEPTLVQIIPDNRDLRLTEGDELSLTCVGSGVPNPEVEWVNEMALKRDLYSPPSNTAILKIYRVTKADAGIYTCHGKNEAGSDEAHVRVEVQERRGDIGGVDDDSDRDPINYNPPQQQNPGIHQPGSNQLLATDIGDNVTLTCDMFQPLNTRWERVDGAPLPRNAYTIKNRLEIVRVEQQNLGQYRCNGIGRDGNVKTYFVKELVLMPLPRIRFYPNIPLTVEAGQNLDVHCQVENVRPEDVHWSTDNNRPLPSSVRIVGSVLRFVSITQAAAGEYRCSAFNQYGNRSQIARVAVKKPADFHQVPQSQLQRHREGENIQLQCTVTDQYGVRAQDNVEFNWFRDDRRPLPNNARTDSQILVLTNLRPEDAGRYICNSYDVDRGQQLPEVSIDLQVLTATPPPNSPIYLPPQLPAKSRDYSLKLDDQSSNLRAGESTDVECYSSDDTYTDVVWERSDGAPLSNNVRQVGNRLVISNVSPSDAGNYVCKCKTDEGDLYTTSYKLEVEDQPHELKSSKIVYAKVGANADLQCGADESRQPTYRWSRQYGQLQAGRSLMNEKLSLDSVQANDAGTYICTAQYADGETADFPNILVVTGAIPQFRQEPRSYMSFPTLPNSSFKFNFELTFRPENGDGLLLFNGQTRGSGDYIALSLKDRYAEFRFDFGGKPMLVRAEEPLALNEWHTVRVSRFKRDGYIQVDEQHPVAFPTLQQIPQLDLIEDLYIGGVPNWELLPADAVSQQVGFVGCISRLTLQGRTVELIREAKYKEGITDCRPCAQGPCQNKGVCLESQTEQAYTCICQPGWTGRDCAIEGTQCTPGVCGAGRCENTENDMECLCPLNRSGDRCQYNEILNEHSLNFKGNSFAAYGTPKVTKVNITLSVRPASLEDSVILYTAESTLPSGDYLALVLRGGHAELLINTAARLDPVVVRSAEPLPLNRWTRIEIRRRLGEGILRVGDGPERKAKAPGSDRILSLKTHLYVGGYDRSTVKVNRDVNITKGFDGCISRLYNFQKPVNLLADIKDAANIQSCGETNMIGGDEDSDNEPPVPPPTPDVHENELQPYAMAPCASDPCENGGSCSEQEDVAVCSCPFGFSGKHCQEHLQLGFNASFRGDGYVELNRSHFQPALEQSYTSMGIVFTTNKPNGLLFWWGQEAGEEYTGQDFIAAAVVDGYVEYSMRLDGEEAVIRNSDIRVDNGERHIVIAKRDENTAILEVDRMLHSGETRPTSKKSMKLPGNVFVGGAPDLEVFTGFRYKHNLNGCIVVVEGETVGQINLSSAAVNGVNANVCPANDDPLGGTEPPVV

SEQ ID NO: 17635 - DNA, 6380 bp, DROSOPHILA
ttattttacctcgtatgtttagggatttatgcaagcctctgcttctgctagattcctactaatctgtgtatatgctaatattcagtcaatattatattcatatcttcaatggaggatcgaaaacctgaagttctgctctgttctgttcggttctaatgggaagagtatatagatttcggtttaccgaagatgaatacctcatctgtcaaatatatgtacaaattatcatatctttttagctttaagttttcgatgtttctctgttatttttgcatttaaagtggaacaaaatgaaagaaacagtcctaggcgacgatcatggtatcatatggtattatgatttatggtatatggtatataaggttgctggatccctcgcggtctcaactaaataacagtactaacttcgtatcggagctgtaacatggataaggcatgtggaggatttgatatcggaaatgagtaatgaaatgtgaattatgtgttaagtttgtggctggctctccggcaatgcaagaattggtttaattgttttctgtaatttattgtaccctaaaaatttgtttacaactaatactatgcatatgcttaaaattgattaaaaaatataatatttatatttatagatttattcacgatgctaagaactaaacgaattgtacgacaaaattgttgaataagaccaaaaaagggagccatgcagttcagcaatcccaattgggactcccaaaaaaggttaacaattacaaaaaaggtttttagggcggggtggggatttgttggttgaatggtttgtgtgtgtttgtgtgtgtgtggtgtgcgcccctagaaaaacggggcaatcttcttactggctaggattcaatattattcatatttaatattcaattactaggagcttaaaagtttgcattcatttatcggctgctatattctggctggcaaattaattaaaatatgtaatgcagtggtgtaacaaaaagggaaactactaacaattatgtttagatcggctctgttttgctttcatccgttttgtataattatgtataattattgtttacaagtagcataattaatagttacgtgtatatttgatgttggtttcttataaattgtttgttttttttttgttgttgcttgcgttttgttaaaattataaaattacctaatcaagaaaaccatcataataatagttgttactgctgctctgttctgtttgttttacgtttctgtctgtcaattgttatctacgttaggtggatgccttttaggccttccagttgttctgccgactgccactggccccactttgctgctggggcggtatcatctccagtagatattggcgctgcagctccgccgcccgctgaacttccgccatgctgttcgagctgctggaattcttcgccgatccggaggacgagctgctcttcttgttgttattgttgaaggctagcgaaaaaagagtggagagaacatttcattagtatggaatccgccataattacttgaaaattattggagatccaccgactgactgagtcgcattcctggtagccagttatgaatttcccagttaaggccattgtcatctcacctgccacttgtgccgcctgcgccatggccatttggtaagagtacaaaagcggtgcgaactgcatcatatgctgcggattgccaccaagtccttgtcccaaagctgaaatacagatttatttataagtttatacagtttatacagataagttgaatgttgcccaaaggcaggaccaaaacccacctctaaagagctgctgctggaacgcctgcatggctgccgccgtagcagctggcgaggaaccgctcagtcctgccgccggattagccgaacccgtcgatgctccgccaaaattacccaatcctcccagcgcagccagattgcccagctggctgaggttgcccaaattgccaaggttgcctagactggccaagctattgatattcaatccgcccatgccgccaagagcactcagatgagcagccgccgccagggtggccgccgagtatttgtcgtagttttgggcctgctgttgcgactgctgatcccgctgctgctgatctctttcccgctgatcgcgctgctgttgctgctgcgactgatggtgatgatcgagtcgatcgttgcgggaggatctcgaggatgtagtcggctcatggtgatgcgctggcgacggcccaggactaaggatacccgcctgctgagcggcaatagctgctgcagcggcggtggccgccgctcgcgaggatcgcgatcctccagatgacggcggtggtgtggcttgactttgtggtggcggtggcgttggacgcggtgtcgctggcgtcggcgtctggcatttggtgggtatcactgtcaccgacggcggcagattgacaagtgcagcagccgccgatgcatgcgacgcctgcagctgttcccgttcccgctgcatatgcgacgatgaggaattgctagacaccgcggagacagacagcgaattgccgccgccactcgatccatggttgtccaccggcgatggactgctctggctggccaaacgctgttcgatctcctgctcctgctgcagcgccttaacgaatgcctgtttcagtcggttggtgtgctccgccttgagtgccttcttcacattcgaggtgacgcactgctcgcaaatcactttgggatctttgttggctgaaagtaaatgggtttgttagattgcttatcacaattatttaaatatttgcacacttactctgtttctcccacttccacacgggtgtaaaatcaatcttgcactgggcacaacggaatggtgctgccacagcattggccttcttgttgacggtcagataatccacaacggtttccaaaccaagaagatacacaaaatccgtgttgctgggattgggaatgaagtgcatctctggcggtggtggctttggtggcggaatctgtaacaaatactccagtataaaaccaaaatatctcaattttcctaagccccttttccactcacctgaagcagcgtcttttccagctgcttgcgtagcgccattttagccgccgcctgtctttgagctggtgtctgggcatcttctcttggcgtggagcgatcattctgccaagaaataagtttattaatctatccgtgaatggaatttaattttttgttgttgttgtcagaaggactaaccttctgatcgttgtgctgattctgatgcgattgggacagtggtagcgccggcgtgatggaaacagaattgcttatggtcccaggtaccttcgaattatccgaaatattaggctgcatgtttcaacgatttggttgggtgtggtttttattttttaacaggatagcaaatacgaatacagagcaaagttgagtttttagtagtcgggtgattagttcaacgcgagaaatgaaagaatattaagtgccacttgcacgaagtcacctcggtttttgataaatcctcatacagaggccgacttcggcgtattttgacaggtgagtagtgttgggtagcaatgtttgaagtgttgtaaaattgtttgtgttgcatagtgttaggcagctggatttatcgaatattttttttcaattagaagttacattttaatatacaaaaaggaaaggaattctttacaaagttgtcaaattttataaaatttctgatgttatgaaatgactagctacaattttattatcttctgaatatatgtacgtatatttgataaataagacatgtttatatactaatctttctgtaataatttaaaatcgaatgtcacaccaatgcaataatcgaatatgaatttgactagtaccctttttaagtaaactatatatcgaaatacaaatagttagtgctgctttaatttgtttagtattgttagtatgttagttttaaatgtgtattgtattggtaagcgtgagtttttgtgttcttcaagtgtttggaatacatgtttggttgtataaaatgtttgtttgctttggtgtatagtgagtttacagtgtctttggtgcttttgggcaaaaggtgagagaaaaactcggcgcttacggcaacgattacattacaataactcacattgcgtggtttcagactggagggcggtgccgatgtgggcgtgatggtcaccgatggcgtgatggtgagattcggcaggttggtgcgcggcggcaaattgctcgagcggtgcgatgaggaggtggcgggcgtgatggtagtgccggcggccaaggtggcaccagcgggcagcgatgatcgtggcggcggcagtatggagttgctaccgctgcgatgttggccgctcatggcggccgctgcaattgccgaagcagccgccgccgctgaactcgagctgcccgttcgactgttggtggcgctgcggattggattggatatcatgttattagttataaaatgaggaacttgctgcaaattatatacgcaccttatgctcactgccggtccgccgctgccgctcaaactgctcctgctgcccttgctgtgggcgggcaggggtaccgccgacgtgggcgtcacactcagcgatcccttcgaggtgagagcggcgggtatcgccgatagcggattgttgggcgatacgctggtcggcgtcaccaccagattctccttcatcacctgctgcgactgcttgagtttcttgagcagcatcagtttggtctcctcattgcgcagatcctgccgcagcttcctcagactcttctcgcgctccttgagctctgcatggctcagctccttgatgggcacatacgggggcatctcctcgtcatccgtctccgaatcgatgtttccattctgctgacggccatttgtgcgagcgggtagtaacacaatgtctggggcctcggcataggatttgggttcggttcgtggtcgcagtactctccgctgaaccttgttctcatcctgaccgccgcctatggatccacttgtcgcacctgtgacaccatcactggcgttaatgctgttgttgttgttattgttgtttgcgctggagctattggtgttactgctactgttgttgttgttgttggtggtggtggtggtgctgctgctgttggagtttgtgttactgctattggaggtggtgccattattggtcgccggcgatgctgacggagtgatggtcaggccagcattgttggctgtcagcgcacgcagatcccgattactgagcgccgccggcggcggagccggcgttatggtcaacgccgggtcacgaccggaccccaaactcaagtcgaccacatcgtcgacctccattttggccattttcgctcgtcgcgtcgtcgtgattctgtatgttgatcaactgcaaggagccaggaaataaaaacttattagttaggttcagatgtgtaaacattttttcttgaaaaatttaatttggttttgtgtgtttaaaaaatgaaaaaagggaagggtatgcaaaaaaaaaaaaatgttccccctttctagtaacaagcagaagggagctgtgtttaaataggggttaagggggcgtggcccggaaaagggaattttgtggccggtcttcgtgttttgccaagggttgaattcgggtttctttttcagtgtttttattcccgttttgttttcctttcgccataacgacactttcaaagcggaagtacgactgtctaacccctaaatgtgtatctgtatcaccttttctcccttttccgtgctggtaaataataaagatatcctgatttcaatttattaacgcgacgaccttgttggggaaaccgatacaaccatccattctcgagccaaagataatgaaaaatgaaaagaggggagaaagctgcactaaatcacaaatcgaatcggatttgatcgcagatatctcaagtgtaagtggatttggggcgcttgtgtgtgagtgtgagagcagtaaagcgaaaaatttctttcgattcgaacattttatcttccacaaacaagtcacgttttcgatttaaaaaattttcgcatacaaagccgctggttttgtggctgcaagaaaatttacatgaaaactgagctagtcggtgggcggagaaacgtgtagcagtcgccgatcgctaagtggaacctgaacgttaaggcactaaaacaaatctagcttgatttcaattagctcatacactcaaagttacttcagtttttaaaatcttttttttttttaatttgtgaaatcttttaatttcaaaaacaacaaaatcaatccaacttctcttcaagttcacacacttgagtgtttactctttcaagtgataatggttacaaaatttgcatagaaggcggttcgaaagacaacagaaattcaaggccatttg

SEQ ID NO: 17636 - DNA, 3070 bp, DROSOPHILA
tccttgcagttgatcaacatacagaatcacgacgacgcgacgagcgaaaatggccaaaatggaggtcgacgatgtggtcgacttgagtttggggtccggtcgtgacccggcgttgaccataacgccggctccgccgccggcggcgctcagtaatcgggatctgcgtgcgctgacagccaacaatgctggcctgaccatcactccgtcagcatcgccggcgaccaataatggcaccacctccaatagcagtaacacaaactccaacagcagcagcaccaccaccaccaccaacaacaacaacaacagtagcagtaacaccaatagctccagcgcaaacaacaataacaacaacaacagcattaacgccagtgatggtgtcacaggtgcgacaagtggatccataggcggcggtcaggatgagaacaaggttcagcggagagtactgcgaccacgaaccgaacccaaatcctatgccgaggccccagacattgtgttactacccgctcgcacaaatggccgtcagcagaatggaaacatcgattcggagacggatgacgaggagatgcccccgtatgtgcccatcaaggagctgagccatgcagagctcaaggagcgcgagaagagtctgaggaagctgcggcaggatctgcgcaatgaggagaccaaactgatgctgctcaagaaactcaagcagtcgcagcaggtgatgaaggagaatctggtggtgacgccgaccagcgtatcgcccaacaatccgctatcggcgatacccgccgctctcacctcgaagggatcgctgagtgtgacgcccacgtcggcggtacccctgcccgcccacagcaagggcagcaggagcagtttgagcggcagcggcggaccggcagtgagcataagcgccaccaacagtcgaacgggcagctcgagttcagcggcggcggctgcttcggcaattgcagcggccgccatgagcggccaacatcgcagcggtagcaactccatactgccgccgccacgatcatcgctgcccgctggtgccaccttggccgccggcactaccatcacgcccgccacctcctcatcgcaccgctcgagcaatttgccgccgcgcaccaacctgccgaatctcaccatcacgccatcggtgaccatcacgcccacatcggcaccgccctccagtctgaaaccacgcaatgtacctgggaccataagcaattctgtttccatcacgccggcgctaccactgtcccaatcgcatcagaatcagcacaacgatcagaagaatgatcgctccacgccaagagaagatgcccagacaccagctcaaagacaggcggcggctaaaatggcgctacgcaagcagctggaaaagacgctgcttcagattccgccaccaaagccaccaccgccagagatgcacttcattcccaatcccagcaacacggattttgtgtatcttcttggtttggaaaccgttgtggattatctgaccgtcaacaagaaggccaatgctgtggcagcaccattccgttgtgcccagtgcaagattgattttacacccgtgtggaagtgggagaaacagaccaacaaagatcccaaagtgatttgcgagcagtgcgtcacctcgaatgtgaagaaggcactcaaggcggagcacaccaaccgactgaaacaggcattcgttaaggcgctgcagcaggagcaggagatcgaacagcgtttggccagccagagcagtccatcgccggtggacaaccatggatcgagtggcggcggcaattcgctgtctgtctccgcggtgtctagcaattcctcatcgtcgcatatgcagcgggaacgggaacagctgcaggcgtcgcatgcatcggcggctgctgcacttgtcaatctgccgccgtcggtgacagtgatacccaccaaatgccagacgccgacgccagcgacaccgcgtccaacgccaccgccaccacaaagtcaagccacaccaccgccgtcatctggaggatcgcgatcctcgcgagcggcggccaccgccgctgcagcagctattgccgctcagcaggcgggtatccttagtcctgggccgtcgccagcgcatcaccatgagccgactacatcctcgagatcctcccgcaacgatcgactcgatcatcaccatcagtcgcagcagcaacagcagcgcgatcagcgggaaagagatcagcagcagcgggatcagcagtcgcaacagcaggcccaaaactacgacaaatactcggcggccaccctggcggcggctgctcatctgagtgctcttggcggcatgggcggattgaatatcaatagcttggccagtctaggcaaccttggcaatttgggcaacctcagccagctgggcaatctggctgcgctgggaggattgggtaattttggcggagcatcgacgggttcggctaatccggcggcaggactgagcggttcctcgccagctgctacggcggcagccatgcaggcgttccagcagcagctctttagagctttgggacaaggacttggtggcaatccgcagcatatgatgcagttcgcaccgcttttgtactcttaccaaatggccatggcgcaggcggcacaagtggcagccttcaacaataacaacaagaagagcagctcgtcctccggatcggcgaagaattccagcagctcgaacagcatggcggaagttcagcgggcggcggagctgcagcgccaatatctactggagatgataccgccccagcagcaaagtggggccagtggcagtcggcagaacaactggaaggcctaaaaggcatccacctaacgtagataacaattgacagacagaaacgtaaaacaaacagaacagagcagcagtaacaactattattatgatggttttcttgattaggtaattttataattttaacaaaacgcaagcaacaacaaaaaaaaaacaaacaatttataagaaaccaacatcaaatatacacgtaactattaattatgctacttgtaaacaataattatacataattatacaaaacggatgaaagcaaaacagagccgatctaaacat

SEQ ID NO: 17637 - protein, 916 aa, DROSOPHILA
MAKMEVDDVVDLSLGSGRDPALTITPAPPPAALSNRDLRALTANNAGLTITPSASPATNNGTTSNSSNTNSNSSSTTTTTNNNNNSSSNTNSSSANNNNNNNSINASDGVTGATSGSIGGGQDENKVQRRVLRPRTEPKSYAEAPDIVLLPARTNGRQQNGNIDSETDDEEMPPYVPIKELSHAELKEREKSLRKLRQDLRNEETKLMLLKKLKQSQQVMKENLVVTPTSVSPNNPLSAIPAALTSKGSLSVTPTSAVPLPAHSKGSRSSLSGSGGPAVSISATNSRTGSSSSAAAAASAIAAAAMSGQHRSGSNSILPPPRSSLPAGATLAAGTTITPATSSSHRSSNLPPRTNLPNLTITPSVTITPTSAPPSSLKPRNVPGTISNSVSITPALPLSQSHQNQHNDQKNDRSTPREDAQTPAQRQAAAKMALRKQLEKTLLQIPPPKPPPPEMHFIPNPSNTDFVYLLGLETVVDYLTVNKKANAVAAPFRCAQCKIDFTPVWKWEKQTNKDPKVICEQCVTSNVKKALKAEHTNRLKQAFVKALQQEQEIEQRLASQSSPSPVDNHGSSGGGNSLSVSAVSSNSSSSHMQREREQLQASHASAAAALVNLPPSVTVIPTKCQTPTPATPRPTPPPPQSQATPPPSSGGSRSSRAAATAAAAAIAAQQAGILSPGPSPAHHHEPTTSSRSSRNDRLDHHHQSQQQQQRDQRERDQQQRDQQSQQQAQNYDKYSAATLAAAAHLSALGGMGGLNINSLASLGNLGNLGNLSQLGNLAALGGLGNFGGASTGSANPAAGLSGSSPAATAAAMQAFQQQLFRALGQGLGGNPQHMMQFAPLLYSYQMAMAQAAQVAAFNNNNKKSSSSSGSAKNSSSSNSMAEVQRAAELQRQYLLEMIPPQQQSGASGSRQNNWKA

SEQ ID NO: 17638 - DNA, 2446 bp, DROSOPHILA
taatccacttaggagtgcctttagctacagtgtgtgtatgggcaatgtcctggcgacaacaaagttgcacacacagtgaaaaaaacttgatatccaaaacataaattattacttaaacaaatttgttttcccacaattatatttaataaattcggtcattaactttgtatagaaatatattagtattacctataaatttttaaaaagaaatgagtttgtaaagcttttctttgtgtaaacttgtgagatggggcgaaattgttttattaccagggcgaagccgttgagtgtgtgttgactgaaaacaaaggtgcgcacaataaattacattgttacacggaaacttacgaccaggacacggacacactcgcatatctgtgcacacatgtggaggaggtcctggcaggaagtcagcaacaagcgccgcgttaatgaaaaggatttctctggcatccacacgtctgcagttagttttgccacctaactcccatctatcaacggaactcagttctctctttgggttatttaatatttaaactccagccagacagtgaatttgctaagcagaaggacgagggagccatagtcctgtctttgatgtcctcgacccattagttgaggtctcaacttttgcataaataaacgccttagttcattagtaagtctcgccgccttcagcatttcccgattctcgattgcaaaaagggtttcctttgggttcgctttgcggttccatgagccatcggttactgcggttagtctttcggcccagagtttcagtgaaagtgtcataagcctggctaaaagggaagattttatgacggcccaaaccgcagttacagctggaaaatagttggcttgttgttttgcggcttgtgcttaatgcctaatgattttttaatcaaatttaaaagctacttattttgtcactaagcaatctgtgtgaaactgagcaactgatgatctgcctttcaaaaacattcagtcgaaaacggttgctcaaaattccatagcctcaagcctcgcttcccccattcccgaacattttcggatcagaacattccatgggtacggtggtcagcaccctgcagcgacccactctctacgtgagcatggacagctcgcatgcgcagttcgtgcgggacacaatcagcggcaacaaggtggtgatctttagcaagagctactgcccctactgcagcatggccaaggaacagttccgaaagatcaacgtcaaggcaacggtgattgagctggaccagcgggatgatggcaacgagatccaggcggttcttggcgagatgacgggctcgaggaccgttccacgttgcttcatcgatggcaagttcgtgggtggcggcaccgacgtgaagcggctatacgaacagggcatactgcagaagtattttcagtgaaaagtgggccgacctatgatcttacatttgcttttcttgctctgcagtaataaagatagcagtttgggacatataatataaaaagtattattattgatcaattgaagccaggcattgagccatttaaaaaattgcttcatcgaggaaaatgacttaaatgcggcgacaaaggaaatgcaaacaggaggcggaaacacagagcagccttttatctgctcaatatgatgcttaagttgctcctgacagggatcaccattgtctgagggcggggagtgagcaattaaggagcgagtcctttcggtggctctgctgaatgcgctttcctttcacctgctgccggcagttgtgtttcattgttcgcctccatcacgggctccatttcccacccccccatccccttgcaatccatttgcatgtggagaagttgagtgcaacgtcatgaggtcaaggctcggagcattaaagtttcaagaccccatcgaacaattctcaaagggcatgcacgatagtgaaatacatacatatttttcgtaattcaggcagcaacgtttgcttaaattgattgaaatgtgctccaaattgattgtaatttgtttccgaaatttcgttctttcctttttcgatttcaaaattactttaacaatgccgaatgcagtttacggccacacacgcgaaatgtaatcgcaattcaccagggcgaacgaatgaaaaatgtcacggcacacgtgtcgtatgcgtaatttggctcatccgattgtttttgaggctcaatttcgcgacgaaaggattgattataaaaattggtgagccatcatttcataatacctaaaaacaaatgtgcacctgctgtttttcgtttagatttggttattgtgtaaatatcactatgttaaatatctacttaggatataaagctcagttaaatgaattactagatcaatgatttatgatttaaaagggttattctactctttgtactttaactctaaaacttcattcgatttatcaagtacgaaaacctgttatggctt

SEQ ID NO: 17639 - DNA, 446 bp, DROSOPHILA
caaaattccatagcctcaagcctcgcttcccccattcccgaacattttcggatcagaacattccatgggtacggtggtcagcaccctgcagcgacccactctctacgtgagcatggacagctcgcatgcgcagttcgtgcgggacacaatcagcggcaacaaggtggtgatctttagcaagagctactgcccctactgcagcatggccaaggaacagttccgaaagatcaacgtcaaggcaacggtgattgagctggaccagcgggatgatggcaacgagatccaggcggttcttggcgagatgacgggctcgaggaccgttccacgttgcttcatcgatggcaagttcgtgggtggcggcaccgacgtgaagcggctatacgaacagggcatactgcagaagtattttcagtgaaaagtgggccgacctatgatcttacatttgc

SEQ ID NO: 17640 - protein, 116 aa, DROSOPHILA
MGTVVSTLQRPTLYVSMDSSHAQFVRDTISGNKVVIFSKSYCPYCSMAKEQFRKINVKATVIELDQRDDGNEIQAVLGEMTGSRTVPRCFIDGKFVGGGTDVKRLYEQGILQKYFQ

SEQ ID NO: 17641 - DNA, 9155 bp, DROSOPHILA
tgcccggatttatttcggtgtttccagtattatataacaaaaggcatatttatttcgttttaatttgtaattttgcgctctggtcagcgaggcaggagtgcaaaccagttgaacttgtcttgtccatcgcctcagtcgattaacgagcggcaggaaaacaagttcccatacaaaacccttgagacgacggccacgacatatccatgtccatgtccttgcctgtgtctatggcccatgtcgctgtccatccaaaaaacgacggcagaagtcctcactgtttacttaagcaaactcttaacaactcataatagagcaattttcacgttacccctccgcctgtgaatacagtaaatcatcgccgggcgagcaaccatgccagttgcatggtcagccattgtcactccttctaccccaagttcagtgaggatctgaggtgattgaaaggagtatgtgccgggcggtcacccggtgttcccttttttctgaattgaaattgatcgtgggcacttggaaatgtaatggctcgggcttgtccctgctgcgctcttgggaaaagatttatgatggcatctaaatggtgttttcactccgagcttagctgatagtttaacttgggcgtgatgcacacacatggagccgaaaaaagctcaggcagaagcagctggcctgccttgataccaggttgccaggcatttcaattagctacccatttatggagccaattggttgccttgaaaggttgcataccttaagtttgattgactgactgtgacttgacaataagctaatttaaatcagaaaagtgttggagcaagctgacaacttaaaggttgtttttttcctccttccaaaagcatccgaaaattgccgaaaattgaaaaggaagcttcctggcaaacatttgtgctgtcaatcaagcgagcgggctaaacaacatacgctcgaaggatgatgaatgtgtatttaggattccatcgcgaacgaaggatacatttgcataatgatgcaaggatggtttcttgagagctcgaaacttttggccgcgacacatgtaggtcaaaaaagggaaacgggttcgtccttttgagagatcgctaattgcgctgcttaaacttgttttccacttttttttttgttctatttccaattataagaaatgaaatgcctgggctaatgataatttgatgttttcttacagattcgtttgtgaacagtcaggaatggacaatttctcgttcggtgccagatctgaggctgggaatcgtcggttccctgaactccggcaagtcagccctggtgcatcgctatctcaccggatcctacatgcaggaggagtcgcccgaaggtggtcggttcaaaaaggaggtcttcatcgatggccagagctacttgctgctcattcgcgacgagggtggagctcccgaaatgcaggtaagtccttggggttttttctctatgcttttcccatgaaatattcatgggaatgggaaaaatatgatgtatgactaggggtatgcattattgtgccttcaaagttatccgtgccgtagacaaataaattttcccttatcatcttgtaaatatttgaattgaggtcaacgtgggatcaactgggagagcttcttgggggtggtttcagttatatttttttttatcaatataatttgattgaaacgctcagaactcgagcctggaactttctttttgtggccctcagtcatatgctcgcaaccaattatccaagttttggccggcatgagtcactcgaaactcaaccttcgacctttggctggcagtcgagactttgtcgcaatgccagataagcgatttcaacgggtccagtttttgttggccattatggcagaacgtgatgcagcagccgcatcatcatcatcatcgtcatctaggccatcatctcctggccgatagccagtaactgggtctatagaggttgcccagtgcaaaatacacacaataccgaacgagctctcagttgattgccaacccctgagctgcaaaagttcctcctgcagcctccgaatccgcaagcgaatgcaattgaattcgtcttttgtcaatacatcaatgtagtgccttccagagattgggtagctgtaattaaaggcaacttaaccacgggctatttacatttgaacacagggccttgactcattgattcccccgagggtcttctgtggctcaaggagcttttgttcggcactcggctttgatatatcgcatactgcatgagttcgccatccgccattcgcatttgcatttgcatttatgcaattgcaattttcgctaccccaaatgcgaaatgcgaaatgcgaaatgccaaatgcccaagttgccgatggcctcctgcgcctgcggcttaaagggtgaaagtgaggattataaattttaagctgcttttgcttttcactagtctcactcacattttttatttgcggttctatttacactcttagtactttgtgtcctgaaggggcgaggtgctttgggtagttagggggttgctcataaaaaaatgtgccagacacgcgaccctcgaaaatcccaataatatccctataatccttgctctaaccccgctgactggcagtctttcactatttcctgtaacccgttgctagcgattcttattcaaattgctttcgctttttttatttccattcattttaattataagtttggagaattttcgcaagtcaagcagatgattgacctaaattatcgttggaaaaacctaacaaaggattacggcttataaatgtttttagggaacggtttcctgggaacagtttgttttgtacagtttgcgagctacagtttgagagtaactgtcaagcgtacagtttggagattgggtatcgaaaggagtttttaagatttctaaccatttaattaaagtttgcgactgtcaattgcattgacacatttcataagcgatttttctcgcttgactgcactataatgaacattacataatagtagctgcatgtcaaactgtcagtcaactctttcacttgaatgcacacactctatttcaactcccactttcgttacatttgtaatatcttccaattcaccaaatcaactaattttatatcactttctttggccaactcatggcagtcccagctttatgggacataataaactcatatttcatagtccaaataaccctcaaaagttacgccgagagtagtcgttacatcggctaaaccacccaaaatgagaacaacccggaaagttccacacaccctcgcccaactctggttgaaatcactcattcaatggtcgacttgtcgccactctgtcgcatttgtagttgcttttttttctcagtctccccagcgaaggatatcattaccatatactagacacgagacgacgagaaacagcgacaacaatattgcatgcgaccaaagaatggtcgatttcttattgtcagacccggaaaatgggggtgtacactcgcggtgctgcagataggatactagatactagttactaaaaaatattaagaatgtatatgtataatgtaactaagtatatgtttctattcaatttatagttttcacttcgaaaactatacaaattttaaagttttaagttgtatcttagggatacgagtcttaagaatttcttcgatttagtgcgaatagtttgcctcaagttcgaaccacttttgtgatccccattgtccgtcctgcttacatctgcagttgtttttcttcgtcatcagcatacatatgtgcagtaagcacacaccggatcttccgctttccctccccccacacacacacgcgcacacattcacacacaccctgcaatcgagtatctgtgtgagctgctcgagcctttcgtcgccagttggtgcaacttttttgcgaccccctttgcactggcgcttcgtttttgctttcctgtttcctctgcatacattttcacaacaaatcataaaaagtggcaatgatggcggcgcccaggacgaagggggccgtcttggttttcggcgagtgggtaggacagcccaaccacccaccacgagaacaacacaatgcacacagcaacgcagacgagtgtcctcgttgccaggacattctagcagccagttgtttgtcgactggcgtcgcgtgcgggcggctttttttcccattgccgaaaggctgctcctttttgtgtcaggataaccgagcgagctcgaaagtgccagcaacttctccatgagcgagttacataaataattcaggcattcggtccaggtaaaatgcctgcgatgcattattaattgattcgagccgaaggacagtcaatcaatattaactggcaaactccatttcctggcgtcgccttcaattggaatcctgcgcagaaacagcagagcctgtttacatgccatataaaagttcattatcctgccaaactgtgtgtgtgtgtgtgcgtgactgtgtgtttggggcatacaaaaatcattaaaaaagtttaacacacgtctgcctggcgagcggagcggagtggagtggagtggaaagaaggcttcaagtgcttcattagcgactttctcaagtgtgtgtgttgagtccttcggcccagctgaatttaaggatgaaaaataaaaacaactctaaactcctcggcaaaggagctgctatatacatatgaccattgttttgcgcgcttccgccagacgccgcatgttgtttactccccatcccttcgatggcgaatccaagtcattcctccccagaatccatcgcaaagtcaaggagtcgacgcgtcccaaagcgcgccgtgttttcgcaggactctctttgtttttcgttctcagctttctgctttctgctttcccttgccaattgccaaccctttgccattttaaattcattctatgatttttcgtctttttcccttacagttcgctggctgggtggatgcggtaatctttgtgttcagcctggagaacgagggcagcttcaataccgtctataactactatacgaaaatggcgcattttcgtaatggccaggaaatacccatgatattggtcggaacgcaaggtaaatagcctataataagaatataaacattttcgtttcttatataactcattattacattatttattaatattatctatatagacgccatcagcgagcgcaatcctcgcgtgattgacgacacccgtgccaggaaattggccagcgatctgaagcgttgctcctactacgagacctgcgccacctacggcctgaatgtggagcgtgtctttcaggatggtaagtagcccgaactcaaatagcataatcacagacgagtaatcaaatgtaatttaatccttttcagcctgtcaaaagatcctctcgcagcgcctgcctttgccaccacaggtgcaaccggcgagacccacgactccgcagggcaatcgcctgggattggctccctaccaggcgcccaccaatggacaacgtggccagcagcagctaccactgcgaatgagtgcggatttcgcacaggcggagcagaaactttggtcgctgcaagcggccagcagttccaccataaacgagaataacaacatcaccaaatacaatcccggagcggccaattcgctgcagggtgattgctcccaggtgcagttgcgcgatccacgtgatctggcgccaccaccgggtaaggagctgcccacacccacctcgacgcccacgacgagccgcaagagccggcggcgttcgaacctcttcatcccctcctcttcgaagaaggccgacaaggagaaggagccaaagagcagtgaactgggcagtggacgttccatacccattaaacagggctacctgtacaaacgctctagcaaatccttgaacaaggagtggaagaagaagtatgtgaccctgtgcgacgacggcaggcttacctatcatccctctttgcacgactatatggacgatgtgcacggcaaggagattccgctgcagtacgtcaccgtaaaggtgccgggacagaaacctcgtggctccaagagcataatcacgaacagtgcgctcaccagttcactgatggccaatggccaaagagctcagaacactctgagcgatggcatcggttgtctcaccctggccaaggacaatcagcgcaagctgagcgagaaattatccctactcggagccggatccattgcagctggtgccggtggagagcctttgaagtcgaatagctcacagcagacgagcggtgacgagggcatagccatgtccaattcaaattcacagacttttatcgccggagaagtggccaatgcgggaaataagctggaggcccagacgccgaacgtgaagaagcgacatcgccgcatgaagagcagcagtgtcaaggcgaacgaggcggacgacaacgatggctatgaattctacatcgtatcgctggactccaagcagtggcactttgaggctgccaattccgaggagcgcgacgagtgggtagcggccgtcgagcaggagatcttcaagagcctgcagagcatcgagagcagcaagaccaaacaggccaccagcactgatctcgctgccatgctggccatccgtcagcgggttcctggcaacggcttctgcgtcgactgtggagcgccaagtgagtttaactttaaatcgggtgcgttgtacatttactaatccttctgctttactccttccagatcctgaatgggctagcttaaacttgggcgtactcatgtgcatcgagtgctcgggcgtgcatcgcaatcttggctcgcacatatccaaggttcgctctctgggcctggatgactggccgtaagtttatttttaatttgcctgcttatcattattctaacatataattttttactccaccagatccccgcatctcagtgtgatgctggccattggcaacagtctggccaactcggtttgggagtcgaacacgcggcagcgggtcaagcccacttcgcaggccagtcgcgaggacaaagagcgatgggtgcgcagcaagtacgaggccaaggagttcctgacgccactgggcaacggatcctcagcgcatccaagcccaagtccgggtcagcagttgatcgaggctgtgatcagggcggacatcaagtcgatcgtttcgatcttggccaattgtccgtccgaggtgaccaatgcgaatgtcagcgcaagagatgtgcgaactccgctgctgcttgcctgtgccataggcaatctggccatagcacagctgctcatatgggtaagttaactggagaccaaatcaagtgaatcagttgttaatacgtacgtattgctccttccagaatggcgcaaacattaagcacacggatcatgagggtcgcacctgcctggcctacgctcgagcggcacaatccctggccaccgccaagtcgatcaaagccgctgcagctgcgcaggcgggcacaacgattccggctcctgctccgcccacaaacggtggcattcctgctccccaatacaatgtcgaggacacgacggcgctggtggagctgctcgagggactgggctgtccagaggcggctcctctgacggccagtggcactttgcctaggagacgtgacacgttaggcactccgtacgagaagtcggtgtcgggtgtgatctgaattagttaaaattgaaataagataagcgtgaattttcataacagttgtacaattcattagtttttgttgttcatgacggacttagtttaaattcgagcgtaaaaaatgtatagcgtttagtgtttaggttttaggaatgttgtgcaaatgtttaatattattattatttggcaagtgttgaatggaaattcacaagttttatttatgttttcttttagtttgtttagttcttaagacatggaaacctgtacagccttgttgtaatctcaagtgtataatttattattttcgtattacgtgaaactattattattgttttttttttatagtgtgcaggtttttaaatcgtttgcaaaacaattatttagtagctattgtaactttcgacaaccatcagcagattgcaaaagacttcacgtaacaaaaaacatacttatacaacctaaacaatagataaaagctgatgcaaaatatacgtataaacgaaatgaatctaagattaaagccaaaaacaaacttatgctaaacaatatacacgaacatatatatatatatacattatatacatacatagttgaaattgcttgataatcggtttaaacaaatgaacacgcccaaaatgtagcttatgcagaaccaaaatcacaaaattctttgctatataaattccaaacagaaataactcgttttagatattatactgcggaaaaaattggattctgattgtatgacggaatctgggtagacaaaaatttaattgaaagtatttcaaaactattatacaaaatagttataaatcaatctaaatattactatatgtatacacccctatgtattgtgtacgctatttgtacgaattacaaaccacaaaacgtgacaaactcaatctaattggaaggaaaagtagcacacaaaaaccacaaaagaaaaaaaccccttcaataaaaatctattaaacattttaaactgtgtgtttgatttcacgaggaaagtgaagagtatataccattaaatgtcctgtttttccagttctgatatgtcaaccaaaagctgttttaatgaaaaccataataaaacaacatttttttgtggttgggcgctttattattcaaacaaaatgtaacataactttcaattttggaaacatttagaatgacgtagaattttgttgacatatgtgcggcactttcctttattttgtaatgggaaattgcattggtgaaccacaagagagagtttttagggactgcattaaaatgtaagttttatatatatatatatgtataccatatactttgttcttgcgaagaggatcacgcggattgcctagtcagaagcgtgaaaatttaaataaactctgtctgcaaaaccgagaacgaaacacaactgcaggaaagatcaagagtttttggatccatagtccagcccgacacaggaaatgcgaaatcttgaatacgacatggtacatcaagcaaataaccgattagaaggtcgatccgtcctggtc

SEQ ID NO: 17642 - DNA, 3195 bp, DROSOPHILA
atgatgcaaggatggtttcttgagagctcgaaacttttggccgcgacacatgtaggtcaaaaaagggaaacggcagattcgtttgtgaacagtcaggaatggacaatttctcgttcggtgccagatctgaggctgggaatcgtcggttccctgaactccggcaagtcagccctggtgcatcgctatctcaccggatcctacatgcaggaggagtcgcccgaaggtggtcggttcaaaaaggaggtcttcatcgatggccagagctacttgctgctcattcgcgacgagggtggagctcccgaaatgcagttcgctggctgggtggatgcggtaatctttgtgttcagcctggagaacgagggcagcttcaataccgtctataactactatacgaaaatggcgcattttcgtaatggccaggaaatacccatgatattggtcggaacgcaagacgccatcagcgagcgcaatcctcgcgtgattgacgacacccgtgccaggaaattggccagcgatctgaagcgttgctcctactacgagacctgcgccacctacggcctgaatgtggagcgtgtctttcaggatgcctgtcaaaagatcctctcgcagcgcctgcctttgccaccacaggtgcaaccggcgagacccacgactccgcagggcaatcgcctgggattggctccctaccaggcgcccaccaatggacaacgtggccagcagcagctaccactgcgaatgagtgcggatttcgcacaggcggagcagaaactttggtcgctgcaagcggccagcagttccaccataaacgagaataacaacatcaccaaatacaatcccggagcggccaattcgctgcagggtgattgctcccaggtgcagttgcgcgatccacgtgatctggcgccaccaccgggtaaggagctgcccacacccacctcgacgcccacgacgagccgcaagagccggcggcgttcgaacctcttcatcccctcctcttcgaagaaggccgacaaggagaaggagccaaagagcagtgaactgggcagtggacgttccatacccattaaacagggctacctgtacaaacgctctagcaaatccttgaacaaggagtggaagaagaagtatgtgaccctgtgcgacgacggcaggcttacctatcatccctctttgcacgactatatggacgatgtgcacggcaaggagattccgctgcagtacgtcaccgtaaaggtgccgggacagaaacctcgtggctccaagagcataatcacgaacagtgcgctcaccagttcactgatggccaatggccaaagagctcagaacactctgagcgatggcatcggttgtctcaccctggccaaggacaatcagcgcaagctgagcgagaaattatccctactcggagccggatccattgcagctggtgccggtggagagcctttgaagtcgaatagctcacagcagacgagcggtgacgagggcatagccatgtccaattcaaattcacagacttttatcgccggagaagtggccaatgcgggaaataagctggaggcccagacgccgaacgtgaagaagcgacatcgccgcatgaagagcagcagtgtcaaggcgaacgaggcggacgacaacgatggctatgaattctacatcgtatcgctggactccaagcagtggcactttgaggctgccaattccgaggagcgcgacgagtgggtagcggccgtcgagcaggagatcttcaagagcctgcagagcatcgagagcagcaagaccaaacaggccaccagcactgatctcgctgccatgctggccatccgtcagcgggttcctggcaacggcttctgcgtcgactgtggagcgccaaatcctgaatgggctagcttaaacttgggcgtactcatgtgcatcgagtgctcgggcgtgcatcgcaatcttggctcgcacatatccaaggttcgctctctgggcctggatgactggccatccccgcatctcagtgtgatgctggccattggcaacagtctggccaactcggtttgggagtcgaacacgcggcagcgggtcaagcccacttcgcaggccagtcgcgaggacaaagagcgatgggtgcgcagcaagtacgaggccaaggagttcctgacgccactgggcaacggatcctcagcgcatccaagcccaagtccgggtcagcagttgatcgaggctgtgatcagggcggacatcaagtcgatcgtttcgatcttggccaattgtccgtccgaggtgaccaatgcgaatgtcagcgcaagagatgtgcgaactccgctgctgcttgcctgtgccataggcaatctggccatagcacagctgctcatatggaatggcgcaaacattaagcacacggatcatgagggtcgcacctgcctggcctacgctcgagcggcacaatccctggccaccgccaagtcgatcaaagccgctgcagctgcgcaggcgggcacaacgattccggctcctgctccgcccacaaacggtggcattcctgctccccaatacaatgtcgaggacacgacggcgctggtggagctgctcgagggactgggctgtccagaggcggctcctctgacggccagtggcactttgcctaggagacgtgacacgttaggcactccgtacgagaagtcggtgtcgggtgtgatctgaattagttaaaattgaaataagataagcgtgaattttcataacagttgtacaattcattagtttttgttgttcatgacggacttagtttaaattcgagcgtaaaaaatgtatagcgtttagtgtttaggttttaggaatgttgtgcaaatgtttaatattattattatttggcaagtgttgaatggaaattcacaagttttatttatgttttcttttagtttgtttagttcttaagacatggaaacctgtacagccttgttgtaatctcaagtgtataatttattattttcgtattacgtgaaactattattattgttttttttttatagtgtgcaggtttttaaatcgtttgcaaaacaattatttagtagctattgtaactttcgacaaccatcagcagattgcaaaagacttcacgtaacaaaaaacatacttatacaacctaaacaatagataaaagctgatgcaaaatatacgtataaacgaaatgaatctaagattaaagcc

SEQ ID NO: 17643 - protein, 895 aa, DROSOPHILA
MMQGWFLESSKLLAATHVGQKRETADSFVNSQEWTISRSVPDLRLGIVGSLNSGKSALVHRYLTGSYMQEESPEGGRFKKEVFIDGQSYLLLIRDEGGAPEMQFAGWVDAVIFVFSLENEGSFNTVYNYYTKMAHFRNGQEIPMILVGTQDAISERNPRVIDDTRARKLASDLKRCSYYETCATYGLNVERVFQDACQKILSQRLPLPPQVQPARPTTPQGNRLGLAPYQAPTNGQRGQQQLPLRMSADFAQAEQKLWSLQAASSSTINENNNITKYNPGAANSLQGDCSQVQLRDPRDLAPPPGKELPTPTSTPTTSRKSRRRSNLFIPSSSKKADKEKEPKSSELGSGRSIPIKQGYLYKRSSKSLNKEWKKKYVTLCDDGRLTYHPSLHDYMDDVHGKEIPLQYVTVKVPGQKPRGSKSIITNSALTSSLMANGQRAQNTLSDGIGCLTLAKDNQRKLSEKLSLLGAGSIAAGAGGEPLKSNSSQQTSGDEGIAMSNSNSQTFIAGEVANAGNKLEAQTPNVKKRHRRMKSSSVKANEADDNDGYEFYIVSLDSKQWHFEAANSEERDEWVAAVEQEIFKSLQSIESSKTKQATSTDLAAMLAIRQRVPGNGFCVDCGAPNPEWASLNLGVLMCIECSGVHRNLGSHISKVRSLGLDDWPSPHLSVMLAIGNSLANSVWESNTRQRVKPTSQASREDKERWVRSKYEAKEFLTPLGNGSSAHPSPSPGQQLIEAVIRADIKSIVSILANCPSEVTNANVSARDVRTPLLLACAIGNLAIAQLLIWNGANIKHTDHEGRTCLAYARAAQSLATAKSIKAAAAAQAGTTIPAPAPPTNGGIPAPQYNVEDTTALVELLEGLGCPEAAPLTASGTLPRRRDTLGTPYEKSVSGVI

SEQ ID NO: 17644 - DNA, 3798 bp, DROSOPHILA
gattcttaattctctaaacgatgtggtctacttgctgcgtcattcgtcggccgtgtcgcatcagcaacaattgctgcttttgctgccttcgctgcggcaggcggatgatatcctgcgaagattttggcgtggaattgcacgcgatgaagtcattaccatgaagaaactgttcctcgagatgctcgagccgctggccaggtgaaaaggattatgcgggcgcccaaactagttgatctagctgataagcaaaggtgcaaatatagtcttaggtatatatggatgtatactagagtagattaagcgtaggataagccatgtatataaatagtaaaatacttgtcgggtaagattagttcgcagaaaaaatctcttttaatggactaccaactacagcaactggaaaaccctacttatcttctagaatcggggtgtgcttacactggttaaaggcgcatataggtgttatgtgtctaaagttgtgagtcacagatcttcaataatttgttcaattctcactggttctgatatatgtatatgccgcaaccttctgatgtaacgtatgaatttgtgggcacttttaaaatacgatagtggttctacaatacaatggattatactgtttctaagtgtcatgtaacccagtgattctgtgtctatgtggtacacatgcggtcaaaagaatagcaatgtcgtccgtgaataataaaccgtttgtaactgttgtttccatactccctaagttctgtattctttggggattttcttttcctaaacaaattcaaattagttttctagaattcagtgcatttgatcgcatttatacatcactatttcctaatccatacataggctgatatatcgcaaaacttcaaaaaattaaccatgacaaaggtattctgtggtccttgagggcttacaattagtgctaacgatggtcatatttacatttgcagactagagacgttccatcatcaccaattagagctaagcccaattaattctacggtgtatgtgtatcaaagtacttgttggagctttcctgaaagcgatcgctacgcgccaattcgttgcggaagtaggagatggtccgctgaagtccagtctctaggggaacctttggctcccaatggagcaactggcgggctcgagttatgtccggttttctgcgctgcggatcatcttccatggccttcgattgctttatcacactgggcccgccgaccagtttcttgatgatctcggcaaattcgccgattgtctgctccacaggattgcctaaattcaccggctgtgtgtagttggatgccattagggctatcattccgtccaccagatccgaaacatactgaaaggagcgcgtttgtttgccatttccatacaccgtaatggtttcattcctcagcgcctgaagtataaagtttgacaccactcgtccatcgttcatatgcattctcggtccataagtgttaaagatgcgcgccactcggacttgcactttctcctgtcgatacagatacatttaaagagcaattaatttgactcccagattgctggccaagatcaaaaaatgtggtcagtgctcgcgcttggaaatcttatctcgcgtcagccaaccgagcggaacatcaattaatagcattccaattgagatcatttaatgctcaactagcgatcgaaacaggaaaaatctgccacatttctggatctcagctagtttaatgtttttttttcgatctggcttaggaatgtggttatccaaaaaagtatatatattgctaaaggtattacctgtttggcatacgcatagctcagcgtctcggagacacgctttccctcgtcataacaggctctcggtccaatagggtttacatgtccccagtatgtttctggctgcggatgcactgtgggatcgccgtacacttccgaagtgctagctatcaaaaccttggccatcacgcgcttggccagacctttcaaaaaagatatactcgttaggtgtaatccttattttctttgattgatattataaatatttacccagtacattgatcgtgcccatggtgttggtcttgatggtcttcaccggattgtacatgtaatgcggtggcgaggctggcgatgccaagtggtagatctcatcgatctcgatgaaaagcggattcactatgtcgtggtggatgagctcgaagttctcgtgccccagccagtgctcgacatttcgcttgcgtcccgtaaagaaattgtccaccacgatgacctcgtgcccctggaccatcagatcgtcgaccaagtgggagcccacgaagccagctcctccggtaattagtatgcgtttgcgattcttatagttcaggtatttaaccttcggatacttgcgcggtgtgctggtctggaggctacgaacttgttcctccaatctggccaaattctcccttgtgcgctggagttcggccttttgttctcgaataagagagctctgctcctcgtacgccatctgaaggctcctttgtagcggactttccgtgggcggccatttggcctgaacctcctcgacgccgggaacggaaacggcgacctttccgcttgggcagaagctggccattcggtaaaggtagaccaggagcaggaggagcagcgagatggctgcaacgatcttcagacgctttttggtggcagtcatcgtcggttatgggttgtgtactgcagggttccagtgcttatcagcaactgatatcgccacattgcattctcgttcggctttagaaactatataaacaatacaattgcgttatcaggaggtgccagagtggccagatggctcaaacggaatttctaaatggattaataatctaacgccagggaaaagctcccgcctaattttaaaatttacatcaaaagtatcgacaggcgaacattttgattttggattataaattataatgaattgataatgaattagacatttttgttggtgatcttccccagggacgaatatttttcgttttaacgataaaaggtcggaaattgccaaaaaatgagtttgaaaactaaatttgtttgagggctttcttaggctggtcagcagggactactttccgaataaagtgtttgcccaaacggctattgaaggctatttaaactgccaacgatgagcatcgatcgccagtcgggcaaagttcttagtgccaagtgttgtagtgctcagcatgaggcttccttgggtgattttctgtacagttctgcttttaatttttacgaacaactcaaatgcagatattcccgggtgcaactactacgacacggttgatatctcatacattgaaaggcaaaacgattcgtatttatatgatgacatcgaaattcctgctagcttaactggatactacgagttcaggcagtttggggacggttcgattacgccgattgaaaagcatttaagggcctgtgtttgcagcgtgcggccctgtattcgaatctgctgcccagccaagaactttttggccaacggaaaatgcgatgatggtctcaaagaggagctcgcccggttcaaaccctatatatacttcacatacatggacctacaggcacgagtaccactcaccgatatggctattatcagagatgagttctttgattgtgatgaaatgatttacatcagcgactttaactatttcttagaagaggttagcattcaaatcttcaataaatgtggacttatagtttggttccaggatggaaaattttgggttaccgttgacctcttcatggaaaaacaggactactgcttgtaccggcaca

SEQ ID NO: 17645 - DNA, 1444 bp, DROSOPHILA
ctcctgataacgcaattgtattgtttatatagtttctaaagccgaacgagaatgcaatgtggcgatatcagttgctgataagcactggaaccctgcagtacacaacccataaccgacgatgactgccaccaaaaagcgtctgaagatcgttgcagccatctcgctgctcctcctgctcctggtctacctttaccgaatggccagcttctgcccaagcggaaaggtcgccgtttccgttcccggcgtcgaggaggttcaggccaaatggccgcccacggaaagtccgctacaaaggagccttcagatggcgtacgaggagcagagctctcttattcgagaacaaaaggccgaactccagcgcacaagggagaatttggccagattggaggaacaagttcgtagcctccagaccagcacaccgcgcaagtatccgaaggttaaatacctgaactataagaatcgcaaacgcatactaattaccggaggagctggcttcgtgggctcccacttggtcgacgatctgatggtccaggggcacgaggtcatcgtggtggacaatttctttacgggacgcaagcgaaatgtcgagcactggctggggcacgagaacttcgagctcatccaccacgacatagtgaatccgcttttcatcgagatcgatgagatctaccacttggcatcgccagcctcgccaccgcattacatgtacaatccggtgaagaccatcaagaccaacaccatgggcacgatcaatgtactgggtctggccaagcgcgtgatggccaaggttttgatagctagcacttcggaagtgtacggcgatcccacagtgcatccgcagccagaaacatactggggacatgtaaaccctattggaccgagagcctgttatgacgagggaaagcgtgtctccgagacgctgagctatgcgtatgccaaacaggagaaagtgcaagtccgagtggcgcgcatctttaacacttatggaccgagaatgcatatgaacgatggacgagtggtgtcaaactttatacttcaggcgctgaggaatgaaaccattacggtgtatggaaatggcaaacaaacgcgctcctttcagtatgtttcggatctggtggacggaatgatagccctaatggcatccaactacacacagccggtgaatttaggcaatcctgtggagcagacaatcggcgaatttgccgagatcatcaagaaactggtcggcgggcccagtgtgataaagcaatcgaaggccatggaagatgatccgcagcgcagaaaaccggacataactcgagcccgccagttgctccattgggagccaaaggttcccctagagactggacttcagcggaccatctcctacttccgcaacgaattggcgcgtagcgatcgctttcaggaaagctccaacaagtactttgatacacatacaccgtag

SEQ ID NO: 17646 - protein, 441 aa, DROSOPHILA
MTATKKRLKIVAAISLLLLLLVYLYRMASFCPSGKVAVSVPGVEEVQAKWPPTESPLQRSLQMAYEEQSSLIREQKAELQRTRENLARLEEQVRSLQTSTPRKYPKVKYLNYKNRKRILITGGAGFVGSHLVDDLMVQGHEVIVVDNFFTGRKRNVEHWLGHENFELIHHDIVNPLFIEIDEIYHLASPASPPHYMYNPVKTIKTNTMGTINVLGLAKRVMAKVLIASTSEVYGDPTVHPQPETYWGHVNPIGPRACYDEGKRVSETLSYAYAKQEKVQVRVARIFNTYGPRMHMNDGRVVSNFILQALRNETITVYGNGKQTRSFQYVSDLVDGMIALMASNYTQPVNLGNPVEQTIGEFAEIIKKLVGGPSVIKQSKAMEDDPQRRKPDITRARQLLHWEPKVPLETGLQRTISYFRNELARSDRFQESSNKYFDTHTP

SEQ ID NO: 17647 - DNA, 5268 bp, DROSOPHILA
cataccaaaagagtaccataattttcccatcctacagtgttgaaaaacacacaatcttaaaatttgtcgccaattttaaatattttgaaaattttgtttttgcaacgaggaatttagccaaataaaggaaataatattaaaatatattttaagacaccgaaaaggcacccacaaacaaattttaattcaaataatttattgaatacaataaagtagcgtatgagtttcatttgtaaactgttttcattttaaacattatgttctaaaatatttgactttgtacaaaatatattctatttatatatgccgaaaattgttcctccattgcacgctccgattttttgaatttcatttcactcatcgtgtcgctagctgaatgttaaattttaaattgaatatataatatatatatataggtgtggtgtatgtgcttaatccgagatatttcgatatgattaaacaatagctaggcgagaactttacatacaaatcgagttcggtggattgtcaagggaagatgcgcgaggactggaaaaataaaaaaattaaaaactaatttgcaaaggccgtttattttgtataaaaagctggcaactcaaatatcaaagcgaatctgtaaatccgtctaaattattaattaacaactaacttaggagtgtatgacaaaagcatttcacattccaatggcagcgccaggaacggaggcttaaaactaaaaaatgttttgggtagggagaggccgtacaaaggaatattggctggtacaaaacgaggaagaatcatcgctgacaacgttaagagctaaattaagtctatgacctatttatttacttaaatacgcttgacgccacagagccaccgtcgtttattcatcatcattatcgccgccgccagtcgccaagcatcattgtaatcactttagcatcatcgtccttattactttgaggagtgagtttcgtttaccatcgctgcatctctcatttttgatcattgaccttgtctaagcggatgagggtcccacgggatcgtcacccttcacggccgacgcataggagctacttggtttgtcgacaccaccggtaacagaaacagccgacttgccatcaccgccacttccaccagtgcctgctccggctgcacttgcactgctcggcggaactccagctgctccgccaatgctcacgccactgttaaggcctagagtttgaggtgaatcaactagagaatttgtttcgattgtgggtttggttgggatgtgtgtaagtgtgaagtgtgtgcgagaagcgaacagttaagcacctttgatatccatggcatagtggtcctccagccgcaggtcgtgcctctttattagctggcactctgcgccctcgacggtgggaatggaatacacgtacaagtacccatcctgcgaggcaatcaaaagtctacaaatacaacagaatgaaccgttatttagaacttgaaatagaggcagggtaatcagtttgtagttcaatttgcacgtgattcaatttttgttttataaacctttatgaaatgtactaggctacttttgcaaagagcatattaattacatttcaacagagttcagggaaattcaaacatatgaagccagataaagtaggtagtgtaaatgatttacgcggaacaactgcattggtatctagaactcagattccctacctgaggtattaagctcgcatagaattgcagttttcgaaattctttatagctaggtagaattttatggctttttcactttcccgtgcgttcttcgttgcaaattgaactgaaacaaaactgatccgtgctagactcaccttagctgcttttgtatcgtggcaatagcgcacatcctgcgcactcccgcctccggcagagtgaccgaggcgaaggcacggccttggctaaacacgtcggtcacctgcgtgggcaggtagctggtgaccgttttgcttaagaatctaaaaaacgagtaacttgcatgagagagtagatatggtgagtggttgagtagttgtggttgttgttgttgaggtggttggttggtacgtgtttggtggattcgcaaaatgaaagaaaagaaaaatagataaatgtcaagtgccacacgagaaataggagaaaaatcaaaaaatcttaagtcctgtacaaaaaaaaaactttgatctgggcctgttttcaaaatcgctgttcaaaattatggcggcttttctgtattggcattttcgttctcttgcttgattataatttacagatagtatttagttgagaaacccttgaacgatttcattttaaacacaaggcttttagtagaaatacaaattctttcaaataagttaaaaatgggaggattacatatgtacatatgaatggatcagtgtggtcaatgaaaataatagttgaaatggatccagaacgatttctatattactaaaccatatgggaaaaggttcatggaactgaacatatgtgacgtttaatattaataattcgacgaaagccgtggatgatagcagatggttttgtttttaaacataggagtcgggaggtaatagcgattatgtacagaacacccacaccttaatatttgaccataagccataactgcatcgagcagaaagtacaacaatctacaagagctacaaaacataagttgatttatccgaatccaacaccgcttaccccatccagtcgtcgctcgactgcttgctgccatggccttcggctgtttccgtggcactgcgatccagccggaagatgtgaaccgtctcggtgttggagctggacaccagatattcggcgcacgtgctaaacgacagcgaaacgatggacacacagcgctttagtccccgtcgcagttcaaagagtcgactgccatcctgggagctgaagactcggatcaccgtgccacgctcactggccgtggctatctccgtgcccgagggactaaaggccaatgccgccagaggtgtgtcgtgggcgggaatcatggtcttggcgtgcaagttgatggcatcaaagatctgtacctcgccagcagtcacgctgcctgggtaggccagatagcagtgctccgacgacgaggagagggcacaaagaccctgcggattgcacggtgtgtcgcgtatggtgtgcaccaccttcatgtcctggatattgtggatatacaatgactcctccaggcacacaatcaatcgctcgcgattgagcttcacggccagtattgtgtttgcatacgagtagttgcagatctcgctctgcttcttaaagtggcacaccttgagcttgcgtggtgctcgctgggaaactattgccaccaaggagctctcgaacagacgctcgatgaggaacagctcgtcgcttttcgtgtggtagatcttgtccagggtcgagtccacggagcccaggctgtacaggctgtagcctccactggtggccacggccagggaactgaaagggtggaaagtgtgagtgggttggcaagtaataggtggtgttaagaattttaattcgctttgcagaaacaatgactcatacagtttgtaaactaaatttactttgtcaggtgcagataattaatagagtcattatctaataaacgtaagcaaaagtagaacaaatattactggcacagaaacaactaactttatcaccgtttcctttagcgagtgtgcactgtaacttacgttatgttctggttgaagttgacgaacacttcgcccgcatccacatcggtgcgcccgagcaggctcatcatggtttctgtgtgggaggggctggggtcctgcaacagattgggcgtaaatcgttagctatatcggactgctcggccagggaaatgtgttgatctcgcgatttaccgatggcgcattacggaatagcgaatggcgcaaacaaagcgtgggccaaagcagtaaatatatgttaataaatacaataacaaactttgcactagtgtgtgtacactttttggggctgctgataaaagcaacaacaacaaacaaaacacacacacacacccaaacgcttgcgaaatgtacatacgtgactgagaatcgtttatttgtacctatttgtatagctaacacctctgcctcggccctatcaatatacgcaggacaccgctgttgactagtggttggctgcaaggcgtttattaaactgaatccacgtaatgtttaatgatatttggatttcttgtcgcgcaattgtttttgctctgttttgcacacacaccagcacccacacaaaggcaagtgggacagcaacagagcagagcgaaccagggagtgctaatcgagagcagagttgcatgcgccagtgctggaaagggctgcgtctgcacctgagctgcatacatattgaaaatcattcacttgcattcaggataagcatctaccacgaaactaataaaactaaatgccattgttagttattttagagtaaaacattatgcaaacgattatatacattactataagttttatttaaaaaatgaaataagtctgtaaagtaattgcggcagtgttttagttccgaaaagcgaaccaccgaatcgtgagcacgagccagcatagtctgcatccctggataggtgttcagtgtttgccagccctggtcaggtctggttcaccaaaaaagaaaataaaattacatttcaatctttccaatatgcaaatatctgcacgaaaaccagcgagaacagcatgctcacaataaagagcccccaaacaatgtgactcgtatccgcgcagagtgacgtttcgtgccttgcccgagtgccaaatccaaatcccaatccaggcgcacaaaatcgatgcagatgctgtctgcattctcatagaaagtgcaactgaataaccgatggtcgccaaaagccacgatgtccagtaataatgaccagtgaataaacaattatgactcgagcatcgaaaaatgctgaggaacgaatacataagcaataacaagaaggtgctcaactcggaccaaaacaagtactacatgctaacggtcgaggaggccgatatgtattgacgttgttacagtggagctgattacacaaaagatcctcagaacgattttatgtaagtatgtaaacagaggcggacaggcccaccttgggccgcaatcacaatcttctggcttcggcttcccttgggctgataagagcagagtgcttagtgctgcttatctttcatctgcaacctggccgatgtcgtccgccgtctacttactacaccactactgccccccattgtcttt

SEQ ID NO: 17648 - DNA, 1549 bp, DROSOPHILA
tcccacttgcctttgtgtgggtgctggtgtgtgtgcaaaacagagcaaaaacaattgcgcgacaagaaatccaaatatcattaaacattacgtggattcagtttaataaacgccttgcagccaaccactagtcaacagcggtgtcctgcgtatattgatagggccgaggcagaggtgttagctatacaaataggaccccagcccctcccacacagaaaccatgatgagcctgctcgggcgcaccgatgtggatgcgggcgaagtgttcgtcaacttcaaccagaacataacttccctggccgtggccaccagtggaggctacagcctgtacagcctgggctccgtggactcgaccctggacaagatctaccacacgaaaagcgacgagctgttcctcatcgagcgtctgttcgagagctccttggtggcaatagtttcccagcgagcaccacgcaagctcaaggtgtgccactttaagaagcagagcgagatctgcaactactcgtatgcaaacacaatactggccgtgaagctcaatcgcgagcgattgattgtgtgcctggaggagtcattgtatatccacaatatccaggacatgaaggtggtgcacaccatacgcgacacaccgtgcaatccgcagggtctttgtgccctctcctcgtcgtcggagcactgctatctggcctacccaggcagcgtgactgctggcgaggtacagatctttgatgccatcaacttgcacgccaagaccatgattcccgcccacgacacacctctggcggcattggcctttagtccctcgggcacggagatagccacggccagtgagcgtggcacggtgatccgagtcttcagctcccaggatggcagtcgactctttgaactgcgacggggactaaagcgctgtgtgtccatcgtttcgctgtcgtttagcacgtgcgccgaatatctggtgtccagctccaacaccgagacggttcacatcttccggctggatcgcagtgccacggaaacagccgaaggccatggcagcaagcagtcgagcgacgactggatgggattcttaagcaaaacggtcaccagctacctgcccacgcaggtgaccgacgtgtttagccaaggccgtgccttcgcctcggtcactctgccggaggcgggagtgcgcaggatgtgcgctattgccacgatacaaaagcagctaagacttttgattgcctcgcaggatgggtacttgtacgtgtattccattcccaccgtcgagggcgcagagtgccagctaataaagaggcacgacctgcggctggaggaccactatgccatggatatcaaagttgattcacctcaaactctaggccttaacagtggcgtgagcattggcggagcagctggagttccgccgagcagtgcaagtgcagccggagcaggcactggtggaagtggcggtgatggcaagtcggctgtttctgttaccggtggtgtcgacaaaccaagtagctcctatgcgtcggccgtgaagggtgacgatcccgtgggaccctcatccgcttag

SEQ ID NO: 17649 - protein, 442 aa, DROSOPHILA
MMSLLGRTDVDAGEVFVNFNQNITSLAVATSGGYSLYSLGSVDSTLDKIYHTKSDELFLIERLFESSLVAIVSQRAPRKLKVCHFKKQSEICNYSYANTILAVKLNRERLIVCLEESLYIHNIQDMKVVHTIRDTPCNPQGLCALSSSSEHCYLAYPGSVTAGEVQIFDAINLHAKTMIPAHDTPLAALAFSPSGTEIATASERGTVIRVFSSQDGSRLFELRRGLKRCVSIVSLSFSTCAEYLVSSSNTETVHIFRLDRSATETAEGHGSKQSSDDWMGFLSKTVTSYLPTQVTDVFSQGRAFASVTLPEAGVRRMCAIATIQKQLRLLIASQDGYLYVYSIPTVEGAECQLIKRHDLRLEDHYAMDIKVDSPQTLGLNSGVSIGGAAGVPPSSASAAGAGTGGSGGDGKSAVSVTGGVDKPSSSYASAVKGDDPVGPSSA

SEQ ID NO: 17650 - DNA, 4872 bp, DROSOPHILA
cataccaaaagagtaccataattttcccatcctacagtgttgaaaaacacacaatcttaaaatttgtcgccaattttaaatattttgaaaattttgtttttgcaacgaggaatttagccaaataaaggaaataatattaaaatatattttaagacaccgaaaaggcacccacaaacaaattttaattcaaataatttattgaatacaataaagtagcgtatgagtttcatttgtaaactgttttcattttaaacattatgttctaaaatatttgactttgtacaaaatatattctatttatatatgccgaaaattgttcctccattgcacgctccgattttttgaatttcatttcactcatcgtgtcgctagctgaatgttaaattttaaattgaatatataatatatatatataggtgtggtgtatgtgcttaatccgagatatttcgatatgattaaacaatagctaggcgagaactttacatacaaatcgagttcggtggattgtcaagggaagatgcgcgaggactggaaaaataaaaaaattaaaaactaatttgcaaaggccgtttattttgtataaaaagctggcaactcaaatatcaaagcgaatctgtaaatccgtctaaattattaattaacaactaacttaggagtgtatgacaaaagcatttcacattccaatggcagcgccaggaacggaggcttaaaactaaaaaatgttttgggtagggagaggccgtacaaaggaatattggctggtacaaaacgaggaagaatcatcgctgacaacgttaagagctaaattaagtctatgacctatttatttacttaaatacgcttgacgccacagagccaccgtcgtttattcatcatcattatcgccgccgccagtcgccaagcatcattgtaatcactttagcatcatcgtccttattactttgaggagtgagtttcgtttaccatcgctgcatctctcatttttgatcattgaccttgtctaagcggatgagggtcccacgggatcgtcacccttcacggccgacgcataggagctacttggtttgtcgacaccaccggtaacagaaacagccgacttgccatcaccgccacttccaccagtgcctgctccggctgcacttgcactgctcggcggaactccagctgctccgccaatgctcacgccactgttaaggcctagagtttgaggtgaatcaactagagaatttgtttcgattgtgggtttggttgggatgtgtgtaagtgtgaagtgtgtgcgagaagcgaacagttaagcacctttgatatccatggcatagtggtcctccagccgcaggtcgtgcctctttattagctggcactctgcgccctcgacggtgggaatggaatacacgtacaagtacccatcctgcgaggcaatcaaaagtctacaaatacaacagaatgaaccgttatttagaacttgaaatagaggcagggtaatcagtttgtagttcaatttgcacgtgattcaatttttgttttataaacctttatgaaatgtactaggctacttttgcaaagagcatattaattacatttcaacagagttcagggaaattcaaacatatgaagccagataaagtaggtagtgtaaatgatttacgcggaacaactgcattggtatctagaactcagattccctacctgaggtattaagctcgcatagaattgcagttttcgaaattctttatagctaggtagaattttatggctttttcactttcccgtgcgttcttcgttgcaaattgaactgaaacaaaactgatccgtgctagactcaccttagctgcttttgtatcgtggcaatagcgcacatcctgcgcactcccgcctccggcagagtgaccgaggcgaaggcacggccttggctaaacacgtcggtcacctgcgtgggcaggtagctggtgaccgttttgcttaagaatctaaaaaacgagtaacttgcatgagagagtagatatggtgagtggttgagtagttgtggttgttgttgttgaggtggttggttggtacgtgtttggtggattcgcaaaatgaaagaaaagaaaaatagataaatgtcaagtgccacacgagaaataggagaaaaatcaaaaaatcttaagtcctgtacaaaaaaaaaactttgatctgggcctgttttcaaaatcgctgttcaaaattatggcggcttttctgtattggcattttcgttctcttgcttgattataatttacagatagtatttagttgagaaacccttgaacgatttcattttaaacacaaggcttttagtagaaatacaaattctttcaaataagttaaaaatgggaggattacatatgtacatatgaatggatcagtgtggtcaatgaaaataatagttgaaatggatccagaacgatttctatattactaaaccatatgggaaaaggttcatggaactgaacatatgtgacgtttaatattaataattcgacgaaagccgtggatgatagcagatggttttgtttttaaacataggagtcgggaggtaatagcgattatgtacagaacacccacaccttaatatttgaccataagccataactgcatcgagcagaaagtacaacaatctacaagagctacaaaacataagttgatttatccgaatccaacaccgcttaccccatccagtcgtcgctcgactgcttgctgccatggccttcggctgtttccgtggcactgcgatccagccggaagatgtgaaccgtctcggtgttggagctggacaccagatattcggcgcacgtgctaaacgacagcgaaacgatggacacacagcgctttagtccccgtcgcagttcaaagagtcgactgccatcctgggagctgaagactcggatcaccgtgccacgctcactggccgtggctatctccgtgcccgagggactaaaggccaatgccgccagaggtgtgtcgtgggcgggaatcatggtcttggcgtgcaagttgatggcatcaaagatctgtacctcgccagcagtcacgctgcctgggtaggccagatagcagtgctccgacgacgaggagagggcacaaagaccctgcggattgcacggtgtgtcgcgtatggtgtgcaccaccttcatgtcctggatattgtggatatacaatgactcctccaggcacacaatcaatcgctcgcgattgagcttcacggccagtattgtgtttgcatacgagtagttgcagatctcgctctgcttcttaaagtggcacaccttgagcttgcgtggtgctcgctgggaaactattgccaccaaggagctctcgaacagacgctcgatgaggaacagctcgtcgcttttcgtgtggtagatcttgtccagggtcgagtccacggagcccaggctgtacaggctgtagcctccactggtggccacggccagggaactgaaagggtggaaagtgtgagtgggttggcaagtaataggtggtgttaagaattttaattcgctttgcagaaacaatgactcatacagtttgtaaactaaatttactttgtcaggtgcagataattaatagagtcattatctaataaacgtaagcaaaagtagaacaaatattactggcacagaaacaactaactttatcaccgtttcctttagcgagtgtgcactgtaacttacgttatgttctggttgaagttgacgaacacttcgcccgcatccacatcggtgcgcccgagcaggctcatcatggtttctgtgtgggaggggctggggtcctgcaacagattgggcgtaaatcgttagctatatcggactgctcggccagggaaatgtgttgatctcgcgatttaccgatggcgcattacggaatagcgaatggcgcaaacaaagcgtgggccaaagcagtaaatatatgttaataaatacaataacaaactttgcactagtgtgtgtacactttttggggctgctgataaaagcaacaacaacaaacaaaacacacacacacacccaaacgcttgcgaaatgtacatacgtgactgagaatcgtttatttgtacctatttgtatagctaacacctctgcctcggccctatcaatatacgcaggacaccgctgttgactagtggttggctgcaaggcgtttattaaactgaatccacgtaatgtttaatgatatttggatttcttgtcgcgcaattgtttttgctctgttttgcacacacaccagcacccacacaaaggcaagtgggacagcaacagagcagagcgaaccagggagtgctaatcgagagcagagttgcatgcgccagtgctggaaagggctgcgtctgcacctgagctgcatacatattgaaaatcattcacttgcattcaggataagcatctaccacgaaactaataaaactaaatgccattgttagttattttagagtaaaacattatgcaaacgattatatacattactataagttttatttaaaaaatgaaataagtctgtaaagtaattgcggcagtgttttagttccgaaaagcgaaccaccgaatcgtgagcacgagccagcatagtctgcatccctggataggtgttcagtgtttgccagccctggtcaggtctggttcaccaaaaaagaaaataaaattacatttcaatctttccaatatgcaaatatctgcacgaaaaccagcgagaacagcatgctcacaataaagagcccccaaacaatgtgactcgtatccgcgcagagtgacgtttcgtgccttgcccgagtgccaaatccaaatcccaatccaggcgcacaaaatcgatgcagatgctgtctgcattctcatagaaagtgcaactgaataaccgatg

SEQ ID NO: 17651 - DNA, 1438 bp, DROSOPHILA
ccatcggtaaatcgcgagatcaacacatttccctggccgagcagtccgatatagctaacgatttacgcccaatctgttgcaggaccccagcccctcccacacagaaaccatgatgagcctgctcgggcgcaccgatgtggatgcgggcgaagtgttcgtcaacttcaaccagaacataacttccctggccgtggccaccagtggaggctacagcctgtacagcctgggctccgtggactcgaccctggacaagatctaccacacgaaaagcgacgagctgttcctcatcgagcgtctgttcgagagctccttggtggcaatagtttcccagcgagcaccacgcaagctcaaggtgtgccactttaagaagcagagcgagatctgcaactactcgtatgcaaacacaatactggccgtgaagctcaatcgcgagcgattgattgtgtgcctggaggagtcattgtatatccacaatatccaggacatgaaggtggtgcacaccatacgcgacacaccgtgcaatccgcagggtctttgtgccctctcctcgtcgtcggagcactgctatctggcctacccaggcagcgtgactgctggcgaggtacagatctttgatgccatcaacttgcacgccaagaccatgattcccgcccacgacacacctctggcggcattggcctttagtccctcgggcacggagatagccacggccagtgagcgtggcacggtgatccgagtcttcagctcccaggatggcagtcgactctttgaactgcgacggggactaaagcgctgtgtgtccatcgtttcgctgtcgtttagcacgtgcgccgaatatctggtgtccagctccaacaccgagacggttcacatcttccggctggatcgcagtgccacggaaacagccgaaggccatggcagcaagcagtcgagcgacgactggatgggattcttaagcaaaacggtcaccagctacctgcccacgcaggtgaccgacgtgtttagccaaggccgtgccttcgcctcggtcactctgccggaggcgggagtgcgcaggatgtgcgctattgccacgatacaaaagcagctaagacttttgattgcctcgcaggatgggtacttgtacgtgtattccattcccaccgtcgagggcgcagagtgccagctaataaagaggcacgacctgcggctggaggaccactatgccatggatatcaaagttgattcacctcaaactctaggccttaacagtggcgtgagcattggcggagcagctggagttccgccgagcagtgcaagtgcagccggagcaggcactggtggaagtggcggtgatggcaagtcggctgtttctgttaccggtggtgtcgacaaaccaagtagctcctatgcgtcggccgtgaagggtgacgatcccgtgggaccctcatccgcttag

SEQ ID NO: 17652 - protein, 442 aa, DROSOPHILA; identical to SEQ ID NO: 17649

SEQ ID NO: 17653 - DNA, 3598 bp, DROSOPHILA
aggattatgacaagtgctggcaactggatttccgaggagctggaaccagctactctactgtcgattcaggaggataatggtattgttaccaaggtgtacgtggcgccctgtttgcagccgataaaagaggagaaagttttcctggaggacaacacgcaacgcttccactgtccgctttgctctaatgtgattcgcacggccggtgcctacaaggtccatctgatggcctgccaaagacgcttggcacgcatgatgaaggatgtgccggacgtgtcccagcatcagtgcaacatttgcaagaaaatcttctcctcggtggatgccctgatcggccacaggctcctgcatggaagcccatcaatgaatcgcacctgtgcatcctgccatgtcaagttcgggacggatctggagtatcgcacccatttggagagccatctgataccgtgcgagtccacggatgaatcctacgaaggggcgtacaccatcaccaagaccttcaattgcgtcttttgtcgcacggagttcaaggcctgctttaagcctggccaagtgacccgtcgatacgcgtgcgacgcatgtatcgtaaggctgaaggcccaggaggaggagaaaaagatcttagggaagagaaggcccgaattaatctgtgatcgttgtgggaaaaagtacaaatatgagggtttccttcaccgtcatctgaaaacttgccagatgccggataaatgcaaaagaaagcgtgagattgaaatcaccgaggtcagcgaggtaacatttacagaagttgtgcaaagttttaataattgattatacaaattcgcacattttaattttaaattaaataaatatattttttaattgtaatattttttataattttcaaattatggcgcccatcccaccgatatctatttcgatctgctatcgatgtggtcacacttatcgataaatccaccgtggcgtggtatttttgatttaaagcgttagtcgatttcccgcccagctgcacgtgtatatttttttgcggtccaaagaaaagttcgtaaataaacgaatttgcgtgcatttccagcgaacacgatgagttcagacgagtccagcgacggtttggaggagctgcagagtctgaaggccctctacggccagcaggagcaagagaaaccggcaaagatcaaaagggaacgttatattccaaaggcctcgcaggccaaggagctcaactatgtggaggtgcccatggaaaaggtgctcttcggcgacaggcagcgactgctcaccaatctagccaagtccgtgggacaaaagttgccgaacgatgacgaagacgagcaggaggaaaatcccggccaggcaaagccaggcgacaagcggaaagccgcctggtcggattccgatgacgaggacctgcaggtgggcgatgtcaagaaggccacaaagcacacgggtccactgaaccacctgcgcaaggataaatcgtacaaggagtatcttacggcgcgattccagcgcacgcttaaccaacccaagtgggcggaaaagaaggtcaaaaatgaggacgacgaggacgtatcctccgacgaagaactgctgcggacggttggctttatcgatcgtaaagcccggaacagtgatctgccccagaagactctgaattttaaacgggtcaaagacctgaacagggccacatatgccgagggtaatgccaccagcattcagtttcatccaaccagtactgctgctctagtggcgggcatgaatggcctagccaccatctacgccgtggatgggcaaaagaacgaaaggttgcacaacatgcgcttcaagaagttcccgctggcgtgctccagaattgctccatgcggcacaagggcgttctttggttctgtgaaaccattctactactcctacgacttgctggaagccaaggaatcgaagctaaagctgccgggcgcaatggaatttatgcaccgctttgaggtgtctccatgtggcaaatttatcgtcactgctggcaagtttggagccattcacctgctcacggccaaaacaaatgagctgctgcacagcttcaagcaggagggcaaagtgaagggattcacatggtctagtgactccaagaggatcctcgtctgcggttccacttccaatgtcagcgtgctgaacctgcgccagaacctcatcgagcacatcttcatggacgacggctgtatacatggagagtccattcaactgtctcccaaccaacgcctactggccaccggcagtcaagagggcgtggtcaacatctacgactacgagagcattttcgcatccaaggccccacaacccgagaagcgcttcatgaacctacggactgccatcacggatctccagttcaatcactcatctgagctactggcgatgtgctccagtgaggcgccgaatgcttttaagctggcccatttccccagcgccactgtgtactccaatttcccggcacagaacgagaaggttggctttgtgacctccatggccttttcgccgcacagcagcttcctggcctttgccactaagggcaaacaggtgccgctctttaggcttaagtacttcaagggttattaattgaaggcagtatgatgtttacaataaattcttaaataaaatcattactctttctgtggttacaatggaaccatctttatttaagttaacaaattaaggggacttatctttagaaaggagctcggaaaatatcgcgtttctgggagtcttgaatcttgccaatgtcttccagcttcttgctgatgttcgtcgactgcgattcgatccactgcaacgaattcatatgggcattaaggatttttccgatctgtatgatgggatcagtggtgtcctggcccttgttggcctcgttcaagttgtctattatctcctttagatcctcggacatctgcttcagttgtgtgtccagattctccaccatcaggtaggtttggctgcgttccatgtccaccctcgggagattaacgaattccttctcaagcggtcccaggctgtcctcaagctctttttgctgcgtggctataaactccagctcctggtccagcacttgctgatcggttttcacttttttcacggcatcgttgagctcgacgatcttcccgttgttgctgatgagcagtttgtcccatgcgttgatctgagtggcctgttcggtgaataccttttcctgttcctcgaactcgagagtccacttgttgatatgctcctcaagttggtggtaggacaattgggatgccgtggaaacggccgatgagtctgtggtcttggtttcggtagtgagattggcaaaagcaccaccagtacttaaagttggggccggtgcagctccctgcgtggaggctatggccgacggagctgcagtcagagttgtggacgcagcggccgtggtcttgggagctcccaatccagacccgcccagcaatccagttgtggtagctgcggtgttgggtgcactggttgctatagttggcaccacagatgccgctggttgagccgtaaagcctccgaaggcgggaggagcagcagaggttccagtcgcggtcgcagaagtggtggacgc

SEQ ID NO: 17654 - DNA, 1598 bp, DROSOPHILA
ctgcacgtgtatatttttttgcggtccaaagaaaagttcgtaaataaacgaatttgcgtgcatttccagcgaacacgatgagttcagacgagtccagcgacggtttggaggagctgcagagtctgaaggccctctacggccagcaggagcaagagaaaccggcaaagatcaaaagggaacgttatattccaaaggcctcgcaggccaaggagctcaactatgtggaggtgcccatggaaaaggtgctcttcggcgacaggcagcgactgctcaccaatctagccaagtccgtgggacaaaagttgccgaacgatgacgaagacgagcaggaggaaaatcccggccaggcaaagccaggcgacaagcggaaagccgcctggtcggattccgatgacgaggacctgcaggtgggcgatgtcaagaaggccacaaagcacacgggtccactgaaccacctgcgcaaggataaatcgtacaaggagtatcttacggcgcgattccagcgcacgcttaaccaacccaagtgggcggaaaagaaggtcaaaaatgaggacgacgaggacgtatcctccgacgaagaactgctgcggacggttggctttatcgatcgtaaagcccggaacagtgatctgccccagaagactctgaattttaaacgggtcaaagacctgaacagggccacatatgccgagggtaatgccaccagcattcagtttcatccaaccagtactgctgctctagtggcgggcatgaatggcctagccaccatctacgccgtggatgggcaaaagaacgaaaggttgcacaacatgcgcttcaagaagttcccgctggcgtgctccagaattgctccatgcggcacaagggcgttctttggttctgtgaaaccattctactactcctacgacttgctggaagccaaggaatcgaagctaaagctgccgggcgcaatggaatttatgcaccgctttgaggtgtctccatgtggcaaatttatcgtcactgctggcaagtttggagccattcacctgctcacggccaaaacaaatgagctgctgcacagcttcaagcaggagggcaaagtgaagggattcacatggtctagtgactccaagaggatcctcgtctgcggttccacttccaatgtcagcgtgctgaacctgcgccagaacctcatcgagcacatcttcatggacgacggctgtatacatggagagtccattcaactgtctcccaaccaacgcctactggccaccggcagtcaagagggcgtggtcaacatctacgactacgagagcattttcgcatccaaggccccacaacccgagaagcgcttcatgaacctacggactgccatcacggatctccagttcaatcactcatctgagctactggcgatgtgctccagtgaggcgccgaatgcttttaagctggcccatttccccagcgccactgtgtactccaatttcccggcacagaacgagaaggttggctttgtgacctccatggccttttcgccgcacagcagcttcctggcctttgccactaagggcaaacaggtgccgctctttaggcttaagtacttcaagggttattaa

SEQ ID NO: 17655 - protein, 506 aa, DROSOPHILA
MSSDESSDGLEELQSLKALYGQQEQEKPAKIKRERYIPKASQAKELNYVEVPMEKVLFGDRQRLLTNLAKSVGQKLPNDDEDEQEENPGQAKPGDKRKAAWSDSDDEDLQVGDVKKATKHTGPLNHLRKDKSYKEYLTARFQRTLNQPKWAEKKVKNEDDEDVSSDEELLRTVGFIDRKARNSDLPQKTLNFKRVKDLNRATYAEGNATSIQFHPTSTAALVAGMNGLATIYAVDGQKNERLHNMRFKKFPLACSRIAPCGTRAFFGSVKPFYYSYDLLEAKESKLKLPGAMEFMHRFEVSPCGKFIVTAGKFGAIHLLTAKTNELLHSFKQEGKVKGFTWSSDSKRILVCGSTSNVSVLNLRQNLIEHIFMDDGCIHGESIQLSPNQRLLATGSQEGVVNIYDYESIFASKAPQPEKRFMNLRTAITDLQFNHSSELLAMCSSEAPNAFKLAHFPSATVYSNFPAQNEKVGFVTSMAFSPHSSFLAFATKGKQVPLFRLKYFKGY

SEQ ID NO: 17656 - DNA, 2926 bp, DROSOPHILA
agggcttcgctgaagacgctctccgttggacgcggcccaatgaaggactcatcatcgctgttgtggttactattcagctcgcggcttcctttggtatttatcatccagttggccttggtctgatctaggcgctccggcatgctctcggcaagttgcttgtcgcgtctcttggcctccttcaagtccttccgcaaacactttctggtgcgtcccaggcagtcaacgtactccacctctaaatcgtcgtggccttcttcatcttggctggaactgctgctgctactcagtcgctggcgggactcacgtctctgcgtgcactgctccggctcccgatctgcctcctgttttttgcggttgaacatcaccaggcaattgtcatcggagttgaggctgcctccattgcggctcatccggtcgtagaacttactcttggcctccaggatgcgccgtgacttctccaactgagcatggtcctcggcctcgtacactttggcaccatcgtcgctgcttgcgacctttttgtagccctgatcactggacttttccttgttgccggcgctcttggtggggcgaaagtcggcggcggatgcctttgtggccttggccaccctcacctcatgctgtttccgcagcaattccgccttcaggctgagcagcgaggaaagattcacactaatagccttgtttggatcgttcattgcgtacaaaagtataactacaaaaatacagctgtgagataaagttgcagaagcaacagctgataaatacactggcacaaaacaaatcgagatactttctataattttaattattcattaggactgtccacaatattatgctgttttaaagaaaataacaaaacattagataacagatatatattgatacaagaagcacattaaagcaataaattaaagttacaaaataatttaataaaccacttattagcttatgttttttctctgtaccaaatacggccacactaagcgtggtgacaagaaaaagaagaagcgtgtttatttaccttttggaatgtcgaactctggagaggattttcaggtggtaacgcgcaagaaatggatggctcgtaagtgcctgaggcggcgggatcgccataaatccgaaagcgattacctaatcgactgtccggatgtgaatgtggagaaatttcagccgtaagtatttcatattgttgtgtttttcatagcccttttcctgaaaacaaaatccacttctaggcgccttgagaacctgtgcaccgagatgtgccaaagcgactactttctggtggccatggaagcgctgcagcagcaactggagggcattaggaaaccgttggagcgaattgtttgcctgggactgggacctttctcccgcacctaccatgccctgcatcaggctgcatttgtgattggactgcatcggcatcacaagatcagagaggccttgtacttcgatcccgtcttcagagacagcgagaaggaactgatccggctgttcgacggttgtataatgagcaaagactgcgcgggcaagcacgaggcgacggtgcccacgctctattatctgccacactgcccctacgctctgatgcataacatcctgtggtccaattggaagcgggagacactgcccaacgtttttctcatctcgaatagcttcgaaatgctgaccatgacgcccagaaaccaggatgaccacataacaagaatagtagaacattgtacagaaactccgctggaagatgactacgagcaccacaatgtattcaacgacttgtcgctgcacacgttcccccaggaatccttgcccggtagcaacgacgaagcgttctggacacgatgtgctcccttgaaggtaaacgaggatgaactgatcacggaaacggagacgagccttgctgccctgaagcttgaatctgaataaatgatcatagcgttggacttttaaacgttttttttcatatataccaaaaggcccgtgaaacgcgagtagtaagttgggtttcagtatagtttccaattctaataacaagctatttacaattatattggaggcacctacaagcgctccataatcattttctctgcaggctttacgccgtacttgtagaccttattgagactttccggaaagtcgggcagtagattgttgaagttctccacgtgatgtgtatgctgctccgtccagatgccgtcgcccgtgaagtggaactccgattcgattaggtagagaatgagagtcagaatttcgttgttgcttaacgaatcgaaattcgccactggcaactgcagatcttcttgcgcatcgggtgattgcaaaaggagcattttttcttcaatacgtttgctgtgtagaaacaaaaagtattagggcaaaatcgcttgtaaattaattgtaccactcacatgggataaagcagcaagtgtatgttcgcaaatatctcattaagtttaaactttttgctgcgtaagtactccagacactgcttcacgtgcagcaatggtatatggcaccagttgggatggcgagagagaagattgcgcagcacttgcacgtccttccccaaaacattactcaagtagacgactatatcgcggcctttagtacgatctgagccatctctggcaaatctggaacatggttatttgattagtcagtcaataagctgataagattcttacttagcgaacgcctcggacccacaagaaaggatgtgcaaggaggcgcaccgaacccgcagttgattgagataatccagacgcagtcgcgccttgttctggtagtggaccagtctcaggattcgcggattggtacccaagacttgaaactcctcgatctcctgcagatcccttagtcgctccagaaccgtatccggtccaagggtgagcacttccaggcagcggagaacggcatcctcactgat

SEQ ID NO: 17657 - DNA, 863 bp, DROSOPHILA
aaaagaagaagcgtgtttatttaccttttggaatgtcgaactctggagaggattttcaggtggtaacgcgcaagaaatggatggctcgtaagtgcctgaggcggcgggatcgccataaatccgaaagcgattacctaatcgactgtccggatgtgaatgtggagaaatttcagccgcgccttgagaacctgtgcaccgagatgtgccaaagcgactactttctggtggccatggaagcgctgcagcagcaactggagggcattaggaaaccgttggagcgaattgtttgcctgggactgggacctttctcccgcacctaccatgccctgcatcaggctgcatttgtgattggactgcatcggcatcacaagatcagagaggccttgtacttcgatcccgtcttcagagacagcgagaaggaactgatccggctgttcgacggttgtataatgagcaaagactgcgcgggcaagcacgaggcgacggtgcccacgctctattatctgccacactgcccctacgctctgatgcataacatcctgtggtccaattggaagcgggagacactgcccaacgtttttctcatctcgaatagcttcgaaatgctgaccatgacgcccagaaaccaggatgaccacataacaagaatagtagaacattgtacagaaactccgctggaagatgactacgagcaccacaatgtattcaacgacttgtcgctgcacacgttcccccaggaatccttgcccggtagcaacgacgaagcgttctggacacgatgtgctcccttgaaggtaaacgaggatgaactgatcacggaaacggagacgagccttgctgccctgaagcttgaatctgaataa

SEQ ID NO: 17658 - protein, 276 aa, DROSOPHILA
MSNSGEDFQVVTRKKWMARKCLRRRDRHKSESDYLIDCPDVNVEKFQPRLENLCTEMCQSDYFLVAMEALQQQLEGIRKPLERIVCLGLGPFSRTYHALHQAAFVIGLHRHHKIREALYFDPVFRDSEKELIRLFDGCIMSKDCAGKHEATVPTLYYLPHCPYALMHNILWSNWKRETLPNVFLISNSFEMLTMTPRNQDDHITRIVEHCTETPLEDDYEHHNVFNDLSLHTFPQESLPGSNDEAFWTRCAPLKVNEDELITETETSLAALKLESE

SEQ ID NO: 17659 - DNA, 4756 bp, DROSOPHILA
gcagattttggcgggtcttggatcttgcctcttggcttttagtcgagggctcagggccttgtcctttctgcgcttcatcagggctgatagttatgatctggagtaccctgccatagagtctgggattactccatttttaaagcggcttgttcaagagtaatatataagaccaagttggtgtcgagtgtgcggacttaaagtacttatggttccaatctataaacatatctttaatctcaattctttgccataattgcgaggtaattttaagtgttgcatctattccaaatggatttaacatgcattccccactttcattcgatcgcattccaaatggccatgtttcaatttgtcataatttgtgccatatctttggccataactgcagattggcaagagtgtaccggagtacacagcgaactttttttgctcctttcattgaacgttgtgcaaatgtgctaatcgaaaaagagggggatatttggtatttttgaaataccgtcacgtttcaacattttactactcacttgtggcacgttgttgccattgagcatatcagtttggaattttattggccacgcttcccgcctgcgtagctccactcctccatcccatcctcatcctcatcttcaccttcgccgcggccacttggagctcagctcgctgatcttggccttgatagccgcatatggaggcgggaataacccattccccattcccaaatcctccgatcttctacctcctcgattccccacaccaaccgattcctgacatttatattgtcagatattttaaatattccctgctccccgtgtgggagttatcctcctcctggccggggcttcaggtgtcgttatcgcgtctcaatggtctttacgaccagccgatggagtggggagatctcggactgactgcagaaccacagaaggacccgcggaccaggtcacgtcattgtttccgaatcggcagactcttaactataattggaatttttattgtcatgcgaagtcagagtgggattagtcgatagtaagtggtgatttcacttcaatggtcttcatgggcaaggaatgatgttaaattttaattaagaatttgaattcccataacttatcaaatacttatcaacccacagctgccacatcgttaccaacctatcgtcacaatggcgacaacgtgtctatcaccactgccccacctgcggatagactgcctctgggttacgagggagctggaactatagagctgcaggctcaggagaacgactacgtgcttgaggagtccgccctacgagtcccactctccccgccgccgaactactctccgcatcctttgaccccaccgcccagttacacggagagaccaagatcagtccaggaacacagatcgcacttggccgaggcactgcatccagctgcccccgcacgtgtagtgatatttcccccagtaggcgcaaatacagcagctagcgaacaggcagcacgtcaacaagccagaaggagacggcgactccgggagcttcagcagcagcagctgcgattcgcctccagcaccgatagctccagtagctccggatccagttgctccgaattagggagcgacagtgctagcagaaggcagcgtcgacgcaggcggggattaaggggtacgtataccatgtccccttaaaccatatcattacgaataccgtttcctcttgcagatgcctattgtccagatcttctgaacgcgtgctccctgatcctccagaaccccggcagcagtgacagttccgtgggtaacttcacggccacgcccccgcctccggtgcgagcacctggtcaccgggatcaggaggagagcttcgagtacagctccgactatgtggagatcgacgagctgctgccactagtcgccggcgggagagcgaagagcactccgcagctggcgatgggtcaaaacctgagcctgcgacggccgcgcatctcattgacctgggtgctccgagagcagcagcagacgcagcaggctcctccgtcgcaaacacccccatccccgcagaaggaggcagcgaaggaatcggacagccaggtgctggatcgcaaggagaacgaagtcttcccgcccagaacagagcccgtgcccacccagctggatgtcaccaagaagcggtaccgtgttaagcagctaccaagtggtggtgagccgctcaatggctatgccaccacgcccaccgcccaccaggctcctcccaacggtcacctggccaaccagaagttcttcagcaaccaaaacctgctggacgtgtcacggagcggtcccagcagtgctccagtggccgccgcctccaccaaagagctgctcttcgtgtgcacaccccagcgggcgcccaggaccgatagtcatagcgaagccctgcttctggccagaaagcgaaacgagatccgtaagaagctggcctcccgcctgcagcaggcaagatccagtgcctcgcaggcgggtgaggccaggggatcggtcacgggagcggagtctgtaaagtgcacctcctactcggagcccagtttggtggctgcctcggagggcggcggagtggggggctcgggcggaggagcagctgccccccagcagcagcggagacataggcatcgcaagcgtcgggatcgcaatcgtgtgcagagatttggctatgagatccacaacgtggacgagtttctctcccgctgctctctggccactcccggcaatattcccgtggttctttccacggccagcaccctataccaaacgagaccaggtggctaccaactggagatccctctgcccctgggcatggtggtgaatgcggttttcaagaaccagaactggctgtatgtgcaaacgccccacgcggaggagggctatgtgggctatgcctgctgcctgccccttgggattctgccccagcaggcaagagcgggctccaggaacaccccctgctgggagtccaatgcggatgtcttcccccgcccatgtggcaacatgacggactcggagaaggagatccgcctgcgtggtggcacccgatccgatggcgcccgcactccacgcagctcaaagcccactgaagatgtcctcaagatcggatccaccaccatcaacaacaacaacaaccatagcaataataataaccaagcgaagtgcgggagcacaaccagctccttgtacggagaacaacaggtggacaagctgtatctgagggccgcatccaagccgcgcctagtggagaaggcgtacgcccagttgcgctccactcgccaggtgactgcatctggttcagcttcggccaagagcggcgcttctcaggatgagtatgtgaccctgcagccaaagcccgccaagaagcagccgagtgcccaagcccatttgcaccagtcacagccagcggccaggcgcctctccaacgtgtcctacatcaccaacggccacaatggccagcatctgcatccgaagctcgtgcccctgccaccctacgagcacaagccggccaagaaccaggcggaggcagacgccaccctaaaggcgctgcggcgccagcaggaggtgggccagcgacaaactctagtcgccatcaacacggactacatcacggagagcatcgcggtgcacaagggtgagattgtcacgctgtgcgagtgccgcgagtccaaggatcagcgccagtggttctacgtgcggacgagggacggacgcgaaggcttcattccggccgaggtggccggccatggctacctgtagacctccaccttctggtattggtatgggtctctaagggtcatatgaaagggattagaaagcttaatgttaactatggacatcctttgtcatattaaccaaccatcatataattgctatatctagaatatcttaatctttaagattttctcatgattttgtggtaaattacttagctttatatttcgactctttccattactgagtaaagtatcattcatgaaaaaatggagcccaaccaccgtaagttgtccaaagagcaccttctcccttttaagatttccaaaaggacccaccccaaaaacaagtcaagttctacatttaaatgaattaacttaatacccatcttaagcactcataggccactaattccattcgcgatccttagtacgcttctagttgtaaactgtattcatatcggtgtccgtaattgaattgaattgtatctgtatctgtgtatgtttatgtgcgtgagtgtggatccttcgcaggatcttgtatttatctagcctagcattacgagtactctatgtaatagaaaacttgcttaaatgaaatcaaagacgaaagcgaagacggaacctatttatataataactgtacttgatgcttctaataaataacagacatttaaataaatataaaaaaccattgcgttactattgacctgggtaagtgggtagaaaagcaattgcatatttatacatatttgtattattcattttattatacacgtttcactcagaattgatatgtgtatatgaagataacataacgattttcagggtagttataaatgggttaacgttccaatatttgaactaattttttatttttttttaatgatctctataaatgtattgtttatgcactctaaaaataagtttcttattaaaaatataaataccatatacttaagctattgatttcaatctgtatatgcatgggttcgatttaaaattattgcaacctccgatccgagtttgtctcacaggcactctgc

SEQ ID NO: 17660 - DNA, 2514 bp, DROSOPHILA
atgcgaagtcagactgccacatcgttaccaacctatcgtcacaatggcgacaacgtgtctatcaccactgccccacctgcggatagactgcctctgggttacgagggagctggaactatagagctgcaggctcaggagaacgactacgtgcttgaggagtccgccctacgagtcccactctccccgccgccgaactactctccgcatcctttgaccccaccgcccagttacacggagagaccaagatcagtccaggaacacagatcgcacttggccgaggcactgcatccagctgcccccgcacgtgtagtgatatttcccccagtaggcgcaaatacagcagctagcgaacaggcagcacgtcaacaagccagaaggagacggcgactccgggagcttcagcagcagcagctgcgattcgcctccagcaccgatagctccagtagctccggatccagttgctccgaattagggagcgacagtgctagcagaaggcagcgtcgacgcaggcggggattaagggatgcctattgtccagatcttctgaacgcgtgctccctgatcctccagaaccccggcagcagtgacagttccgtgggtaacttcacggccacgcccccgcctccggtgcgagcacctggtcaccgggatcaggaggagagcttcgagtacagctccgactatgtggagatcgacgagctgctgccactagtcgccggcgggagagcgaagagcactccgcagctggcgatgggtcaaaacctgagcctgcgacggccgcgcatctcattgacctggaaggaggcagcgaaggaatcggacagccaggtgctggatcgcaaggagaacgaagtcttcccgcccagaacagagcccgtgcccacccagctggatgtcaccaagaagcggtaccgtgttaagcagctaccaagtggtggtgagccgctcaatggctatgccaccacgcccaccgcccaccaggctcctcccaacggtcacctggccaaccagaagttcttcagcaaccaaaacctgctggacgtgtcacggagcggtcccagcagtgctccagtggccgccgcctccaccaaagagctgctcttcgtgtgcacaccccagcgggcgcccaggaccgatagtcatagcgaagccctgcttctggccagaaagcgaaacgagatccgtaagaagctggcctcccgcctgcagcaggcaagatccagtgcctcgcaggcgggtgaggccaggggatcggtcacgggagcggagtctgtaaagtgcacctcctactcggagcccagtttggtggctgcctcggagggcggcggagtggggggctcgggcggaggagcagctgccccccagcagcagcggagacataggcatcgcaagcgtcgggatcgcaatcgtgtgcagagatttggctatgagatccacaacgtggacgagtttctctcccgctgctctctggccactcccggcaatattcccgtggttctttccacggccagcaccctataccaaacgagaccaggtggctaccaactggagatccctctgcccctgggcatggtggtgaatgcggttttcaagaaccagaactggctgtatgtgcaaacgccccacgcggaggagggctatgtgggctatgcctgctgcctgccccttgggattctgccccagcaggcaagagcgggctccaggaacaccccctgctgggagtccaatgcggatgtcttcccccgcccatgtggcaacatgacggactcggagaaggagatccgcctgcgtggtggcacccgatccgatggcgcccgcactccacgcagctcaaagcccactgaagatgtcctcaagatcggatccaccaccatcaacaacaacaacaaccatagcaataataataaccaagcgaagtgcgggagcacaaccagctccttgtacggagaacaacaggtggacaagctgtatctgagggccgcatccaagccgcgcctagtggagaaggcgtacgcccagttgcgctccactcgccaggtgactgcatctggttcagcttcggccaagagcggcgcttctcaggatgagtatgtgaccctgcagccaaagcccgccaagaagcagccgagtgcccaagcccatttgcaccagtcacagccagcggccaggcgcctctccaacgtgtcctacatcaccaacggccacaatggccagcatctgcatccgaagctcgtgcccctgccaccctacgagcacaagccggccaagaaccaggcggaggcagacgccaccctaaaggcgctgcggcgccagcaggaggtgggccagcgacaaactctagtcgccatcaacacggactacatcacggagagcatcgcggtgcacaagggtgagattgtcacgctgtgcgagtgccgcgagtccaaggatcagcgccagtggttctacgtgcggacgagggacggacgcgaaggcttcattccggccgaggtggccggccatggctacctgtag

SEQ ID NO: 17661 - protein, 837 aa, DROSOPHILA
MRSQTATSLPTYRHNGDNVSITTAPPADRLPLGYEGAGTIELQAQENDYVLEESALRVPLSPPPNYSPHPLTPPPSYTERPRSVQEHRSHLAEALHPAAPARVVIFPPVGANTAASEQAARQQARRRRRLRELQQQQLRFASSTDSSSSSGSSCSELGSDSASRRQRRRRRGLRDAYCPDLLNACSLILQNPGSSDSSVGNFTATPPPPVRAPGHRDQEESFEYSSDYVEIDELLPLVAGGRAKSTPQLAMGQNLSLRRPRISLTWKEAAKESDSQVLDRKENEVFPPRTEPVPTQLDVTKKRYRVKQLPSGGEPLNGYATTPTAHQAPPNGHLANQKFFSNQNLLDVSRSGPSSAPVAAASTKELLFVCTPQRAPRTDSHSEALLLARKRNEIRKKLASRLQQARSSASQAGEARGSVTGAESVKCTSYSEPSLVAASEGGGVGGSGGGAAAPQQQRRHRHRKRRDRNRVQRFGYEIHNVDEFLSRCSLATPGNIPVVLSTASTLYQTRPGGYQLEIPLPLGMVVNAVFKNQNWLYVQTPHAEEGYVGYACCLPLGILPQQARAGSRNTPCWESNADVFPRPCGNMTDSEKEIRLRGGTRSDGARTPRSSKPTEDVLKIGSTTINNNNNHSNNNNQAKCGSTTSSLYGEQQVDKLYLRAASKPRLVEKAYAQLRSTRQVTASGSASAKSGASQDEYVTLQPKPAKKQPSAQAHLHQSQPAARRLSNVSYITNGHNGQHLHPKLVPLPPYEHKPAKNQAEADATLKALRRQQEVGQRQTLVAINTDYITESIAVHKGEIVTLCECRESKDQRQWFYVRTRDGREGFIPAEVAGHGYL

SEQ ID NO: 17662 - DNA, 3352 bp, DROSOPHILA
aaaacttactcgcgaacatcaaagtaaccggatccctccaatatcaggcgaatttcctcatccgtgtgcaggtgttcggtgaaaaaggctttcaacttgttggcatagtctggaaggcacttttccgagcatgtgatctgtaataattcgaagtttaccaaagttcggtagatgtttttcaagaaaacatcgatcttgcctcatcatcgtaggtgtagccacgttttgccctcagttccgtgagggtattatcgctctggtactcgtccgcattgatctgcaaatgtgaatgatcaagataagctcgcccccaaggtcacttaaggtttttaaagtcgcaatttcgcttttcacttgccttaaagtattccacgccggtcttctggtacagatcatccagttccaagtaggcaggcggattgcggtggtgctccaggcgctgatcggtttcctccgtatccatataccaaacctgcaccattttggactgttttaaacgggttttcacgagcaacgagcaacaaatagattaaacaagaaaaattcaactggcatcagctgttcgttttcgaattttcgaaatcgataacagacactcaggcgaatgccgctagtgctgttaacttaacattcgaaaatgaatgctgttagttttgtgttcgaaatactgctattttaaaaacttcatttttgaaatgttcgatttaaaacgtaaaataaccataattttaataaccttcaaaaggagttatttttctattttttttttgttccattattactctttattattttacgatagatatacgatttttgggcagtttgttgtatgttttgactttaattgaatttgtagcgtgcaattttgcctttcgttactattatctagtttaatttgtgtagacatctgacagtttggtactaacaatcttttagtacgcgaaaatgctaggtttctggttttatgttacatttattggcgttacaaaggagcacaggattacgcagtcagtttggacagttcctcgcgcagctcggccgtgtcaatggctcccttcgcttgcgattgcggctgggcttgggcttgggcttgggattgggccaggaggcgggcacagttcttcttgtgcatgaaccaatgcagccgctggcattcgcgatcgcaatactgcaccgccttgcacttggagcacttcttgtccggtttctcggcgccgcaggtgctgcagtagttgccctcgtcctgaaaattagttttccagattagaaaagaatcatttgattatgagatcatgatacccaccgtaatccacctcatcccattgatggcatttcgcaggacagtcagtgctggtggggcatccttggcgccaaattgcgttgcgatttgccggaagatggtgcactctctcacgggaaactccctggcacattcgcgcaacgtgtattccacatagtccagctggcccagcttgttctccttgagcacccgcttcacaaacatctcgatgaaatcgttcttgttcgcatcgcccgcctcctcgccacttttctccttgtgctgcgccttgaattgctcctcgcagcgtattagttcggccaaaatccagccctgataatggaacttgaaggccagcagctcgttgaggtcatgcgacttctgcatctccttttcgcacatcaaagccagcgtcttgcgcagactggacaggatcctaagcaatcccaaggactgcacattcagggcaatcctcacgggatgcaggttgatttcggtgacaaaggcgtggaacgatttgagtaagctgggtggtatatgcggctccgtctgctggccatgcacttgggtgtagtactccaaactcgactgggtcacatagttgttgatggtctccacgcaggcgtggttgcccacaaaggcggccatttgggcggcggtcctgttgacactattgatgctacccggcttgatgccagcatccaaaagaagccggcacacatgtgtattgcccgatagagcggcgaaatgcagtggcgtataatcagctccatgctgattgaggtttatgtcggcaccctgtggaagaaaaggcggttatttcatgtttagagcccaagcggtggttgcctggcagatgtacccaccatgtccaggagcagctgcaccgcctcgcggtttcccttgaagctggcgtgggccaaacacgacatcccggtgtcgtccacgaaattaacattcctcactccgctcagcagctgcttgaatccactggtgtcattcttggccagatgatccagcaactggcgctgcacgtcgtccagctgtacgatcttcttgctttcctcggtcattgtgattcgattgtttgtttttgttggatttttcaagtgctcttcggaatatggaaatcaagaaactccactgttttcggcgtgcttacagcgatactgtcacagtttcacaacactgtccggcggttggcgtgcgatatatcgttacgatatggtacaataagaaactaaaacaatatcatatatatcttgagttttataaaatcagaaaatatggaaattggcatatatggaaaaattactaagtataagtattataatcttatatatttttgtattgttatattatattatattatataataaaattttcttaagatatgttggtaggtttcagttaatctctctttgcaaaatttgtttctttatgagccataaatttgcttatacataaatatatataggttaaataagttgttacgttattgaataattttttatttatcatgaaattgtgtgtttctcaattcccatcactaaggtgttgttagcattagtattttatatgtggaggcccgttttggttgggctttattcgactagccccgctacggtcactctgctgttttgttgttgtgttttttgtcggcggcgtgtgtatcgcattcgcatcgcatcgaattgaatttgattggattggcttgaactgaaatcgtgtgttttgtgtttttgaaaaaactgatacaagcatttgagccccgcgagctgcccataatgttgaaggcgcccttgcgctactaggcaattaattaaaaaaaaataatttaaaaagtaccgcagtgtggaaaaaaggtgataagcgtggtgcagaaaaatgatgaaaggaagaaattccaatgcagacgaaacccttttgcatggggaaatgtataaataatataaaagtgaagataagcgcgcaaaatagcgaagcaagtggaaaagggacggcgagagagcgagataaggaaaagccagataaacaaaagccgtacacacacacgcacacatggccacaatt

SEQ ID NO: 17663 - DNA, 1224 bp, DROSOPHILA
atgaccgaggaaagcaagaagatcgtacagctggacgacgtgcagcgccagttgctggatcatctggccaagaatgacaccagtggattcaagcagctgctgagcggagtgaggaatgttaatttcgtggacgacaccgggatgtcgtgtttggcccacgccagcttcaagggaaaccgcgaggcggtgcagctgctcctggacatgggtgccgacataaacctcaatcagcatggagctgattatacgccactgcatttcgccgctctatcgggcaatacacatgtgtgccggcttcttttggatgctggcatcaagccgggtagcatcaatagtgtcaacaggaccgccgcccaaatggccgcctttgtgggcaaccacgcctgcgtggagaccatcaacaactatgtgacccagtcgagtttggagtactacacccaagtgcatggccagcagacggagccgcatataccacccagcttactcaaatcgttccacgcctttgtcaccgaaatcaacctgcatcccgtgaggattgccctgaatgtgcagtccttgggattgcttaggatcctgtccagtctgcgcaagacgctggctttgatgtgcgaaaaggagatgcagaagtcgcatgacctcaacgagctgctggccttcaagttccattatcagggctggattttggccgaactaatacgctgcgaggagcaattcaaggcgcagcacaaggagaaaagtggcgaggaggcgggcgatgcgaacaagaacgatttcatcgagatgtttgtgaagcgggtgctcaaggagaacaagctgggccagctggactatgtggaatacacgttgcgcgaatgtgccagggagtttcccgtgagagagtgcaccatcttccggcaaatcgcaacgcaatttggcgccaaggatgccccaccagcactgactgtcctgcgaaatgccatcaatgggatgaggtggattacggacgagggcaactactgcagcacctgcggcgccgagaaaccggacaagaagtgctccaagtgcaaggcggtgcagtattgcgatcgcgaatgccagcggctgcattggttcatgcacaagaagaactgtgcccgcctcctggcccaatcccaagcccaagcccaagcccagccgcaatcgcaagcgaagggagccattgacacggccgagctgcgcgaggaactgtccaaactgactgcgtaa

SEQ ID NO: 17664 - protein, 407 aa, DROSOPHILA
MTEESKKIVQLDDVQRQLLDHLAKNDTSGFKQLLSGVRNVNFVDDTGMSCLAHASFKGNREAVQLLLDMGADINLNQHGADYTPLHFAALSGNTHVCRLLLDAGIKPGSINSVNRTAAQMAAFVGNHACVETINNYVTQSSLEYYTQVHGQQTEPHIPPSLLKSFHAFVTEINLHPVRIALNVQSLGLLRILSSLRKTLALMCEKEMQKSHDLNELLAFKFHYQGWILAELIRCEEQFKAQHKEKSGEEAGDANKNDFIEMFVKRVLKENKLGQLDYVEYTLRECAREFPVRECTIFRQIATQFGAKDAPPALTVLRNAINGMRWITDEGNYCSTCGAEKPDKKCSKCKAVQYCDRECQRLHWFMHKKNCARLLAQSQAQAQAQPQSQAKGAIDTAELREELSKLTA

SEQ ID NO: 17665 - DNA, 7146 bp, DROSOPHILA
ttatccatcttgggctgttttcctccccccagatattaacgaactgaacctgccaaacacttgcgccacagactttcccgatcccaatgacttgctcaacttcaagcttatcatctcgcccgacgagggcttctacagagacgggcgcttcgtgttcaatttccgcgtcggatccaactatccgcacgagccgcccaaggtgaagtgcgccacccaggtgtaccatcccaatattgacctggatggcaacgtctgcctcaacattctgcgcgaggactggaatccagtgctgaacatcaactccatcgtctatggcttgcagtttctattcttggtttgtatttcgtgatttgtgttattttagaggctatacgctttgttccataagtcttgatcaacagccacagttttcaagttacaattgattttttatgtcttgttttgtgaacaattgatttctaagtgtgcttaattgaacgcccactgaaacaattcaatataaatgtttgtttataccacttaacgatcattatttctatttttgttattacccaagccaacagtattactaatccaaattaactgcttccaggaacccaatcccgaggatccgctcaacaaggaggcggccgacgtcctgcagaccaaccgccgtcagttcgagaacaatgtaaagaaggcgatgcgtggtggctgtgtgggcgagacctacttcgagtgctgtctgctcaagtgatatagggaatcgcaaggtctcttactttaagcctgtccatacacctccccctacacccgctaactgaagaagatgaagcaaaacacagacgaacatcggcgacaacaaattattgtaataaacgaaaacaaaatccactgcgtgcaaagaagaagccgagtcaagtcaccaatttctagtttttaatacaattcatttagcaatttcgcccacccgtctcttaatcataatcggcatacccaatgtggcaatcatccaaatccctcacagatgaatgctgtgcctggccatctgcatatttcgccacaggcaaagatcagacacagcggacagtcttcctgcctggattcgcagatcgtatagtctgctgatgagacccacttttatgtcgtcggtgaccaaaactttcaggagctgttgcaccaggccgttgggcagcaagcgcaggacgggagcgaccctctcaccaccgcattccaccagcagcgaaatgaactgataaacaaaaacggccttgggcgacagttcatctccactgacaaactgcaggaacactgcgaaaatgtgctgcacgctcgtctgcagtggttctcttagagtaagcggcgtagtccgcagttcagatgtggaagtggagcccaataatgctgccaggccagctccggtcgtagtgtccgtaaagtcgcttgagttgtcgctgccatcgccaatcaccttgcgcactttggctgcattggccgccagttcctcgtcatcgtgagatctcgatcgcttcttcatggccgtcaaagcggaagtgccatttcctttgcggctctccaggcaggaaataatacagtaaacacagaggcgggccagtaccagggattggggctcattaatgtcctcactagaaaaaaaaaagattgccaaattgtgagtacgagttctatcatagcagtttcaatttttacatcctttcttgctaaatcgattcgatttgtagataataaataaatgaaataatatacagaagaaaatattggtatttacccttgtcgtcgcagtatcagtggagccaccacgtactggagcaacgcctcagtggtcttctcaatgtcgagatgcattacggcaaacacaacgtccatggttcgcgacatatcccttgtgtacttgcaggccagcagttgctccaccaactgcgtggacagccacgccgcgccaccggctagcagaagcgactccaacgactgagcggcgcgaacgggcaggtgaccagcatcgactactgttcgccacacctcccgaaactgctcgactagcggggaatgtgaaatgaggcgggacttggtacttggggcaggatgcacatcgtgttgcatttttctgataatctgataggagagagctagtcgctccttggcattttcctggctggaaagctcttcgctggtcaacggagccaggaactgctgaatcatgtttagtggtttcagaagttccgtttccttcaccgaatacatgtaggcgcatagaaaactagtggcgcaaacggaaaaactgaaaagtcttctcttaatattgtccagaatacttttaacgtccgccgaggatagcgtttcctgctcccaagctattagcacatgatgaagcactccgggcagattaaggcaagtctcctgccaacttaagttgtttggcttaagttgtgatgcctctggtttactgaagctaagcaaaagctcgtcgacaatactgtcatcacagagggcaagaatttgacgcggattcttaagcttattcctttccaccatgcactcacgcacccatttttcaaaaaatgagtcaccacgctcagataagaccacctgaagtaaaatagaattcattaaaattgcagcgtaataacaggcgggtttacgaacatcggatccataggtctgcacaatgcttgtcaacattaggaaggaaacatcaaacagagtggaccggatgacgcatagcttgcccaggtcgcccggcaccggcttggagttctcattgcactggatcagacgcgatacgaatgtcttgaggcgtccctcgacggtagccactgaaagaatcaactcgaagctgttgcccaccggcacttggcaaaggacattaaccatgtcctggaccttgttggtgcacagcgtttttagtactccggaaagcggaacctctgcgcgcttgatgaagtttatattggagggtgtctgttggccattgtcgcattttttgagtaattgagaggcggcttccctgaaagagttcgttttaaattatataattaagatgggtgtacaaaatgcatgatttctcgactaacctttgactggcgaacttctttacgtggacatcattgactagttgttgcttggtccagtcattcaaaaggaactcgatcatattgcatgagcacttagtatccatgaagtctagcagcagattgtcctcgatgagcaattccaaagcctccaccaactcgggtatgtaatcggccggtggtggttgctccccgggaatccgttgcagggcgtgcaattgcttaatgatgtgcggcattttaaagaacataaaggcaccccacatagtgtcaggacttgtatccgcaacattgctcagcgtgaggaatccagcacggatgatttcgtagaagagccgtgtattggagtatttctttaatcgttgcagcatctgcaactcagccacgtagtagctggtgtccttgcacggattgagaagcacttccaccgccagtaagggttgcacgcagcacgagatcttctcgagtgttgacggcggattaagtggttgcatttcaagatgcttggcttctataaaggccaactgctgcaattgctgctccacttgtggtgcatttagcgtaaagtttgagttcgtcaacgatcccttgatggtagcgtacttatcccgaatccgtccacatatttcgagctcttcgtgacagcccacgtacagcatagacagcaggaactgctgctggctaagccgatctatcaccacgcaggtctggtccagcatgtatgattgctcagcactaatctcaccatacagttcatagtgctgcacagttctggcgaagatttgaagcagccagtacaccaagtggacgacggaactcggtaaaaccgcttcctcagattttattctggaaatagaaatgaacaattatttttactcctgctttttaacgacttataaaactaaaaggacttaccggcaggtaacgccatccacgatgctggccaggaattcaaggagcgctgtaatgcaataaacgcgctctaatttgtcatatttggcaatgcaccgaataacagcagcgtgagaaacgagatgggcgcacagtgaatgcttcaggtagttaagaaccaactgaaaagcatagattacaatttagaaaacaatctaaatactcagatcaactactcaccggattagccgtggaaccaatgagtgcctgctgcatcagacagtcagccagattgtatacatctccactgactcctctcggcagcacctgaaatagtaatcaagggaaagacaataatgaaacattttcttttcctgtcaaactttaacacaatatctgggtcacaaccccataaaataaacagaaacagaaccacttaaaaatctagttaggatttccacttatatagttagcacacatagttgcatatttcgttacgcgataaaaaatgtttcgtttaaaattatttcgcagtcctggagacgtattaagcactttaattagcggagctgcaacggattgctgcaggaagacgtcacattgtttggagttggatcgcgctcccgctgtcgctgcctgctggatctgtatgcggatgatcagtcaatatcagttcaggaccacgaaaccagcctactatccagatcgccagcgggaggcgaagcgaacgtcagcgggagccacgcctcaacaggtgtcatctccggctgttaagtacccgcaaagccgaggcatgcccaaggactactactacaaagtgttaggcgtcaacaggcacgccaccatccagcaaatcagatcggctttctatgcgctggccaagcgctatcatcccgactcgacgcactcggaacaaaagctgaagcacttccaggagctgtccaacgcctacaacatcctaaccgacgagacgaagcgcttggagtacgatcagctgggcgggattaaggatgagcgcgcttttcttgaacaggcgggcaatcccctaaatgtgggcctcgaggaggccaagaagttcgattcggataagacgacaaatgatggtaagcagacggattttagatacatcaaacaccatttcacttttcactatatcacgatatgaacacgatccttgaatcgccttctagagatcaacaaactgaagagcaacgagttcgatctgccacttgacttccttgaggcgacagtgggatgcaagaagcggatagagctgcgctacttgcggaaatgcgagacctgcaagggcaagtcacaattgatggcgcatcgggatgtgggcaaggaaccctgtcggcgatgcaatggaactggaaaggtcatgaccaaaacgccaaccttctcatcggtgaacacatgcacgcagtgcaagggcaagcgattcacaaatcgcaacgactgcgaaacatgttcgaatcgcggcttcgtggtgtccaatgtggatgtgatggtatcggtgccttccggatcccgggacggtgatgtggtgaacattataaatccggaaacgaagcagcaggtcacctaccgcttgtcggtgccgtctagcgactatttccgacgcgttggcaatgacattctaaccgacaagcacctaaacatctcggaggccattctgggcggatcctttcagatacggggtctgtacgaaagcgtggagctgcgtgtggagccgggcacccaatcccacacccaggtggtgctcaatggcaagggggtgcgctccagggagggcgtgggcaaccacatcgtcacgctgaaggtgcgtataccccggaatctctccgtaaagcaacgccaactggttttggcactgtcccaggcagaggatccggttttcgagcccaagactaagagcacggaggcgggcaatttgagtcactaaaattctcaatgtaccggcctcattgcgtttacaatatattggtaaacacgaacattgattgtttggtgtgttgatttgcttgggttgccttgccttttttatgttgatgccccactgggagtccgtccagcgctcgcgccacgccacatagatgagttggaggatcttgttgttctccttcatctctcgcgtccgtggaagtaatataacttttacttttctcgtatttcacgcaatttattttatttaaacctaatatattttttagcagcgctcagtgtgaccgaggtatcttttattaatcataccaaaagagtaccataattttcccatcctacagtgttgaaaaacacacaatcttaaaatttgtcgccaattttaaatattttgaaaattttgtttttgcaacgaggaatttagccaaataaaggaaataatattaaaatatattttaagacaccgaaaaggcacccacaaacaaattttaattcaaataatttattgaatacaataaagtagcgtatgagtttcatttgtaaactgttttcattttaaacattatgttctaaaatatttgactttgtacaaaatatattctatttatatatgccgaaaattgttcctccattgcacgctccgattttttgaatttcatttcactcatcgtgtcgctagctgaatgttaaattttaaattgaatatataatatatatatataggtgtggtgtatgtgcttaatccgagatatttcgatatgattaaacaatagctaggcgagaactttacatacaaatcgagttcggtggattgtcaagggaagatgcgcgaggactggaaaaataaaaaaattaaaaactaatttgcaaaggccgtttattttgtataaaaagctggcaactcaaatatcaaagcgaatctgtaaatccgtctaaattattaattaacaactaacttaggagtgtatgacaaaagcatttcacattccaatggcagcgccaggaacggaggcttaaaactaaaaaatgttttgggtagggagaggccgtacaaaggaatattggctggtacaaaacgaggaagaatcatcgctgacaacgttaagagctaaattaagtctatgacctatttatttacttaaatacgcttgacgccacagagccaccgtcgtttattcatcatcattatcgccgccgccagtcgccaagcatcattgtaatcactttagcatcatcgtccttatta

SEQ ID NO: 17666 - DNA, 3098 bp, DROSOPHILA
aataaattgcgtgaaatacgagaaaagtaaaagttatattacttccacggacgcgagagatgaaggagaacaacaagatcctccaactcatctatgtggcgtggcgcgagcgctggacggactcccagtggggcatcaacataaaaaaggtgctgccgagaggagtcagtggagatgtatacaatctggctgactgtctgatgcagcaggcactcattggttccacggctaatccgttggttcttaactacctgaagcattcactgtgcgcccatctcgtttctcacgctgctgttattcggtgcattgccaaatatgacaaattagagcgcgtttattgcattacagcgctccttgaattcctggccagcatcgtggatggcgttacctgccgaataaaatctgaggaagcggttttaccgagttccgtcgtccacttggtgtactggctgcttcaaatcttcgccagaactgtgcagcactatgaactgtatggtgagattagtgctgagcaatcatacatgctggaccagacctgcgtggtgatagatcggcttagccagcagcagttcctgctgtctatgctgtacgtgggctgtcacgaagagctcgaaatatgtggacggattcgggataagtacgctaccatcaagggatcgttgacgaactcaaactttacgctaaatgcaccacaagtggagcagcaattgcagcagttggcctttatagaagccaagcatcttgaaatgcaaccacttaatccgccgtcaacactcgagaagatctcgtgctgcgtgcaacccttactggcggtggaagtgcttctcaatccgtgcaaggacaccagctactacgtggctgagttgcagatgctgcaacgattaaagaaatactccaatacacggctcttctacgaaatcatccgtgctggattcctcacgctgagcaatgttgcggatacaagtcctgacactatgtggggtgcctttatgttctttaaaatgccgcacatcattaagcaattgcacgccctgcaacggattcccggggagcaaccaccaccggccgattacatacccgagttggtggaggctttggaattgctcatcgaggacaatctgctgctagacttcatggatactaagtgctcatgcaatatgatcgagttccttttgaatgactggaccaagcaacaactagtcaatgatgtccacgtaaagaagttcgccagtcaaagggaagccgcctctcaattactcaaaaaatgcgacaatggccaacagacaccctccaatataaacttcatcaagcgcgcagaggttccgctttccggagtactaaaaacgctgtgcaccaacaaggtccaggacatggttaatgtcctttgccaagtgccggtgggcaacagcttcgagttgattctttcagtggctaccgtcgagggacgcctcaagacattcgtatcgcgtctgatccagtgcaatgagaactccaagccggtgccgggcgacctgggcaagctatgcgtcatccggtccactctgtttgatgtttccttcctaatgttgacaagcattgtgcagacctatggatccgatgttcgtaaacccgcctgttattacgctgcaattttaatgaattctattttacttcaggtggtcttatctgagcgtggtgactcattttttgaaaaatgggtgcgtgagtgcatggtggaaaggaataagcttaagaatccgcgtcaaattcttgccctctgtgatgacagtattgtcgacgagcttttgcttagcttcagtaaaccagaggcatcacaacttaagccaaacaacttaagttggcaggagacttgccttaatctgcccggagtgcttcatcatgtgctaatagcttgggagcaggaaacgctatcctcggcggacgttaaaagtattctggacaatattaagagaagacttttcagtttttccgtttgcgccactagttttctatgcgcctacatgtattcggtgaaggaaacggaacttctgaaaccactaaacatgattcagcagttcctggctccgttgaccagcgaagagctttccagccaggaaaatgccaaggagcgactagctctctcctatcagattatcagaaaaatgcaacacgatgtgcatcctgccccaagtaccaagtcccgcctcatttcacattccccgctagtcgagcagtttcgggaggtgtggcgaacagtagtcgatgctggtcacctgcccgttcgcgccgctcagtcgttggagtcgcttctgctagccggtggcgcggcgtggctgtccacgcagttggtggagcaactgctggcctgcaagtacacaagggatatgtcgcgaaccatggacgttgtgtttgccgtaatgcatctcgacattgagaagaccactgaggcgttgctccagtacgtggtggctccactgatactgcgacgacaaggtgaggacattaatgagccccaatccctggtactggcccgcctctgtgtttactgtattatttcctgcctggagagccgcaaaggaaatggcacttccgctttgacggccatgaagaagcgatcgagatctcacgatgacgaggaactggcggccaatgcagccaaagtgcgcaaggtgattggcgatggcagcgacaactcaagcgactttacggacactacgaccggagctggcctggcagcattattgggctccacttccacatctgaactgcggactacgccgcttactctaagagaaccactgcagacgagcgtgcagcacattttcgcagtgttcctgcagtttgtcagtggagatgaactgtcgcccaaggccgtttttgtttatcagttcatttcgctgctggtggaatgcggtggtgagagggtcgctcccgtcctgcgcttgctgcccaacggcctggtgcaacagctcctgaaagttttggtcaccgacgacataaaagtgggtctcatcagcagactatacgatctgcgaatccaggcaggaagactgtccgctgtgtctgatctttgcctgtggcgaaatatgcagatggccaggcacagcattcatctgtga

SEQ ID NO: 17667 - protein, 965 aa, DROSOPHILA
MQQALIGSTANPLVLNYLKHSLCAHLVSHAAVIRCIAKYDKLERVYCITALLEFLASIVDGVTCRIKSEEAVLPSSVVHLVYWLLQIFARTVQHYELYGEISAEQSYMLDQTCVVIDRLSQQQFLLSMLYVGCHEELEICGRIRDKYATIKGSLTNSNFTLNAPQVEQQLQQLAFIEAKHLEMQPLNPPSTLEKISCCVQPLLAVEVLLNPCKDTSYYVAELQMLQRLKKYSNTRLFYEIIRAGFLTLSNVADTSPDTMWGAFMFFKMPHIIKQLHALQRIPGEQPPPADYIPELVEALELLIEDNLLLDFMDTKCSCNMIEFLLNDWTKQQLVNDVHVKKFASQREAASQLLKKCDNGQQTPSNINFIKRAEVPLSGVLKTLCTNKVQDMVNVLCQVPVGNSFELILSVATVEGRLKTFVSRLIQCNENSKPVPGDLGKLCVIRSTLFDVSFLMLTSIVQTYGSDVRKPACYYAAILMNSILLQVVLSERGDSFFEKWVRECMVERNKLKNPRQILALCDDSIVDELLLSFSKPEASQLKPNNLSWQETCLNLPGVLHHVLIAWEQETLSSADVKSILDNIKRRLFSFSVCATSFLCAYMYSVKETELLKPLNMIQQFLAPLTSEELSSQENAKERLALSYQIIRKMQHDVHPAPSTKSRLISHSPLVEQFREVWRTVVDAGHLPVRAAQSLESLLLAGGAAWLSTQLVEQLLACKYTRDMSRTMDVVFAVMHLDIEKTTEALLQYVVAPLILRRQGEDINEPQSLVLARLCVYCIISCLESRKGNGTSALTAMKKRSRSHDDEELAANAAKVRKVIGDGSDNSSDFTDTTTGAGLAALLGSTSTSELRTTPLTLREPLQTSVQHIFAVFLQFVSGDELSPKAVFVYQFISLLVECGGERVAPVLRLLPNGLVQQLLKVLVTDDIKVGLISRLYDLRIQAGRLSAVSDLCLWRNMQMARHSIHL

SEQ ID NO: 17668 - DNA, 4269 bp, DROSOPHILA
tgacccctccttggagttccgcaatgttgtcggtgttggaaatcaactaaatttgagctcaagctagctattttcaagccaaaacacttagcagtttgaagattgggcggcaaaattaaattttaaatttctttgaattggcaatacaaatgaagtactttgctcagtcgacgatacatttttgttactaaaacatgctgaaaaccaaaacatttatattattttaacgtttgcaatcactttttgcacttttaaaatatatttatgtctgtgtccgtttttttaaccagcgatcaactaacttgcgaaatcgacaaacaacactggtcgagagctatgttttagctccagttttagtcgtacatggaacaaatcattccgcgcaacttaaataaaaaaaccaactcagaaagaaaacgtagtcaatcgtacaaacaaaatcaataacaaaacaccggctttaattagtcatcttttgctatctgtaagtgcaaaggcgataaggtaacatttgggtcaaaagaattcaattacaagcccaaagtgcagcggcactcagttcagtaattgcattttgctaaatcagctaaacacatgtgtgcttcctatcagaaggttcgttctgcgtacctgtgtaggttctcttcagagctgccagccacaaaattagaaaaattacctaaggtacaaacgtaatgcggtacaacaattagagcttgtctttgaccttcggttttttttttttttgtaataagattctttttaagattttcataagatctgagatctgatcctcaaaaacagaaattttaaattattcttaaaaaccagatcaaaattttctaataaaagaccatagttcctatgttttgttagtacatgttttcccatcactagtaccgtgctctagtctactatgcttccaactatttccccaactttgttgaccagtgtagctggcaagcagcgccagaattgaacaacaaaagcatatcagaatcaaaagcccctgttctcggtctctcctcgattttctctatttgctccctgtgatcgctgtgaacttggcgtgataaggggctccggctcctcctgcaatcgagaaagcccgctgtttgcgccacccggcgaacaccaatcagtcgatgggagtactccgctgcaatagcaattagccactaaccttctgtcagctcttcaggtgccattcccctacctccagctcctcaggtgcccctgccaaacagagttatctggagtgccgcccgctggagaatataaattccctgggtgcccaaaggccaggattcagtcggtgccactagctcgccatgtacggaacgtggggcgtctttctgggcgggattcttctgctgcaggttctgcaattatccatgggcctcgataatggcctggcactaaagtgagtattaaattttgattggattctaggccacttaattgaaattctgtcgattttaggccacctatgggctggatgtcctgggagcggtaagaaatatttaccagcaactagattagatcataaagaattatcattacgtctaacatttaaaataaataaactttaatagttagtaaaaattaggccttggcatgaactctacacgctacgctgcaataacgcttttgtttatttcattgctgatataactaacactactgatataactatagtctatttaaagattctctgaatttttgattacccatgtcttacttacagattccgttgcatcaccgactgtaaactgtatccggatgagtgcatcaggttaatacccaaacccaactcagatcctcaaatgttcctttacttcttgttcatttcacctgtttcagtgaaaaacttttccaaagacatgcggatctcctggtttctgaaggatatgcggatgctggctacgagtacgtcatcatagatgactgctggctggagaagaatcgcgacaacgatacccagaagctggttccggacagaaagcgctttcccaacggcctaaatgctttatccgatcatgtaatttctaatatataactctagccctcaaggctgccaaactaacacgaatgaattgcagatccacaaccagggtctgaagtttggcttgtatcaggattacggcaccaacacctgcgctggctatcccggagtgatcaagcatatgaagctggacgcccaaacctttgcggattgggatgtggactacgtgaagctggacggctgttatgccaatatcagcgacatggcctcgggctatccggagttcggacgcctgctcaatgaaactggtcgaccgatggtatactcctgcagttggcccgcgtatcaggaggatgcaggagaaatgcccgattatgagtcactcaagcagcactgtaatctgtggcgcaactgggacgacatcgaagactcgctcgagtcccttatgcagatcattgactactttgccaagaatcaggacaggattcagccgcatggcggaccaggacattggaacgatccagatatgctgctgctgggaaactacggcttgagctacgatcaaagcaagctgcagatggcgatttgggccattatggcagctcctctaattatgtccaatgatctggctgcagtgcgtcccgagatcaaggctatactccagaatcggttggttaagcttcgatatcttatcttcttggacttattggtaaacttttgttatttgcagtgcggttattgctgtggaccaggatgagctgggcatccaggggcgccgtgttttgtcccgcaaccaaatcgaagtctggaagcgtcccattacgccagtaaccaagagtggacatcactcctatgctgtcgcctttgtcagtcgccgagatgatggcgctccctacaggatccccttcacggtcaaggagctcggattgacgaatcccaagggttataatgtgcaggatctgtacgatgccagcagcaagttgggcgtcttccagtctgagagtcagttcatcacacgcgtcaatcccaatggtaaaatccgttgcaaaacactaactagccctgacttacttcattttcccctcccccaggcgtaactttctacaagtttacagcgttgtaagcccaagatatgcaaatcagccgctgccatcaaatcgaatatgctcttatatacacactatttccacattgtccattgacgttgcatcgatgatctgtgtaataagttaattccgacaataaataccaggtaatcactgaagagtttgactttgttgatttttattgtttattaaacaattgattgtgtgcattacacacaggtataagtattgtacaattataggcatagattgcagtaccgacgctagttaagacttgttccatgatataaataaggtctgactggatgaaagagttaattcgcaagcttgtataaataagaagtgtagtactatatacgcgacaaggacccgaataagagcaaaaaggatagcgacccctcgggatcataccagttataaatagataccatctacagctactgcttacatgggtttggtcgagagagttagagttattgtcaagttgtaggcgaaaccgaaaccaaaccgaaggaaccatagcccggggttagtgcaccccattgctgatggtcggtgtgcgctcgtaggtgcgtctatgcagcgcatccacgtccttcaggtagtaggtgccgggaaacagtgcggagatgctgcccgttggcgtgtagggcgccgcatggttgttcttctcccgcacctccatcagcgcggagaactgctcgggcgcaaccttctcccgtgaattcagcaacggctgcacgtagtccagctgcgagacgaacttttcgaaagcagctgcatcctgggtcacgctgatcgagtacatggaagcagccagtccggatccgtaggagaacaaaccaatgcgctttcccaccagctcctgggctggtccgctaatcaacagagacaccaaaccggagtacaccgagggtgtgtacatattgcccacttggttggccagcagcagcgatttcttggtcttgctggcaaagatgttggcggactgcgtcatgaaggccttctccacatcgcgatcaaagtaggtgctctccagggtagcggtattaaaacgttccaggtcgggaaactgcttcgttcgctcctcctcactgctcagcaggaaatcgttgaagctcaggcgacccacagatttttgcaccaacttgcagaacg

SEQ ID NO: 17669 - DNA, 1726 bp, DROSOPHILA
caaaagcccctgttctcggtctctcctcgattttctctatttgctccctgtgatcgctgtgaacttggcgtgataaggggctccggctcctcctgcaatcgagaaagcccgctgtttgcgccacccggcgaacaccaatcagtcgatgggagtactccgctgcaatagcaattagccactaaccttctgtcagctcttcaggtgccattcccctacctccagctcctcaggtgcccctgccaaacagagttatctggagtgccgcccgctggagaatataaattccctgggtgcccaaaggccaggattcagtcggtgccactagctcgccatgtacggaacgtggggcgtctttctgggcgggattcttctgctgcaggttctgcaattatccatgggcctcgataatggcctggcactaaagccacctatgggctggatgtcctgggagcgattccgttgcatcaccgactgtaaactgtatccggatgagtgcatcagtgaaaaacttttccaaagacatgcggatctcctggtttctgaaggatatgcggatgctggctacgagtacgtcatcatagatgactgctggctggagaagaatcgcgacaacgatacccagaagctggttccggacagaaagcgctttcccaacggcctaaatgctttatccgatcatatccacaaccagggtctgaagtttggcttgtatcaggattacggcaccaacacctgcgctggctatcccggagtgatcaagcatatgaagctggacgcccaaacctttgcggattgggatgtggactacgtgaagctggacggctgttatgccaatatcagcgacatggcctcgggctatccggagttcggacgcctgctcaatgaaactggtcgaccgatggtatactcctgcagttggcccgcgtatcaggaggatgcaggagaaatgcccgattatgagtcactcaagcagcactgtaatctgtggcgcaactgggacgacatcgaagactcgctcgagtcccttatgcagatcattgactactttgccaagaatcaggacaggattcagccgcatggcggaccaggacattggaacgatccagatatgctgctgctgggaaactacggcttgagctacgatcaaagcaagctgcagatggcgatttgggccattatggcagctcctctaattatgtccaatgatctggctgcagtgcgtcccgagatcaaggctatactccagaatcgtgcggttattgctgtggaccaggatgagctgggcatccaggggcgccgtgttttgtcccgcaaccaaatcgaagtctggaagcgtcccattacgccagtaaccaagagtggacatcactcctatgctgtcgcctttgtcagtcgccgagatgatggcgctccctacaggatccccttcacggtcaaggagctcggattgacgaatcccaagggttataatgtgcaggatctgtacgatgccagcagcaagttgggcgtcttccagtctgagagtcagttcatcacacgcgtcaatcccaatggcgtaactttctacaagtttacagcgttgtaagcccaagatatgcaaatcagccgctgccatcaaatcgaatatgctcttatatacacactatttccacattgtccattgacgttgcatcgatgatctgtgtaataagttaattccgacaataaataccaggtaatcactgaa

SEQ ID NO: 17670 - protein, 384 aa, DROSOPHILA
MGWMSWERFRCITDCKLYPDECISEKLFQRHADLLVSEGYADAGYEYVIIDDCWLEKNRDNDTQKLVPDRKRFPNGLNALSDHIHNQGLKFGLYQDYGTNTCAGYPGVIKHMKLDAQTFADWDVDYVKLDGCYANISDMASGYPEFGRLLNETGRPMVYSCSWPAYQEDAGEMPDYESLKQHCNLWRNWDDIEDSLESLMQIIDYFAKNQDRIQPHGGPGHWNDPDMLLLGNYGLSYDQSKLQMAIWAIMAAPLIMSNDLAAVRPEIKAILQNRAVIAVDQDELGIQGRRVLSRNQIEVWKRPITPVTKSGHHSYAVAFVSRRDDGAPYRIPFTVKELGLTNPKGYNVQDLYDASSKLGVFQSESQFITRVNPNGVTFYKFTAL

SEQ ID NO: 17671 - DNA, 3184 bp, DROSOPHILA
cgttcacgcaggtaagcgttgatcagggattgtctcaagctcttcagtgtgagggtctcactctccagctcccgtaaatccaccggcagcttgatatccttaaaatatcccgccagacgctccgccaccttcacatcgaaggggatgtaattatgtgccttcaagacttctatcggcttgttgaccaccgtcacatacttggccagcgtttggacagtcacgttgtggaagccgcactcctgcaagacactgtggcgattggccaaagtggtggcgccataatagatgatcatgggtttcgctatgatgtcgtccacactatagtccagtgatttcaaagtgtcgtaggagcttagcaagtccttgcgctttaacgtcttgagctctgggtgcttctctaaggctgccgcccaagaacgataggaactacctataaagacgcaatagtgactccctaaatcaactttaaagccttagcttacccagagttttggacaaatagctggcattcagcggctcttccatcggaatctcgactgtcggtggctttggcagttttggcttgagatcctccttcttactgctgacccgtttcgaactggccattccccgcgccagctgtccaaggctccgggccagcaattgcgcttgattctggccgttgcgcagcataattataacatttcccgcagatttatttacaaacggcaaagaaacgtaactgttatcggggtgaatgacaactgttgcagctagtgatgggagcacatatatacaaagggaaaaaatcaaaatataataatataatataatttatattatatatttaatatttctaatattattttgttcaatgtttgagttgcaaaaaggctttgagtgtgcagaaaatgtattctcccttgatcttgtggtaggtaatcaactatcgatacggccggcaaatcaatttcatcgatacgacgacggttgttttcacatccctaaccccgcagcgttgttacacgtgcgcgtgaattatagtttatttgacttggtttttatttcaaaacatttaaatatgtcgcttttacgcatcaggtaagcattggagatgaagcccatgaaatgcaaatgaaatcaaaccaactgcgcttccaggaaaccaaaaacccgcaagggaaagaaggtgttgctggccagggagccgcaactcattgaatccgcccgcacaatgctgtttttggacggaaggaagtgcggcggcaatgtgaagctgtgcatgaaggacctgcaggcgctgaagaagccgctggttaaagtgctgaaccgcaaaaacgacattaccccctttgacgatccctcatctctggagttgtaagtttggacaaagcaaacaactaaaatgtagtgtatttaattgtaaacatcattcgaatcaccagcttgaccatgaagaacgatgctgctttgttcacgttcggttccacgtccaagaagcgacccgataacattatactgggcaggatcttcgagaacgaggtgctggacatgtttgaactgggcatcaagcggtatcaggcgatttccgagtttaagaacgagaaaatcggagcctgcgtcaagccctgcctggtgttcaatggtccgaaatgggcacagaccgaggaactgaggcgccttcgcaacctgttcatcgacaccttccagcgcgagaaggtggattcgatccggctgcagggcatcgaacacgttctgagtttcacggttaccgatgacatgaacatactgatgcgttcctaccggatactgctgaagaaatctggccagaggacgccgcgcatagagcttgaagagatcggaccctcggccgacttctccattcgccgcaccaagatcgccagcgaggatctgtacaaacaggcacgcaaacagcccaagcagttgaaggtgggcaagaagaagaacattagcacagacgccctgggcaacaccaagggacgtgtccatctgggcaagcagcaaacgggctccattcaaacgcgtcgcgtcaaggcgctgcgtaagacgccggaggagaagaaggagaaccgacagcgcaagaaggttgctctgaaggcggccgccgccgaagcactggcctcacaaggaaacaatcccttctctagttaattttagttgtaataaattggtcctgattaaattagctttaacaagtgtatgagttctggagtcgtatcagtgtattccgtcgacaatattgcgaatgcgccgcgtcttggactcggccaacgcgtcctccagcgttttgatcatgtgcaccagactgcagacatccgtctgcactagcaaatcctttcgatgcagccgctcgtcctcctgcatggccttcagctcctgttcgctgcgcccggagatgtccaccgccagcagctctcggttttcattcttcggttcggtgtgcagatatagcttcatagtcaccaccacctgacactgatccagcaggctccgcgacgcggtgcgcacctccagtcgccagtccaggttgaccagccgataggcacgtatgttggccgacttgattgagccctccacaaagtttcgtttgctggtgacgaactgctcgagaacttctatcacatcgtcgccgagttcggggaatgtctggcgcagtatggcctccatgtcgacggaactgctccccactcgggtggtcacgctgatgagcagggatatcagcgcctccaccgcctgctgcactgcctcaggactgcccaaatcggaggactttttggctagcatctcgtaacggctgggattgggtccatttattaggtaatcaaaggcggacttgcacagctccaccacagcgctggcgggtttttggagcaggctcaaatgattgcgctgttgttgagttaagcgcagagatgacatctttgtggttggttgcctcactaagttagttaaatagtattggaagtattcataggtaaacaggtatgcgatatattcatttaatcgcagacgattaccttaaaaagtttgatgtgttgacttcttgagacttacgtcctgcggctgtacttcagctgtaaatatcagaacttagttaatttaaaaacataaacaataaactggagctcagctatactatttaccgtatcccttagagtttgaaatgcatacttggaaactacca

SEQ ID NO: 17672 - DNA, 1056 bp, DROSOPHILA
ttacacgtgcgcgtgaattatagtttatttgacttggtttttatttcaaaacatttaaatatgtcgcttttacgcatcaggaaaccaaaaacccgcaagggaaagaaggtgttgctggccagggagccgcaactcattgaatccgcccgcacaatgctgtttttggacggaaggaagtgcggcggcaatgtgaagctgtgcatgaaggacctgcaggcgctgaagaagccgctggttaaagtgctgaaccgcaaaaacgacattaccccctttgacgatccctcatctctggagttcttgaccatgaagaacgatgctgctttgttcacgttcggttccacgtccaagaagcgacccgataacattatactgggcaggatcttcgagaacgaggtgctggacatgtttgaactgggcatcaagcggtatcaggcgatttccgagtttaagaacgagaaaatcggagcctgcgtcaagccctgcctggtgttcaatggtccgaaatgggcacagaccgaggaactgaggcgccttcgcaacctgttcatcgacaccttccagcgcgagaaggtggattcgatccggctgcagggcatcgaacacgttctgagtttcacggttaccgatgacatgaacatactgatgcgttcctaccggatactgctgaagaaatctggccagaggacgccgcgcatagagcttgaagagatcggaccctcggccgacttctccattcgccgcaccaagatcgccagcgaggatctgtacaaacaggcacgcaaacagcccaagcagttgaaggtgggcaagaagaagaacattagcacagacgccctgggcaacaccaagggacgtgtccatctgggcaagcagcaaacgggctccattcaaacgcgtcgcgtcaaggcgctgcgtaagacgccggaggagaagaaggagaaccgacagcgcaagaaggttgctctgaaggcggccgccgccgaagcactggcctcacaaggaaacaatcccttctctagttaattttagttgtaataaattggtcctgattaaatt

SEQ ID NO: 17673 - protein, 289 aa, DROSOPHILA
MLFLDGRKCGGNVKLCMKDLQALKKPLVKVLNRKNDITPFDDPSSLEFLTMKNDAALFTFGSTSKKRPDNIILGRIFENEVLDMFELGIKRYQAISEFKNEKIGACVKPCLVFNGPKWAQTEELRRLRNLFIDTFQREKVDSIRLQGIEHVLSFTVTDDMNILMRSYRILLKKSGQRTPRIELEEIGPSADFSIRRTKIASEDLYKQARKQPKQLKVGKKKNISTDALGNTKGRVHLGKQQTGSIQTRRVKALRKTPEEKKENRQRKKVALKAAAAEALASQGNNPFSS

SEQ ID NO: 17674 - DNA, 3948 bp, DROSOPHILA
tttttattatttctaaaaatgtatatatgtatatagtttgttatgtaggctgggaatgccatcttaatatttattcgaccataatcttttcgtatacggccttttattttcttacttcctgtcgcaactctctctctctctcttttttgctctcggcttcaatcaattttccgctcaaaggtaaacaaactaaccaagaacttacccccacccactttggcaaccaaccacccacccacaacccaaccaccccatttgcgtctgataaagtacttgctggcatttaatattggattgaaatcaatttaccaagcattatcgccggacgttctattgcccgtactcctatcaccattagccatttgagattagttttaagccctatcgttggaatggcccaatggcctttgccacattgttttcttatgcatatgaaaggccaaaaaattgtacgtttccgtggcagcgtggtaaatagtaggggccctcagttgggccaactgccaaggagcttatcaaccggcggacatctgtttatctgtccaagtggcttattccactgcggcattagtcactcactttgggatacactggcgaaaaaagcgccaggaaattcgatcatataaattggggtaaaaatatttacataaaatgggaaatatagtacttcgagtaatgccatagatagatacttgctcaaaaaaagatacattcaggtacaaaaaaaaacattgatctataaccaacgaatttctccacaagatgcgcaacataatcggatttccttttgactatcataattcatgaacccgagcggagaaatggctagataatcccaaaccctcaacttttccgcccgtgtatccatggccaccacacacatgcacctggtcgggtcgggttggcttatcttatcgccttatctgcgccgccttcgtcgcagtcgaattctccgccggacttccaccggcccatttgccatttgtccggcgtcgcatcgtaggcatctccattccagctgctcgctaaaatgctctaagctccttcgatagacgaaccttcctctccctgctgctggactaactaacgcaaatctatcgcaaaaatgtcgaatgtgtggggcaaactggtgctgaagttctttaaatatgcgcccagctatgtgggtgagttagccacgccaatggagatccttgtccagagattacgtctcattcacttccagtctgcctgtgcttcctgccctgcggcatgatctttggctatacgatctgcgcctttgttgcggagcggaacctcaacgctggactcattcactatggaccattgattctgggcgcctgctgggcgttgatcactgccctggccatgctgacggtcaagttcgtgaagaagtgcatcgtctactggcagccatggctgctcctggcagccggagtctttaatctcataggcagctgcttctactttgccgatggatttggtgagtcatttctatgggctattaattcgcttcgaaaggcttgtgaaaagtaaatcaatctgtatctatatggctggaactgggatgttctacatataagttttgaaatagatttcagttaacaatacttgaatttatttcccaatagagagagagagagaggcaaagtgatttgcaatctgaaaatgattcgatctcgatctgagtatgttgagcatgattcaatcttggctagattttgaaatctatattcttaaatcaatatcgttaagaaatgttttgaatgtatgatttcagcgagtttttccaattccttaatcccactattattatcacttcagaccacgtcggagcctatatatcgtacttggcgcacagcatgaccttcgtggccggctatagcttcctgctcacgatcagctccaagggcagcaggtcgctgttcctctcgggcagctgcagctgctacctgctgggcgtggcgtccgccgtcagcctgatcgtggcctcctacagccggaatgtaaaggagctggccggacagacggtgaccacggagcaactgatcgatggcatctatgtaaacttcgccggcacctacttgagtgtggcggccgccgtgttggccattctggtgggccagaaggtgctccactttctgggcaccgtcgacctggtgaacagcatggacaacgacctgcggatcgccaactcgaatggcagcatcttcgagcagcgatcggaggtcatcaagcgactgcagttcttctacgtgaccaagaaccagcagtggaacataatgctactgctcctcttcacggaggccgtgcagttcgccctgttcgtgtactttgtctactggtttgcccttaatccggccatccggctgacagagttctccggcatcgacggcatgttctgggtgatctttgcgggcagcctgctggccctcatctgccagtggttcctgtcggtgaaggtcacctttgtgggctcgcaggtggccctcatctccttcactctgctggccatgatcctctgcagcgttacggactccaggtggtcgctctggctgctccttgtgctctttggcctgtcgtactcgcagcagcagattctcctgctggaggtcacccatctgcgcttcaccgaatgcatcatatgcatctcgtatgtgctcaagttgatctgcaccagcatcgtgtacttctactttgtggcggatgcgaagaactcctacttctatgccaccgactcgagcactctgatggcccagggattcgtctttctcatcatcacctcgctgctggcactcgtggtgggcatgaaggtgccccggacgcatcgcgcccagctgctggagatccagtacgaggtgtacggcatcatctttatgaagcaccagatcgagcagctcaacgtccgttggctgaacgacggcaccattcccaccatcaaccagtgagcccgaatttgagcttaggtccccgagctgtacacacacactttcttatcttatcacaaatactcagtatttaatgaatcgaaaataaaaagacttctcagtctttatccacatacaattggtgacaacagaaataggagcctgagttgaagaagctataaatttcgtctatatatcaaggcatataaacgacttaagaatattaaatatagaactataactgcttaagtcaaattctttggaaattagatacaaaacttctgatatacacattttcatatgatccgcctaaaaggttttgcagttgtatctttatcatcattaaagagctgtaaattcttttccaattttccaaacaatcccaatagagatacaatcaaggccttaagtgggttccagatagtgggtgtttgtttacgtggtgtaggtttattttaggactaaaactagcgtcttatggagataatctggacggcggcggtgtgatcgcgacaaaagtggctggcacaggccgatacgttcgcacatggagtcaccttgtagccactgtcacctggaggataatatgcttagttatgcgggcgttccccatctggagatatgacatgactcacccagctgggtcatgaacttgtgcagcgtgtccacattccgcaccgtgctggccagcagggtttccagtccacctccgcgtcgggagtacaaatagtccatggcacccagcagtgcatcgaactgggaatcatcgtagatcacatcggcggctatcaaaagatccgttttagcatgcgaatcccaggggaactcactgaccgcagcccagtttagctgctccgcctggggcatctgctccttgggcgtgtctggaaaattcaggctgatattctcgcgcattagctggacgcagggttcactgccatcggtcagcaggacctggcccacttgcagctgcagggccggtagtttcagcatgattcccagcagcccggcaccggctccc

SEQ ID NO: 17675 - DNA, 1548 bp, DROSOPHILA
taggcatctccattccagctgctcgctaaaatgctctaagctccttcgatagacgaaccttcctctccctgctgctggactaactaacgcaaatctatcgcaaaaatgtcgaatgtgtggggcaaactggtgctgaagttctttaaatatgcgcccagctatgtggtctgcctgtgcttcctgccctgcggcatgatctttggctatacgatctgcgcctttgttgcggagcggaacctcaacgctggactcattcactatggaccattgattctgggcgcctgctgggcgttgatcactgccctggccatgctgacggtcaagttcgtgaagaagtgcatcgtctactggcagccatggctgctcctggcagccggagtctttaatctcataggcagctgcttctactttgccgatggatttgaccacgtcggagcctatatatcgtacttggcgcacagcatgaccttcgtggccggctatagcttcctgctcacgatcagctccaagggcagcaggtcgctgttcctctcgggcagctgcagctgctacctgctgggcgtggcgtccgccgtcagcctgatcgtggcctcctacagccggaatgtaaaggagctggccggacagacggtgaccacggagcaactgatcgatggcatctatgtaaacttcgccggcacctacttgagtgtggcggccgccgtgttggccattctggtgggccagaaggtgctccactttctgggcaccgtcgacctggtgaacagcatggacaacgacctgcggatcgccaactcgaatggcagcatcttcgagcagcgatcggaggtcatcaagcgactgcagttcttctacgtgaccaagaaccagcagtggaacataatgctactgctcctcttcacggaggccgtgcagttcgccctgttcgtgtactttgtctactggtttgcccttaatccggccatccggctgacagagttctccggcatcgacggcatgttctgggtgatctttgcgggcagcctgctggccctcatctgccagtggttcctgtcggtgaaggtcacctttgtgggctcgcaggtggccctcatctccttcactctgctggccatgatcctctgcagcgttacggactccaggtggtcgctctggctgctccttgtgctctttggcctgtcgtactcgcagcagcagattctcctgctggaggtcacccatctgcgcttcaccgaatgcatcatatgcatctcgtatgtgctcaagttgatctgcaccagcatcgtgtacttctactttgtggcggatgcgaagaactcctacttctatgccaccgactcgagcactctgatggcccagggattcgtctttctcatcatcacctcgctgctggcactcgtggtgggcatgaaggtgccccggacgcatcgcgcccagctgctggagatccagtacgaggtgtacggcatcatctttatgaagcaccagatcgagcagctcaacgtccgttggctgaacgacggcaccattcccaccatcaaccagtga

SEQ ID NO: 17676 - protein, 480 aa, DROSOPHILA
MSNVWGKLVLKFFKYAPSYVVCLCFLPCGMIFGYTICAFVAERNLNAGLIHYGPLILGACWALITALAMLTVKFVKKCIVYWQPWLLLAAGVFNLIGSCFYFADGFDHVGAYISYLAHSMTFVAGYSFLLTISSKGSRSLFLSGSCSCYLLGVASAVSLIVASYSRNVKELAGQTVTTEQLIDGIYVNFAGTYLSVAAAVLAILVGQKVLHFLGTVDLVNSMDNDLRIANSNGSIFEQRSEVIKRLQFFYVTKNQQWNIMLLLLFTEAVQFALFVYFVYWFALNPAIRLTEFSGIDGMFWVIFAGSLLALICQWFLSVKVTFVGSQVALISFTLLAMILCSVTDSRWSLWLLLVLFGLSYSQQQILLLEVTHLRFTECIICISYVLKLICTSIVYFYFVADAKNSYFYATDSSTLMAQGFVFLIITSLLALVVGMKVPRTHRAQLLEIQYEVYGIIFMKHQIEQLNVRWLNDGTIPTINQ

SEQ ID NO: 17677 - DNA, 4172 bp, DROSOPHILA
gacatacgcaggcggagaattgatttgatttctgttattgttgcttatcactatcgatttcgattattcaaagtccctttttgccctgcggcgaacggcgattgccctcagtttctgagttcctgcaaatcaaatgcaattatgtcgttcaatcgtctgaatgctgaacggtaaatcgagtaaacaagagtgggcggaggtggtctgaataatttatgaccgcccattaattattactcatagagctgtcctatgacttatcgactttaagccaattggagaggggggagtaaggctggcagggcaacccgatcaaaacgaaaaatcaaagtgtgggtatcattgtgtatttcgtaaattagaaggccaatttggtggcaattcctgtttgtgatacaattcctggccgccattgtacccgtggtacttctaggaattcattaaatgtatccaatttgctgtcaaggtaatttacttggtgaacaattaagttcaagtagctatgtttagtcatttcaaagttatgtctttacaatttattttatataaatactaagtgctattcttaattaagcatctgcacttaaggttttctctataaggagcctattcaaatagttttcattaatgttttcattctttccctttctcgattgcagctccaacttccggcgctttggtggcgtaaaatgtttgccaccaatatccgttcggttgccgtagaaatcgtcctggtggcgccgtgagctctcgtccttttcctttcgcgagtcctgaatccccgtccctcgctcatttccggtgcgccgtttttacatttgcaattcgaatcggattgaaatcggaatcggaatcagaatcggcgcgaggacatttccattccttcccattctctttttattttttttttttgcgatctgcgttgcatatgcgagggctaattagcatgcggcatttccagcaatcagagtagagcgcacaataggaataataacgcggaatggaagaggatgtgtatgcctcgctaggtgcctacaacgacagcggtggcgacgattggagcagctcggagcacctggtcctgtgggaggaggatgagacgcagcgaacgactgctaatgccaccagtcggcataatcaactgcatgtggccaggtggaatgccaccggcaatgcgaccatcagcgcgaccttcgaggacgtacccttcgatgcgaacaactactgggccctattggccctcgtcctcgtcctgggaacagcggccgggaacatccttgtctgcctggccatcgcctgggagcgccggctgcagaatgtgaccaactacttccttatgtcgctggccatcaccgatctcatggtcgccgtgctggtcatgccgctgggcatccttacgctggtgaaaggtgagtcctttgtcccattcaaagtccggaacagaggtattttttgcagccaccttttgttgagggactcaatggacacttgagtaagtcacttgtgcgccaggattggcttgtgcggctaatcttagttggaaaagttccttttccataatttcatagtttactctaacgaaaatgagttggtggaaaacttgatgaaaattaatattaattacttggggcaagggaaaaaagagtgagaagttttgatagttgttaaatttttaaggcttttaaaaagtgacgaagaagatgcaaggaaacgcaaagatgtagggaatatacaaaattattttaaatcttaagatttcttatatttgcaatttaaatgcggtaaatgcgaatcaattgaataatgtacagggaattgtgaaaaaatatggatatttacggattccttttgctgcaactcaatccgaatgataatctctccaagtggaagagtataataatcaaagccagcgacagaaacgtggcaaagacattcaggccaggacctcctgcgatgtcgccaacacgaggcacgagttgcatttaatgaagctgctggtgggaatggcgttggcggtgtgcagattgcattatgtctcagatatttcgatcaaagctggcaaacgtaagtaagcccggatagaaaaatggaatcgctggtgtctatgggccggcagggcggagcggagctccatcgttagacaatttaataagcgcggcgcctttgtagccagcctggccaggacgaaccgctggcgcagacagggaagcccagaaacaatgccagcaagatggcaacggaagcttccaaagcctttgcaggcgccggagcaactgcagcataagaattgcattaggggcggcaaacgagcgctggtgaatttcgctttgacttagttcggatctggaaacatctgccgacacattgctgtcctgcaatctgcactgaaaaaaaaaacaaaatatatttattcaattatttctatacttaaagtaaaagtcatcaagtttaaagctaattgtataatttttttctttcgattttttcgattgagcaataaaatatggttcatatatgttaatacttacattttttttaagctaagtaacttgaagctagctacacaaatattataacataccagacaggaaatggaaaagctatttccgtgactttcaaaggcgttgcttatttcgttgctccatttatgtgagtgcttcttccggtggcagttaaacggtatttcttcgattttcgaaaacgaatggctgatttgaggactgcatttatctgagtgctgcttccgcctcctgctgccgtcctttttgtgccaacccctgcagatgttgcaacactgatgacagttttgtttgtgcgctttgggagccattacaaacacaaacacaaacacaaacacgagcacgggcaccaatacaagcagaaagggcgacgcacacacacgcaaacacacacctggagcaatccttggcaaagtgggcaatgtagcaagaaggaggaccaacaaatggctgcttgttatatcaagtgtgaaaaatattgcagtggcagtgacaggagcagttgttgctgtagttgcacgggcacacgcccgccaactggaggcaagaaaggacgaaatcgggatttgcctgctgtcaagggctttgcagagggtcctgcgacagaagctgaaatctccagcgaacagcaggcattagatcccaaggattaagctcttacaattcaaaggcacaatggcgcaagtagcaactggatatgagtaagccgtgcagtacattaattgcatcggttacgtaagtaacatgtggcatacaatgtggcattgaaatggcctatatattctattctctgttgataagtatgcaaattcaactttcaatgaaagctgaactaatatgttcatgaccaataggcgtatgagtaatattagtagactaaatgtttaaaaacgctaaaggtgtaatatcaaaattaatctaacaaaatcattcatggctttggttgttgactttctggagtgtaataataatacaaatttaaattttcgtaaaaacaatttgatccgtacgtacacgcacaaatctaacaaactattgaaatggaatcaaatagctgaaataatatttataaatgaatatatatttttaggacttaagttcactgaaggcttagcgggaaataagtttttaaggatgaaatattaatgctattatgctaaactctgttgagtttccagatgcatatatcctttgattttgaactttcaacgaattttccacttgatcaatcgaccttttggaaacgaaacaagacccatgcaattaaacgacatgcgttgatgccattttaagcgcttgcacttgcagtgaattatgattacgcgtggaaaacataattaatgcataattaatttcattttaaaatcagcattaaacgccagttaattaataacagtaaacgcaattactgcatagcatagccatcaaaagccataaaaaagacagtaaattgaattacaacgtcccgtcaatggtcgtgaatatttaagtaaacgcgaaaagctcgcaaatgtttgcaacttaataaattatacttgggacgaataatgataaacaagagaacagccgcaaatataaaaagaaaagccaagcgaaaaaaggcgcgaggcacgagaagctggaaaattaattgagcgcaaattggtgaagctg

SEQ ID NO: 17678 - DNA, 1014 bp, DROSOPHILA
atggaagaggatgtgtatgcctcgctaggtgcctacaacgacagcggtggcgacgattggagcagctcggagcacctggtcctgtgggaggaggatgagacgcagcgaacgactgctaatgccaccagtcggcataatcaactgcatgtggccaggtggaatgccaccggcaatgcgaccatcagcgcgaccttcgaggacgtacccttcgatgcgaacaactactgggccctattggccctcgtcctcgtcctgggaacagcggccgggaacatccttgtctgcctggccatcgcctgggagcgccggctgcagaatgtgaccaactacttccttatgtcgctggccatcaccgatctcatggtcgccgtgctggtcatgccgctgggcatccttacgctggtgaaaggtgagtcctttgtcccattcaaagtccggaacagagtggaagagtataataatcaaagccagcgacagaaacgtggcaaagacattcaggccaggacctcctgcgatgtcgccaacacgaggcacgagttgcatttaatgaagctgctggtgggaatggcgttggcggtgtgcagattgcattatgtctcagatatttcgatcaaagctggcaaacatgttgcaacactgatgacagttttgtttgtgcgctttgggagccattacaaacacaaacacaaacacaaacacgagcacgggcaccaatacaagcagaaagggcgacgcacacacacgcaaacacacacctggagcaatccttggcaaagtgggcaatgtagcaagaaggaggaccaacaaatggctgcttgttatatcaagtgtgaaaaatattgcagtggcagtgacaggagcagttgttgctgtagttgcacgggcacacgcccgccaactggaggcaagaaaggacgaaatcgggatttgcctgctgtcaagggctttgcagagggtcctgcgacagaagctgaaatctccagcgaacagcaggcattagatcccaaggattaa

SEQ ID NO: 17679 - protein, 337 aa, DROSOPHILA
MEEDVYASLGAYNDSGGDDWSSSEHLVLWEEDETQRTTANATSRHNQLHVARWNATGNATISATFEDVPFDANNYWALLALVLVLGTAAGNILVCLAIAWERRLQNVTNYFLMSLAITDLMVAVLVMPLGILTLVKGESFVPFKVRNRVEEYNNQSQRQKRGKDIQARTSCDVANTRHELHLMKLLVGMALAVCRLHYVSDISIKAGKHVATLMTVLFVRFGSHYKHKHKHKHEHGHQYKQKGRRTHTQTHTWSNPWQSGQCSKKEDQQMAACYIKCEKYCSGSDRSSCCCSCTGTRPPTGGKKGRNRDLPAVKGFAEGPATEAEISSEQQALDPKD

SEQ ID NO: 17680 - DNA, 9078 bp, DROSOPHILA
cactctcatatgtggctaaaactaatttcccgtccaaggtttcatgttcacacacaaaacgaaacatagagcagagcatagcagcatcaacatattcggattttcggcattacaatttgtggaaatttgcatattttgagggtgctgtgaccccgaatcacccgaatcaacgagaaacgaataaaccatattcgcttcgacctgcagcagcaggcaagttcactgatatacaatggtgtaggcatatcgcatagattacgcaactattcccaggatatcgccaggagctacaggatagggtgtggggtgggaggggggtgttggggcaagagggatgaggggtagggaatggagatgatggcggcttcacacattcgcggcgacacatttgtgccactcgactccacgctggccacccaaaaacggtaggaaatccactcaagcacagcgaacattggactacccattcaccaccatgcaaccgcacatagccatccgaccaccacccccccccccttatttttgtgcttcacccaactacgccactgtacagctggtatcaaaataataacacggaaaacccggcccataaattaggaaagtcaggttatcttccatttaaatcggcaaagtttgctttcgcttcatttactattttccatatatatattattagctcttatcagctttaagtatatgctagtttcttaaagcaagcaaaactctaagaaattcaatagaattctgttaagaaacgcgattttggaaagggaaatttcgtatgaattgtacatattataaatcaaatgagaacaagatacaatattatgtacataacataagtacctatgtatattaaataagcaaaaatttataattttcaagttatttcccaatccttaaagatttctgtcatttgagcgatgacatttgctataatctcgacctcagctgtgcgtaggccttcgttgggtggcaatacagggggtgggtgggtggttcatcggatgatgctgctggctgttgttcttgttgttgccttcgttttcgggtagcgacgagcccggatattatatgcatacttgaactatgcgaggaaggaagtcaggcgaccagaccagcagcaacagcagcaggagcaggagcaggaggaccccttctgtcgtgccattcccaatggccccctagaccagccccaccacgccccccttatcctgttttgtatatgtatctgtttttgcatgctcctctcgctcttgctcgctctctgccttatgtgtgtgtgtgtttgtgtttatatacatgtgcatgcacagctgtaccgtttcggggcattttacagccacagagccgccgccacagacaacccgaccaccacccaagcaccacccacagccaaccccgcacaggaccacccacaacaacaatgcaaaacgtctgcatttcaactaacgccacccgatacacaaacaaacgtcgaggggaaagggctccgcacagcccctcccttttgcgaccaccccctcgaaaaaaccaacaatccaagccacccacccactcaacaccctctctctccctccccccctctacccatccactgcagcagcagccatctcatattgccatagttgttgtattcttcttcttattgttgttgttgttcttgttgttgttcctgctgggactgccgaaaaagttttatatataagcggaagcttacgaaaatcccccacccggcggctgaaaaaaaacagggaaacccccttgaaacgccagaaaaacagaactcattacaaaatcaataagttaattttacttttaattttctctttttttacttcagcgtgcactatttacgtgacatttttatgacaaacttcctgcatattaaatcaataatactttggtgaacaaagttggtgcagcgttttcaatgacttttcggttttccaccaattagatcttaaataaagttgttaaaaaaaaaagagaaataccactagttaataacacagcgtgctttaaatttaagttgcgctcggccttcttggtcgcgaataatcgattttttcagcagcagcagcgccaaagttaaaaccacccactcagccccaacaagaaagcagaaaggggataccataaagaatatatgtataagtgaagtaaaaaacacaaccgaagagacaggaaaacaactccccgaaaataagtgggaggtgtggaaaattcggttttgccaaaggttgggctaaggttgaaagtatggaaaatccaaataaacgaattcctttgactcgcccaccatctgaccttttcactccgctgggggatttttattaaaattcttagacttattgctaaagtatttacaagaattccatgatttattgtttaagttattggcaaaggcataaattctttgtacatagcacatttgtacattttagtagcaatatctttgagtttacttagaaagacaaagagtatgatgttcttggcatcgataggtgaccgaatcttccctggctttagctgttatcgtaatcgccatcacaatcgctcttgaatcgcttgcgaactttgattcattgttctcggtgtttgttgttgctgttgctgttgcagctgggcttttgttttacttgtcaacagagagtttagtttggtgcatcggctttggcttaggtactgcagaaaccccaaccccttcgccgccctggcagcaatcaccctcgagcccttgcccaccctctgcccatccaaacaaaaacaacaatgctgcggacgctgcatgcaactattgaggcatgaacatgcaatttatgtacctctgtatgtgcgtatatgtatgtatatacctacgaactatgaaatacaacaacagcagcaataagcgactgtacttttgatataaaatccactatactccacactcaacactctccatacatggaaaaccaaaccaaaccaaacacacatacagttcagatgtgtacgtatgtatgtatatagcaccgaaaatactccccatcacctaccgcccaccacccaccgcccacttttagagacacccacttggagtggaaagctctgtttagttttagttgcgctttaaactgcatttcggcttgcgatgccttgttgttgcaagctgtacatagagcattgcatgagtggcgacaggggggtgtggcggtgggctgtgttacttgtgcagcaaacgaaatagaaaacaactgcaatatgtttgcttccccggaatgcaggaatggaatagccagaaacacagctccacttgcaatgcattcggcagattgagcccaaaaaacagatattacacccgaaacatgcccaatcgccaaccaattgcagttgtcatctaaaaattgcaacttttacagaagcctatctataagcattgggtggtaacaactttgaaatgggactggcttgaatcaaaagtttccatgagcatggaacaaccagaagaaatcgattagaaaacgggcagttcttaaatttatgtgggacttaaacaaatagttaactttatgctattctagcatttgccacaaactaacctatcctaactatcataactttacaatgatgtacattgaaaagaaaccatgttaaagttataccgttttggtataatattttatatttatcattagctccctttttgtgtgtgctcttaagcataagaagtacttcctgaacttttgacctctttaagcgaaattagatgaaaatttcagatatcgataacaagtgccagggggggtggggagagggaaatgaagtgaaaaggggaaggagaaacgaggaagaggaagagcgcagcgatactgcaaagccgtcgacttttgttgctccacttgcacaaacaaaaacgcacgaaaagacgaaaagagaatttcggctatcgagcaagctcccctaaactcacacacacaaacacagacactggcaaactcacctgcaaactcaggtaaatcgacacgcgtgtgtgtgtgtgtgtgcgcgggtgagtggtacctgtgtggagctgacacggcaacaaacaaaggtaacgctaaaatctacagcgataaatctagaaaccgggcattctagttcccaacctaccagatatattttaactctttcgattcactttttccatggctaattggttggagctactaattatcaattaattacattcgcattttatagatatgtatattttattttgttctacaaatgtgtaagacttattatttgcattctatttgattttgcctcattgaaatttatagaagttcaaaattcttatcaatcattgattttacgataatacttggcaaagataagaattcgcatagctaaaaactcattttcttgaaataaatcttattacaaattgaattaccgatggtttaatagtttggaaataggttcagcgaacttttaactcctcttaactttcggatttcacctgatccgctgtgaactagttcagatatagccacccctcccccacccacagagaaaccaaaacaacaacaattgcaattacagcaacaccaactaaactattgcaacaagcaagaacaacaaaaactactagaaatgcgggtctgggtcgtaaaatcgagaccaaaagcagagagcaaaggagcggagagaggaggaaaggcgaagagaagtgcaaagcggtggcagaggaggatggggagactcgacgagacgtcgagaatgcagtgcacataaagaatgccaaaataagtttaaaactaacgacgaaccgggttttagtgcgtgcgtctgtatgcgagtgtgtttgtgtgtgggagcgagacagccagcaaggtggttttttgtatggctgtgtatttgtattttggagcatgcaacattgccgaaaaatgcgtgcgctgcgggatggttgagaaagagagaggggggaaccccaaaaatgagagaaccgaatgggagagagagtttgcgaaacaagtgcatttctgcatgagtgtatgtgtgcggggggtaattttcgagaaattaacaagtgttgcaaagctcaaaaagtgcgtgcgggtaattagcaagtataaatatgtaaaacagaatcaaatacaaaacgaatgggaaaaagttcattaacacagttaacataaaagaccgccaacaaatctcattcataagcgagaaatgtgtgtatagataacgggaacggaaagaaaaacgaacagcggcgacaaccccttccgaatacaaaaaggaaaaaccgcggcaacccagtcgagcgacacaggaaaaaaagtagcagctgagacaagctcctaagcatggcgtcccaacaacaacagataaaagctgtaaaaattgtcaatatagaagaaagaaaggcaggctggctagcagcagcaacaacaataacaggagggggggggcagaagaagaagcagcaggctttggagctttgcgaaataatgcgcgagagttaaagaagaagccgccaacgccaactgcgacgtcggcagagcatttttaacgagccgaatgacaagcgcacacaaacagaaacaccaacacacacaacggcacttatgcagatgcatacagtcgagggcgaaaccatagcagtaagatcagagcgtaaacattgagaaaattaataaattcaaattaaaaatgtgtgttaaatattaccttaaaaaactattgaagtgtttggcgtttagtagtaattcatattactttcattgttttgataacaatacatataagtatttaattctagtgccaatcattaagctattgtacattttatagtttgttttgtaagacagttttaacaaccaacttttgggttttatgacttttcttaattgccactattgcattgacctcgattgttcaaacacacaaccacacgcacacaaggaggcgcacagatgggcgacatgcatacgagacgccgcagcagcagaccggttgaggttaaattggatagtggcagtgagagagagagcggggcgaacgagagagagcgattggagatggagcatacatatacatattgaatttttcctctttggcgtaatgaaaattttagcactgttttggggcaagaaaacgggggaaaaaaacaagaaaacttacccgcgtgtgaaaatccgttagtcggtggcgcctctgccgctgcgctgctgctgcggaactcctctcgatttttccaatttcgcatgcacaaaactatttggatttcacttaattaattacactgcttatgtaccaccttatatatgcacttatgcgttggtatgtatgtatatacgcctcaccaacacacttgcagcccgcgctctgctgacgtcgacgccgctgcctttttgcggctacttttcgaaatattttacacgcactgcagaatatactttgttttatataaatatttttgtttgtcttttactttgctgtaaactttatacgcaatttgtttactatttcaaagagagagtgaaacacacaaagacatagacacacacgtacacacacacagataggccgctttaagcattcgtgtgcggcattttattaatccacgtcgatttgtttgtaaatagataacgatacgatattgtattgtatccgccgaatccacagataacgactcgatttaatttcaattgtgctttttcgccgctccgctcacgcacactacctcacacacacagacgagaccgcgtagcacgtccgaacgatccgagagatgaaaaagtaaaaaagtgtttgttttgttttccttcctagcgatggcacgcgcatcgatgttggctcgatactttcgctggcgcttgggattatatacttgcgctgttttttctcttcggcgctggtacggtcataccgcgaattgtactctctgagattcgagttcgaaagtacgtttagcatatgcagcaaccaactaagagataaaattcgaaatcaagtttttggcggggtttattgatatagaaaatagacttcgaattctatatcaaaactacgttaatcagcgaaaattgtaagttaaacaaaaaactattgaaactattgattatacacagcgattttatatttcaaaatatcaaacttgatggtaaaagataagatttaaggtttttaaaccttattgaattgcacaaagttttccgactgatgcttgatgtacgatttgcgacagtccatttcatcagcaggacgattgtgtggagcccagacaggttcgcccacaaaatagcgacgagttctgataaagttctaagaaaaaacaatacaaatagtttaagtttgtatataagattgtcaaaataacttacattggtatccaaagtaaagcggtgatatatgccagctggtataatgatcagatctcccttgacaaccttaatgcgcaaccagttgtcctcattgctataaagaataaatagttttccgttttaaaacaattccaaaaatgttattagtgtgagcaaaaacaatatcagtaagaatatgaatgcttgaactatttaattgggaaaatgtggctgggatactataaaatgcggtgtaaataaacaaaacttactcgcgaacatcaaagtaaccggatccctccaatatcaggcgaatttcctcatccgtgtgcaggtgttcggtgaaaaaggctttcaacttgttggcatagtctggaaggcacttttccgagcatgtgatctgtaataattcgaagtttaccaaagttcggtagatgtttttcaagaaaacatcgatcttgcctcatcatcgtaggtgtagccacgttttgccctcagttccgtgagggtattatcgctctggtactcgtccgcattgatctgcaaatgtgaatgatcaagataagctcgcccccaaggtcacttaaggtttttaaagtcgcaatttcgcttttcacttgccttaaagtattccacgccggtcttctggtacagatcatccagttccaagtaggcaggcggattgcggtggtgctccaggcgctgatcggtttcctccgtatccatataccaaacctgcaccattttggactgttttaaacgggttttcacgagcaacgagcaacaaatagattaaacaagaaaaattcaactggcatcagctgttcgttttcgaattttcgaaatcgataacagacactcaggcgaatgccgctagtgctgttaacttaacattcgaaaatgaatgctgttagttttgtgttcgaaatactgctattttaaaaacttcatttttgaaatgttcgatttaaaacgtaaaataaccataattttaataaccttcaaaaggagttatttttctattttttttttgttccattattactctttattattttacgatagatatacgatttttgggcagtttgttgtatgttttgactttaattgaatttgtagcgtgcaattttgcctttcgttactattatctagtttaatttgtgtagacatctgacagtttggtactaacaatcttttagtacgcgaaaatgctaggtttctggttttatgttacatttattggcgttacaaaggagcacaggattacgcagtcagtttggacagttcctcgcgcagctcggccgtgtcaatggctcccttcgcttgcgattgcggctgggcttgggcttgggcttgggattgggccaggaggcgggcacagttcttcttgtgcatgaaccaatgcagccgctggcattcgcgatcgcaatactgcaccgccttgcacttggagcacttcttgtccggtttctcggcgccgcaggtgctgcagtagttgccctcgtcctgaaaattagttttccagattagaaaagaatcatttgattatgagatcatgatacccaccgtaatccacctcatcccattgatggcatttcgcaggacagtcagtgctggtggggcatccttggcgccaaattgcgttgcgatttgccggaagatggtgcactctctcacgggaaactccctggcacattcgcgcaacgtgtattccacatagtccagctggcccagcttgttctcc

SEQ ID NO: 17681 - DNA, 1029 bp, DROSOPHILA
atggtgcaggtttggtatatggatacggaggaaaccgatcagcgcctggagcaccaccgcaatccgcctgcctacttggaactggatgatctgtaccagaagaccggcgtggaatactttaaggcaacttatcttgatcattcacatttgcagatcaatgcggacgagtaccagagcgataataccctcacggaactgagggcaaaacactatgccaacaagttgaaagcctttttcaccgaacacctgcacacggatgaggaaattcgcctgatattggagggatccggttactttgatgttcgcgacaatgaggacaactggttgcgcattaaggttgtcaagggagatctgatcattataccagctggcatatatcaccgctttactttggataccaataactttatcagaactcgtcgctattttgtgggcgaacctgtctgggctccacacaatcgtcctgctgatgaaatggactgtcgcaaatcgtacatcaagcatcagtcggaaaactttgtgcaattcaataagcgccgaagagaaaaaacagcgcaagtatataatcccaagcgccagcgaaagtatcgagccaacatcgatgcgcgtgccatcgctaggaaggaaaacaaaacaaacacttttttactttttcatctctcggatcgttcggacgtgctacgcggtctcgtctgtgtgtcgcacgcatttttcggcaatgttgcatgctccaaaatacaaatacacagccatacaaaaaaccaccttgctggctgtctcgctcccacacacaaacacactcgcatacagacgcacgcactaaaacccgcttgcaacaacaaggcatcgcaagccgaaatgcagtttaaagcgcaactaaaactaaacagagctttccactccaagtgggtgtctctaaaagtgggcggtgggtggtgggcgttcaagtatgcatataatatccgggctcgtcgctacccgaaaacgaaggcaacaacaagaacaacagccagcagcatcatccgatga

SEQ ID NO: 17682 - protein, 342 aa, DROSOPHILA
MVQVWYMDTEETDQRLEHHRNPPAYLELDDLYQKTGVEYFKATYLDHSHLQINADEYQSDNTLTELRAKHYANKLKAFFTEHLHTDEEIRLILEGSGYFDVRDNEDNWLRIKVVKGDLIIIPAGIYHRFTLDTNNFIRTRRYFVGEPVWAPHNRPADEMDCRKSYIKHQSENFVQFNKRRREKTAQVYNPKRQRKYRANIDARAIARKENKTNTFLLFHLSDRSDVLRGLVCVSHAFFGNVACSKIQIHSHTKNHLAGCLAPTHKHTRIQTHALKPACNNKASQAEMQFKAQLKLNRAFHSKWVSLKVGGGWWAFKYAYNIRARRYPKTKATTRTTASSIIR

SEQ ID NO: 17683 - DNA, 9139 bp, DROSOPHILA
gtttgcattattttgcattacggcgaggcataagcattacagcagcagctgttgttgttgttgttgttgttgtggatcttgagccgacctcatccccaaccccacctacccctccagcagccttctgtttattggacttggccaataattggtagcaaagggttcttttttttgttgacattgatggcaactagcaacaacaataatatgttgttgaggggggcgggaatgagcacactggcagcattgcccataacggtaacgatgtagcagcgatgcaacagtgatgtacgcatgtatcgacagcatggcattctgatcaacatttctcctgatctcctcagtgtttcctccgttatttatacatttgttgttgttctcgtttctattttctatttagtttttatttttatttatgtattttttggttttattttggttacttttgttgttgttgctgttgccatttgaccaaattcttcgactacatgttggccgattatttatagaacggtcgccacagcatagagagagcccccaaaaacgatgacgcagcacaagcaacaacatagacattcactaaacatcgaccataacaataacagcgatagcaacagcagaaacaacaacaataacaacagccactactagaactacaaaaacaataacatacgaaatgctcagcttggtttcttccattcatcgtgtccttcactctttcgttcttcttcgctcgtcatgctctctcctttctctctctctctctctctgtcgctctcccccttttccaaccaaatccatcatgcaagtacagttagctgtaacgacgacaactgcaacaacaacgaaactgttatgacgctgtgttgttgtcatttcacgtgcacagcctgcgtcagcgtcggcagagacagaggcagcggctgagctgattagctttccacgatccacgatcaatttcactttgatggctttctaatgcaagtcgctgtgtgcatgcatgtgtgcacctcctcttgaccgtaaaaaccccatgtactatgatgatttgaacatgtgcatatccgaaaaagctattacttgcaaataatatttatgtaatattcaagtacatcgatgtggccatattattcattcataaaaggttgttttaattagtaattagtgtgtacggatctgataagaaaagcaatgaaacttttcctccattacagtttcgcaggatccggaggacttctaccgcctggatccacagcgatcggccgccgaaaatgcattcgaaatatactcgatgctctgtttggaggagacgcgggacacgaagcgcctgtttctgctcaacgcgctggcctcgctctgtttgggggcccgaaagggctcccaccacagcaatatacgcttcaccaccgaggagctgctctactggtaagatgcccgttggggaaaccattgttcttaacatggctaattgatcgcccttaattgcagccttagtgcctcactggtgcacaccttcacccaagtgcgagcggcggcactgcgaacgatccggtatgccattagcacgcccaatgacatcaagacgttcaatgcactgcagctgcagcacctgctctgccgctccatcgatctaatgctgaagaacgacgacgagcgcgtccaggcactgaagctggtccgcaagatgctggccatcgcgccggaggacatcagtccggcggtggtgcgctgcctggtctcgctggcggatagcggcatcgaggagaacgacaatctgttgcgtgcctgcctggccaccctggcagagttcgctgtgctcaatccggcgctgctgatcgtctgcggcggcgtcacctccataacccgcaatgtgctagagtgccacaatccccgcatcgctgagagcctgtgcggcgtgcttctgtacctgctcgagtggccgcaaacgaggaacatctgcggtgtgcggctggactgcctggcagctccttattgcgatttcacctaccggcagagtatcgtcgataagaacaagtgagtgccctagtgaagatcccaccaatccctccttgaatactgcagcttggctgcagaatactacaaatgggttacccaaaacaaaaagcagtttatcaagccagatgtaagacggatccacttcactcattaattcgccgaaagtaatttaatgtagagtaattatatctgctgttgaattgtaaccaaataatcgatgaacatcacgccgtcttttgagattatcaaacagcggatgcaaacatgaaattctaaaatagataactaaaggcagcacggccattgacctcgtttcatgctctaaatgagtagttaaatcgggcgaaacacttttggaaaatcgaacaagactatcccacaaacatctactgaagttttttcacaagatgtactactacaagttgtagataagcgctatcagttacatcattcttttataaataaaactatctttcagggatgcgcgcgaacttcgctacaccagctgtcggctggcactgctgtctgtgctgcgcagctggacgggcaccctcgaattctgtgatcctagcaaaccctcaggcctgaaagcaatagtcgacgctctgtatttgaaccagatcgaagtcagagtgagtacattcccctcttagtatcgatctgaacttactgaacatgcaatttgaacagaaagcaatattggatttgctgtacgagctgctcacgctgccgcagccaacctggacggatgactatgcggtggcgttgcaggctgtggatccgtcggacttccaggacacgtggctgctgagcaatggtttcgtgtccgccgaagggcgctccattttgccaacgctggcggcgcgtgcaccgagcgtagtagagcagcacctggcgctgatgctgtactgtttcctcgagactggactgctcaatgcgctcgtcgaggttgtggtgagcagcgatcagttcgtctcggtacaggctacggtgctgattggcaagatcctgcagctaatgcacacccacctgcccccggatatttgctgtacgagtccggcactgcccacgctggtgagtcatgccacattggggaaccagcaggccaatgcagcggtggccgctctgcaaaactaccagaagttgctgcgccagcggccggcgtcgcgcagcttattcctagacagcattatccagggcggtgctctcatccagacgcgactgtttcgtcggcacctcaacgtgcaggagcaagcgggtcctgtgctacagttgcaggaaacggcggaggcggcggcatttgcggtaccgcctgtcactcagtttcgcggcaccctcgatcgttctcggctggattctgtctcctccagcgacgagtccaactcacaggcttcgacctcgtcgaggtccagttttcgactgaagcgtaagttccttccgcaagccttatatgataacttccgagccttcaatcggctgctgacagactcccgtgtgctgagccaagcggacgcgcatctttgggactgggatgttattaccaccatactgaaggtaaactaaatcagaaaatattatggtatctccagtttataaacgattctcatcttaacatttgcagtcgaatttaatccgcaaactggactacacccaaggaaagttcctgaagcgactcgtggacttctacaagccgcgcaataatcggttctctcaccaggatttggtgcctggacagaggctgcctacatatgtcagtgccggattggatttaattgacgtcctcctgtccagcaatgaggtagattctcttaatgatggcctaattagtgaaaatagcctaaagttactcgttaatttgcagcttgaatgtatgcgctttataaccgactacttttcggacatcagccaacagctggcggccgtcaccacatcgaatcgtgcacacgactgtctatttagtccacagcatatgaataacacgatgtgtcagcagtatttcctctacatcggacgcatgtgccgaaccgtaaaaggcatcgaagtactcaaaaataccaccgtatttgaatagtgagtgctgagtgatatgtacataatttgacttaaatcttgtcaaattaggttaaagaatctaaagatgttagaccaaaacgaatcgactaatcggaaggggttaactcattcaatattaactaaacctagtaagaccttcgctaatcgagatttccttaatttcagcttgatcaatttggtgcgggtgacggaccacgtctgctatgtgaagctaattgtgtccggcctgaactacagctacgagaagctaccacgtcaggtgctggaaaaggcgcttacgtcggcgaagacacgcggacgtctgtactccacccagttcatggcagtgctgctgcgtgcccgtctgcctcactttgaggtatggggcattccattgattatcaaccagacgcgggattcggaccgtagcgtggggctggcagccatggatgtactggaggaggcctgccacgacaagtactacctggaggagattgtcagtcggtggcccaatctaacgcatcgtggtgatgcaggacggctgctgatggcccgctattattcactgccccgcggcctgaacagtacgatggcacgaatcgaggatgagatccgctactggcggaatgggtacaacaagcgctacgtgctcctcgtggaagccgacacccactcaagcctgacgctgcacatccgcaatgaggatggctactactcgcgtcgcaattgcaaccagagaccacagactgtaccaccaaacgttgcacctcatctgtacgggcaaatggcacagactggccagggtatgacagctctgcggaagcacggagacctgccgcagctattggaactgctcagacgcgccaaatgcacggacgatgccgagtgccttgaactgaaggccgccatttgggcactggcccacgcctcaacccactccaatggaattgaatactttgtcgaactgaatgccaggtaagtcacatacatatcacataacttcgaatcgtgtcccacgaatttgaaagagtatacacaaaagatgcaagatgttacaaagttatttattgtttgtagactatacgagaagcttattgttctggtgaccaaatgcgaggtatattcggtgagggccacctgttttagtgccttaggtcttatcgcaggcacacaggcaggtgccaatatcctttttaagttgagtaagtgtcccatcacaaatgtgtttgaaaaactgattgtgtcctaattgaaaaatgcatgttttgcagactggctgagcgtgcgacatgacaagaacacaatgtggcccgtgcatcagccggaggattggatgtccagccagtacacaccggtgcgacattactacgaggacgtgccggcggacaatatgaccatgatggatgactatatagaaagattctacgaaacgggctcagacttttggcacatgctcgccgatcagactgatgcgagtggtggtggtgggggtgtagccggcacagtcgtcggtatgcatcctatagtgcaggatccaaatgcaacgattacgaccacggacagtgttcgcaccacgaccgatgatgtgcaccccagaatgttggttggagtggctgccaaatcaaagactttgccagaaggtagcaatctgcgtcagggcaagcaccaacgctcgctctccgaatcgaagaccacggatgtgatcagcttgttgggcagtggtgtaggtacgatgtcgggagctgttctctacccaacgccgtatcagcatcgaatacgctacaactcgtgcacggattcaaacacttccggcgttagcagctgcgaatcggtgaccggacgcactgcagctgcatatgccgccgcagccaatgagttacagcaattccctttgagtcctattccaagcatgtccaatctgctcgagagcgatgagctgtttcgtcgaaatcagctagccaccagtatgctgccctccaccctcagtcctatggcgatgaagggctatgtccagctacgctccctgcgcaagcacagccgacccgtattctccgaatcttcggcggaattctacgactttgcggaaatactggacacaccagaggttcagatgcgcaagctcgactggacgcattcccaccgtcggcttaaggtacgcagcttggaccgccagctaagtgatgtttataggtgagtcatcctttgtggatggtagtcgcgttaagaggtactaatagcgttgcttggtaatctgttcatagacgcctctccgcggacgagttgaatgtgcttctgcccacgcttaatgctcccaagttcctgcctcctaatgatttgaaagggccatgctatgcgggtatctgcttgcctaagaacgttctggacctgtttccgacgcgtaacctcagtcgaacgtacgtttcgcgggatatccaggaccaagatatagtgggcataaatctgctgaacaccatgctacggccacagtgtctcaatgactcactcaccaatgagggcggcgacgagtcatcggttatatcatcgctgtcggacgtctcgtctgcaagtcggcgacaaacacgacaattgcagcaaggcgccaagcactcgcgaagtctgtgtctccattgtgcccgctccccgcgacagcagcgtaatgacagcggcagccatagtaatggtggaggaggcgcatccctcgctccctgcgagctgtacagcagtgcagcagcagctctggtggcagccggcatccaggctggaccagttttggctaaaaagagtggctcatctgcccaaggagcttcagcggcacttggcgccgacatcagcttccattccccagagagcatgctgagcgaggatagcctgccggacaggcttacggcctccattctgtacaacgtgcagcgtctggccaatcccgttagtgccaagcagtcgaaaatggctctgttggagcttaagcagaaacacccgcacgcctttcaggtgagactcatttgaaatccaaatgatggttcgtacttaccacgtttttatctctaggatatttgcctttattcggaggcctgcaaaacgataggccggagtagctatcggatgatagcccgccgcttcctgcaggagctctttctggaccttaattttgactcgttctacgtggagcctcagctcataatcggggcacgtaagttttccgctgaggaaaaagcagaggccacggcccccacggcaatgcaggccatgccgtttaagcaaacgattctcaagcctaaaccggcggcccaactggctagcgtttatgagactagttgggagaacctgctgatggaccagtcgccacggataaacaagtcatcgcctgccgatcaaccggccaatgctcaaacgaaagcaaaggcccggaaccagctgcacattgacgatacggagagttcgttgtccagtaccgatggcgaaaatgattccggtgaggatgtttgcgacggcagtggagccggcacccaggccagctcggtgaccaccgctcatacagccctgcccacaggaaacagcaatcgtagcagcattggcacatgcacagcaagccagctggtgccaggtgcggcaacttcaaactccgctggtgctgggacaagcgcatctgataatgctagtacaagtctaaagaatgaaaaccggcaattcacacgcggacgattctatacgctggagctcgatttgagctgcaccaagaacaagtttcccatcaagaatcgcagccagcgaacaccaacgcctccaccaatcgaaagtttaatcgagtccaagcccacggttcagacagatgtgaatacaagtgcgctgccaattatgcagcggaccggtggcagcaatgactcctcgtcagccctaagatattccactgtgaccaagagcttgtcggcatcgatggccaggccggtgggcagcctgtactgcgagaagcgcttgcagagctccaaatcggaagcggtcctcgatgaggtggcgaaggcgagaagagcatccggtggtgtgggactgacaactgtgcgtgacaactcctagacgcactggcggaagatcaattgaagtagcccaatggggacgcactgcctactcttacatctcgtttactggccgcccgccttcctaaaccgaaaccaatcggataaatgtaatatatcaaatcaaagaacatgtagctacgtagattaaggcaatccgtactataggatttaagttattttcgactagtttgttaaaattaaagttattaccatagttacttttacgatcaccacttatgcatagttatttttaaagaaattcataaccgtaagcaggaaaccaacaaacgacaaaaatcccaaaaaataatatataattttcttatgtagcgtgtaccaacatattttatagaagcagatcgaaagcaaattggataattgccttgaagcaacaagaaacaaccacaaaccaccgcaatttatttaattaatgtacttaaaactaaaagagacccagtggcaggcgaaagcaaaaagaccacacaaaccttaaaccaagaaattatcattattgttgaaaacaaagcaagaagcataccgtgaatcgttcacaatcactttaaaaccaaaatgaaatgaaatcaataaactataaaaattgaaaaagttaaacccagcaagtgctatttacttaaaatcgtatggaaagataacaatcttcttaggggctgactagatttaaggtcgatttatttagtttgttttttaattgaaattggctaagcaatcgtattggttgagtcatgcaattgaaattgttggaactatgcatacaatattttgtatatgtttagtttaggagactgtaggaatttcgtagtaagctctattttttcactattcttgtatataaatgcacataatgatcttaggtataatgatcttaggtagtggtagtacatagcaatgtgtgtgcccagcggacgggggaaccatgtccatctcggatcgaacgtggctcctccacgtccaactgcctgacattcgagtatagtggg

SEQ ID NO: 17684 - DNA, 5769 bp, DROSOPHILA
atgtgtgcacctcctcttgacctttcgcaggatccggaggacttctaccgcctggatccacagcgatcggccgccgaaaatgcattcgaaatatactcgatgctctgtttggaggagacgcgggacacgaagcgcctgtttctgctcaacgcgctggcctcgctctgtttgggggcccgaaagggctcccaccacagcaatatacgcttcaccaccgaggagctgctctactgccttagtgcctcactggtgcacaccttcacccaagtgcgagcggcggcactgcgaacgatccggtatgccattagcacgcccaatgacatcaagacgttcaatgcactgcagctgcagcacctgctctgccgctccatcgatctaatgctgaagaacgacgacgagcgcgtccaggcactgaagctggtccgcaagatgctggccatcgcgccggaggacatcagtccggcggtggtgcgctgcctggtctcgctggcggatagcggcatcgaggagaacgacaatctgttgcgtgcctgcctggccaccctggcagagttcgctgtgctcaatccggcgctgctgatcgtctgcggcggcgtcacctccataacccgcaatgtgctagagtgccacaatccccgcatcgctgagagcctgtgcggcgtgcttctgtacctgctcgagtggccgcaaacgaggaacatctgcggtgtgcggctggactgcctggcagctccttattgcgatttcacctaccggcagagtatcgtcgataagaacaaggatgcgcgcgaacttcgctacaccagctgtcggctggcactgctgtctgtgctgcgcagctggacgggcaccctcgaattctgtgatcctagcaaaccctcaggcctgaaagcaatagtcgacgctctgtatttgaaccagatcgaagtcagaaaagcaatattggatttgctgtacgagctgctcacgctgccgcagccaacctggacggatgactatgcggtggcgttgcaggctgtggatccgtcggacttccaggacacgtggctgctgagcaatggtttcgtgtccgccgaagggcgctccattttgccaacgctggcggcgcgtgcaccgagcgtagtagagcagcacctggcgctgatgctgtactgtttcctcgagactggactgctcaatgcgctcgtcgaggttgtggtgagcagcgatcagttcgtctcggtacaggctacggtgctgattggcaagatcctgcagctaatgcacacccacctgcccccggatatttgctgtacgagtccggcactgcccacgctggtgagtcatgccacattggggaaccagcaggccaatgcagcggtggccgctctgcaaaactaccagaagttgctgcgccagcggccggcgtcgcgcagcttattcctagacagcattatccagggcggtgctctcatccagacgcgactgtttcgtcggcacctcaacgtgcaggagcaagcgggtcctgtgctacagttgcaggaaacggcggaggcggcggcatttgcggtaccgcctgtcactcagtttcgcggcaccctcgatcgttctcggctggattctgtctcctccagcgacgagtccaactcacaggcttcgacctcgtcgaggtccagttttcgactgaagcgtaagttccttccgcaagccttatatgataacttccgagccttcaatcggctgctgacagactcccgtgtgctgagccaagcggacgcgcatctttgggactgggatgttattaccaccatactgaagtcgaatttaatccgcaaactggactacacccaaggaaagttcctgaagcgactcgtggacttctacaagccgcgcaataatcggttctctcaccaggatttggtgcctggacagaggctgcctacatatgtcagtgccggattggatttaattgacgtcctcctgtccagcaatgagcttgaatgtatgcgctttataaccgactacttttcggacatcagccaacagctggcggccgtcaccacatcgaatcgtgcacacgactgtctatttagtccacagcatatgaataacacgatgtgtcagcagtatttcctctacatcggacgcatgtgccgaaccgtaaaaggcatcgaagtactcaaaaataccaccgtatttgaatacttgatcaatttggtgcgggtgacggaccacgtctgctatgtgaagctaattgtgtccggcctgaactacagctacgagaagctaccacgtcaggtgctggaaaaggcgcttacgtcggcgaagacacgcggacgtctgtactccacccagttcatggcagtgctgctgcgtgcccgtctgcctcactttgaggtatggggcattccattgattatcaaccagacgcgggattcggaccgtagcgtggggctggcagccatggatgtactggaggaggcctgccacgacaagtactacctggaggagattgtcagtcggtggcccaatctaacgcatcgtggtgatgcaggacggctgctgatggcccgctattattcactgccccgcggcctgaacagtacgatggcacgaatcgaggatgagatccgctactggcggaatgggtacaacaagcgctacgtgctcctcgtggaagccgacacccactcaagcctgacgctgcacatccgcaatgaggatggctactactcgcgtcgcaattgcaaccagagaccacagactgtaccaccaaacgttgcacctcatctgtacgggcaaatggcacagactggccagggtatgacagctctgcggaagcacggagacctgccgcagctattggaactgctcagacgcgccaaatgcacggacgatgccgagtgccttgaactgaaggccgccatttgggcactggcccacgcctcaacccactccaatggaattgaatactttgtcgaactgaatgccagactatacgagaagcttattgttctggtgaccaaatgcgaggtatattcggtgagggccacctgttttagtgccttaggtcttatcgcaggcacacaggcaggtgccaatatcctttttaagttgaactggctgagcgtgcgacatgacaagaacacaatgtggcccgtgcatcagccggaggattggatgtccagccagtacacaccggtgcgacattactacgaggacgtgccggcggacaatatgaccatgatggatgactatatagaaagattctacgaaacgggctcagacttttggcacatgctcgccgatcagactgatgcgagtggtggtggtgggggtgtagccggcacagtcgtcggtatgcatcctatagtgcaggatccaaatgcaacgattacgaccacggacagtgttcgcaccacgaccgatgatgtgcaccccagaatgttggttggagtggctgccaaatcaaagactttgccagaaggtagcaatctgcgtcagggcaagcaccaacgctcgctctccgaatcgaagaccacggatgtgatcagcttgttgggcagtggtgtaggtacgatgtcgggagctgttctctacccaacgccgtatcagcatcgaatacgctacaactcgtgcacggattcaaacacttccggcgttagcagctgcgaatcggtgaccggacgcactgcagctgcatatgccgccgcagccaatgagttacagcaattccctttgagtcctattccaagcatgtccaatctgctcgagagcgatgagctgtttcgtcgaaatcagctagccaccagtatgctgccctccaccctcagtcctatggcgatgaagggctatgtccagctacgctccctgcgcaagcacagccgacccgtattctccgaatcttcggcggaattctacgactttgcggaaatactggacacaccagaggttcagatgcgcaagctcgactggacgcattcccaccgtcggcttaaggtacgcagcttggaccgccagctaagtgatgtttatagacgcctctccgcggacgagttgaatgtgcttctgcccacgcttaatgctcccaagttcctgcctcctaatgatttgaaagggccatgctatgcgggtatctgcttgcctaagaacgttctggacctgtttccgacgcgtaacctcagtcgaacgtacgtttcgcgggatatccaggaccaagatatagtgggcataaatctgctgaacaccatgctacggccacagtgtctcaatgactcactcaccaatgagggcggcgacgagtcatcggttatatcatcgctgtcggacgtctcgtctgcaagtcggcgacaaacacgacaattgcagcaaggcgccaagcactcgcgaagtctgtgtctccattgtgcccgctccccgcgacagcagcgtaatgacagcggcagccatagtaatggtggaggaggcgcatccctcgctccctgcgagctgtacagcagtgcagcagcagctctggtggcagccggcatccaggctggaccagttttggctaaaaagagtggctcatctgcccaaggagcttcagcggcacttggcgccgacatcagcttccattccccagagagcatgctgagcgaggatagcctgccggacaggcttacggcctccattctgtacaacgtgcagcgtctggccaatcccgttagtgccaagcagtcgaaaatggctctgttggagcttaagcagaaacacccgcacgcctttcaggatatttgcctttattcggaggcctgcaaaacgataggccggagtagctatcggatgatagcccgccgcttcctgcaggagctctttctggaccttaattttgactcgttctacgtggagcctcagctcataatcggggcacgtaagttttccgctgaggaaaaagcagaggccacggcccccacggcaatgcaggccatgccgtttaagcaaacgattctcaagcctaaaccggcggcccaactggctagcgtttatgagactagttgggagaacctgctgatggaccagtcgccacggataaacaagtcatcgcctgccgatcaaccggccaatgctcaaacgaaagcaaaggcccggaaccagctgcacattgacgatacggagagttcgttgtccagtaccgatggcgaaaatgattccggtgaggatgtttgcgacggcagtggagccggcacccaggccagctcggtgaccaccgctcatacagccctgcccacaggaaacagcaatcgtagcagcattggcacatgcacagcaagccagctggtgccaggtgcggcaacttcaaactccgctggtgctgggacaagcgcatctgataatgctagtacaagtctaaagaatgaaaaccggcaattcacacgcggacgattctatacgctggagctcgatttgagctgcaccaagaacaagtttcccatcaagaatcgcagccagcgaacaccaacgcctccaccaatcgaaagtttaatcgagtccaagcccacggttcagacagatgtgaatacaagtgcgctgccaattatgcagcggaccggtggcagcaatgactcctcgtcagccctaagatattccactgtgaccaagagcttgtcggcatcgatggccaggccggtgggcagcctgtactgcgagaagcgcttgcagagctccaaatcggaagcggtcctcgatgaggtggcgaaggcgagaagagcatccggtggtgtgggactgacaactgtgcgtgacaactcctag

SEQ ID NO: 17685 - protein, 1922 aa, DROSOPHILA
MCAPPLDLSQDPEDFYRLDPQRSAAENAFEIYSMLCLEETRDTKRLFLLNALASLCLGARKGSHHSNIRFTTEELLYCLSASLVHTFTQVRAAALRTIRYAISTPNDIKTFNALQLQHLLCRSIDLMLKNDDERVQALKLVRKMLAIAPEDISPAVVRCLVSLADSGIEENDNLLRACLATLAEFAVLNPALLIVCGGVTSITRNVLECHNPRIAESLCGVLLYLLEWPQTRNICGVRLDCLAAPYCDFTYRQSIVDKNKDARELRYTSCRLALLSVLRSWTGTLEFCDPSKPSGLKAIVDALYLNQIEVRKAILDLLYELLTLPQPTWTDDYAVALQAVDPSDFQDTWLLSNGFVSAEGRSILPTLAARAPSVVEQHLALMLYCFLETGLLNALVEVVVSSDQFVSVQATVLIGKILQLMHTHLPPDICCTSPALPTLVSHATLGNQQANAAVAALQNYQKLLRQRPASRSLFLDSIIQGGALIQTRLFRRHLNVQEQAGPVLQLQETAEAAAFAVPPVTQFRGTLDRSRLDSVSSSDESNSQASTSSRSSFRLKRKFLPQALYDNFRAFNRLLTDSRVLSQADAHLWDWDVITTILKSNLIRKLDYTQGKFLKRLVDFYKPRNNRFSHQDLVPGQRLPTYVSAGLDLIDVLLSSNELECMRFITDYFSDISQQLAAVTTSNRAHDCLFSPQHMNNTMCQQYFLYIGRMCRTVKGIEVLKNTTVFEYLINLVRVTDHVCYVKLIVSGLNYSYEKLPRQVLEKALTSAKTRGRLYSTQFMAVLLRARLPHFEVWGIPLIINQTRDSDRSVGLAAMDVLEEACHDKYYLEEIVSRWPNLTHRGDAGRLLMARYYSLPRGLNSTMARIEDEIRYWRNGYNKRYVLLVEADTHSSLTLHIRNEDGYYSRRNCNQRPQTVPPNVAPHLYGQMAQTGQGMTALRKHGDLPQLLELLRRAKCTDDAECLELKAAIWALAHASTHSNGIEYFVELNARLYEKLIVLVTKCEVYSVRATCFSALGLIAGTQAGANILFKLNWLSVRHDKNTMWPVHQPEDWMSSQYTPVRHYYEDVPADNMTMMDDYIERFYETGSDFWHMLADQTDASGGGGGVAGTVVGMHPIVQDPNATITTTDSVRTTTDDVHPRMLVGVAAKSKTLPEGSNLRQGKHQRSLSESKTTDVISLLGSGVGTMSGAVLYPTPYQHRIRYNSCTDSNTSGVSSCESVTGRTAAAYAAAANELQQFPLSPIPSMSNLLESDELFRRNQLATSMLPSTLSPMAMKGYVQLRSLRKHSRPVFSESSAEFYDFAEILDTPEVQMRKLDWTHSHRRLKVRSLDRQLSDVYRRLSADELNVLLPTLNAPKFLPPNDLKGPCYAGICLPKNVLDLFPTRNLSRTYVSRDIQDQDIVGINLLNTMLRPQCLNDSLTNEGGDESSVISSLSDVSSASRRQTRQLQQGAKHSRSLCLHCARSPRQQRNDSGSHSNGGGGASLAPCELYSSAAAALVAAGIQAGPVLAKKSGSSAQGASAALGADISFHSPESMLSEDSLPDRLTASILYNVQRLANPVSAKQSKMALLELKQKHPHAFQDICLYSEACKTIGRSSYRMIARRFLQELFLDLNFDSFYVEPQLIIGARKFSAEEKAEATAPTAMQAMPFKQTILKPKPAAQLASVYETSWENLLMDQSPRINKSSPADQPANAQTKAKARNQLHIDDTESSLSSTDGENDSGEDVCDGSGAGTQASSVTTAHTALPTGNSNRSSIGTCTASQLVPGAATSNSAGAGTSASDNASTSLKNENRQFTRGRFYTLELDLSCTKNKFPIKNRSQRTPTPPPIESLIESKPTVQTDVNTSALPIMQRTGGSNDSSSALRYSTVTKSLSASMARPVGSLYCEKRLQSSKSEAVLDEVAKARRASGGVGLTTVRDNS

SEQ ID NO: 17686 - DNA, 4277 bp, DROSOPHILA
ggcgcagtatggcctccatgtcgacggaactgctccccactcgggtggtcacgctgatgagcagggatatcagcgcctccaccgcctgctgcactgcctcaggactgcccaaatcggaggactttttggctagcatctcgtaacggctgggattgggtccatttattaggtaatcaaaggcggacttgcacagctccaccacagcgctggcgggtttttggagcaggctcaaatgattgcgctgttgttgagttaagcgcagagatgacatctttgtggttggttgcctcactaagttagttaaatagtattggaagtattcataggtaaacaggtatgcgatatattcatttaatcgcagacgattaccttaaaaagtttgatgtgttgacttcttgagacttacgtcctgcggctgtacttcagctgtaaatatcagaacttagttaatttaaaaacataaacaataaactggagctcagctatactatttaccgtatcccttagagtttgaaatgcatacttggaaactaccaaaatagttcaattatgatcatcatcatcattttgattgcattctccagtagcaccttattttagctgcataaacttaacatttattgggacaaaccaaaataaataaatctggttgctatcgaatatcgataggtcgatacgattctgcggctcaattgaacatggcttgcaactgagttagcagctccatttgatttgtatcgatatgcaggctcaaatttaaatttgctgcatctaaatatgctgcactgcaactgcaatttaaatatttccatacgaaagtatgcttttccttaatattgcaagcatatggccaacaaatatctagttcatatgcacataaaatgttccccccaaatcaaaacccaacgaaaagctttcattcaagtaaaagctccctcagcgaaagcaaccctgttctcccccgcccccacggcaacaacaacaacaacatggattcgcaaatctgtttcattggcccgtgggattttgctggcagaactgctctcgtttaattgttttaaccaatacattttgtaaccaaaacccgtgcaaatatgctgaagcaagtgacgaagcaattggccctgcagggagtgcgcaccttctcggttggccagcaggtaagcattgttgttaccctccaaaatcccggccagaatcgtgcccattccactgcaactgtttacgtaacagtggcggctaatacactgcatccgctagcaataactacacagcctgacataacatcggcactctcgccatatctttgcattctcgatctagaacaactacaaggtgaccgtttgcggtgccgctggaggaatcggccagccgctgtcgctgctcctcaagcagaatcccctggtcaccgacttggcgctctacgatatcgttcatacgcccggtgtggccgccgatctgtcgcatatcgacaccaagagcaagaccgccggattcatcggagccgaccagctgggtgactccctgaagggtgagtagagggcaggggccgcgagtgaggttatgtgaccagcggataccagtggaaaatttgcctacgatgatggtggtggttccgcagggggcaggggtagaatccaccattatcactcatgatatgatatgcactgtacttgaagtgcttagcttcaatggttttactgacatattgcaaagtatctttcttcttttaaatctactaagctttctaaaaatttatttttcaagttaactaaaacatgaacacattctacttatgtggtttagttgatttagatgttttgtattttaaacatgtatggttgttaaaaggggtatagaaataatgttcaatttatataagtatacattaataatacttaagttatgtaaaattatattttctgtgcatacatttcaaattgaaaatcttcacataaaatcagataggtgttttaaacaataaatatgaacattaaaaatcaagaataaagatttctagaatgaagctttagacttacccattagtatacatattcgcagagctcttccatgtgatttgcattaacgaaattttatgctctgataagataagcagctgagaatatacaccctgatagccttgaaatggttattggtattaataacgacgtaatcagaagcggttacttatcagtgcagaagccaccgggattgaacccataaaagatcaaagctcaaagtgtcagccagtccagaaaactaatcagcgatgcatttttatgcacaccgtttttgcaggatccgatgtggtggtcattcccgctggtgtgccccgcaagccgggcatgacccgcgatgatctgttcaacgtgaacgccggcatcatcaaggacatctccaactccattgccaagaactgccccaaggccctggtggccatcatcaccaacccggtgaacacctgcgtgcccatcgctgccgagatcctcaagaaggtaagaaacattattggctgctagtgatcctgattcctgattccatcccttttttcaggctggtgtttacgatcccaagcgtctgttcggagtctccaccttggatgtggtgcgtgcccgtgccttcatcggccatgcccttggtgtggatccccagaccgtgcagatccccgtgatcggcggccactccggcgtgaccatcctgcctgtgctctcccagagccagcccctgttcaagggcaaccaggacaccatcgagaagcttaccgtgcgcatccaggaggccggtactgaggtcgttaaggccaaggccggagccggttccgccactctgtcgatggcctacgctggtgcccgtttcgccggctccctgctgaagggactgaacggcgagaagaacgttatcgagtgctcctacgtgcagtccaccgtcacggaggctaccttcttctccacacccctggtgctgggcaagaacggcgtccaggagaacctcggcctgcccaagctcaacgactacgagaagaagctgctggaggccgccattcccgagctgaagaagaacatccagaagggcattgactttgccaacgcctaagcgatccaacaaatcccatccgctaccaaaaaatcgtgtacttcattagcgcctattgtgaattggcaaactacccatactacccctagcaaatctttcgtctcaagtcggcgtgtcccaagattatatagatctgcgcctagtgtgtggtgtaaaatgaaaccagttgatatctgaaataaataaattgtaaacttggaaaaaaggctttagatttttaaacccacttgcgtgtcaatgttttttaaaaccccaaaacaatcaactagtgatttgaatgtcccttcgcacagcaaaaagatatgcaactatgggtttaggatctgtttttgtaattccaccaaagtagcgtcactgggaaaatggttgcccagcttacactgagcgaaggcatagagtgtttgtcggacacacaccagatggatggtatttaccaaccggaaatttcgctgagtgtagcctacaccgccgcaaacaaacacaatgctcacacgcacacgtccacacagacgcaaccaattaagcttcgttaagatcaatttaaacttgcccgcatgtcacgacgattcccctcccgacgcccatgacaacccctccggaatcctaccaagactccggctccgaatccagtgcgtacgcatttcggaattcattttttaacgatatacaaatttatgtgagagttgaattttttatgctatgcatgtggcattcctaacaaaatatttcgagagcgtactagaaatcctatttgtttgtataaaaatttgcaatataatttccaaacaattcacaccttctgaagattattaaatctaataaaatagttttcggaggaacgtgtctgcaaatactttgtacgaataatctcacaactcagtgataattgctaatttgaattaaaatatcacatgtttttagatttagatgtttaagcaatctttgtttggtgactaaaaagttgtattcattttctaaattgttacaaatctttctatttttagtttctgtattagtggatgatctatattagatcaatataaattattaaattttagataattaaaagattcttcattctttaaatatgatttacctatttctttgatatttttgtttgtaaaatcatgtttttcttaaatagattttgtaaatgttgcgatccatccccttatctataattt

SEQ ID NO: 17687 - DNA, 1289 bp, DROSOPHILA
aatctgtttcattggcccgtgggattttgctggcagaactgctctcgtttaattgttttaaccaatacattttgtaaccaaaacccgtgcaaatatgctgaagcaagtgacgaagcaattggccctgcagggagtgcgcaccttctcggttggccagcagaacaactacaaggtgaccgtttgcggtgccgctggaggaatcggccagccgctgtcgctgctcctcaagcagaatcccctggtcaccgacttggcgctctacgatatcgttcatacgcccggtgtggccgccgatctgtcgcatatcgacaccaagagcaagaccgccggattcatcggagccgaccagctgggtgactccctgaagggatccgatgtggtggtcattcccgctggtgtgccccgcaagccgggcatgacccgcgatgatctgttcaacgtgaacgccggcatcatcaaggacatctccaactccattgccaagaactgccccaaggccctggtggccatcatcaccaacccggtgaacacctgcgtgcccatcgctgccgagatcctcaagaaggctggtgtttacgatcccaagcgtctgttcggagtctccaccttggatgtggtgcgtgcccgtgccttcatcggccatgcccttggtgtggatccccagaccgtgcagatccccgtgatcggcggccactccggcgtgaccatcctgcctgtgctctcccagagccagcccctgttcaagggcaaccaggacaccatcgagaagcttaccgtgcgcatccaggaggccggtactgaggtcgttaaggccaaggccggagccggttccgccactctgtcgatggcctacgctggtgcccgtttcgccggctccctgctgaagggactgaacggcgagaagaacgttatcgagtgctcctacgtgcagtccaccgtcacggaggctaccttcttctccacacccctggtgctgggcaagaacggcgtccaggagaacctcggcctgcccaagctcaacgactacgagaagaagctgctggaggccgccattcccgagctgaagaagaacatccagaagggcattgactttgccaacgcctaagcgatccaacaaatcccatccgctaccaaaaaatcgtgtacttcattagcgcctattgtgaattggcaaactacccatactacccctagcaaatctttcgtctcaagtcggcgtgtcccaagattatatagatctgcgcctagtgtgtggtgtaaaatgaaaccagttgatatctgaaataaat

SEQ ID NO: 17688 - protein, 336 aa, DROSOPHILA
MLKQVTKQLALQGVRTFSVGQQNNYKVTVCGAAGGIGQPLSLLLKQNPLVTDLALYDIVHTPGVAADLSHIDTKSKTAGFIGADQLGDSLKGSDVVVIPAGVPRKPGMTRDDLFNVNAGIIKDISNSIAKNCPKALVAIITNPVNTCVPIAAEILKKAGVYDPKRLFGVSTLDVVRARAFIGHALGVDPQTVQIPVIGGHSGVTILPVLSQSQPLFKGNQDTIEKLTVRIQEAGTEVVKAKAGAGSATLSMAYAGARFAGSLLKGLNGEKNVIECSYVQSTVTEATFFSTPLVLGKNGVQENLGLPKLNDYEKKLLEAAIPELKKNIQKGIDFANA

SEQ ID NO: 17689 - DNA, 3427 bp, DROSOPHILA
agtaggaagcgcagcaacagctttgttcgtaattagtttttaagcgcttcgaaagagtatgtggtggtggatatacatacatatatatcctaagtgggcccaaatagagtgtgtgcgtgtgcgtgggtgtgttttggccatggttatgacaacatgcagttaagcacttcttaacgacggctgactgccgataatggcattttgcttgtgcaataagtgcaattgattttcttggcagctaacataagtttttcagaaataaattatttttgatgccacattattattcagtattaagaggatttttaattttcttaattcccaaaggaaaacttttaaaagcgaaacatctcaagcggccttaaaaaagcgtataaatttcgaaaatttgataaagccaacatttcttgccatgcatacgccaaagaacatacataatagtttttcctcgccgcattcccaaaaaaccattcattttcgaagaaagccaggcaaaagtcacagaaaaagttgctagcagtcgggaaaaagttgtcaaagaaaatgcagtgcctctgcaatccccaaaactttcagccagtccatctttcgcaactgcatcctgacaatagctcaaaatatgtagtgccaactgtcgtagaagccggaacggaggggacaaaatgtaagtgcgcgaaaaagtttccgcatggctttaatgatgcgtgcagacaagccaaagtttggttggccaaaagggagaaaaattttgaagaaatgacggaagccgagcgcttacattagtggcataaaattaatgacaaatttcgtgggcttatgcggatgcactgttccgtggcggacgatttcctgccagcgagagcgaacttcgcaaacaattatgggcagaactgagggaatattcgtataaaactaaggccacgaggaatatagcatctgtgaccgccggtaaaagctgcatttttgcggcactaaagcgattccagcagcagaaccactattacggcggaatgtgcatggcccactggaggtgccggagtgcaatgctgttgctgctgttgccggtggtgtttatcacttgcagccaacaactccgacgacgcttaatggcttcctgcccggacagtttgcatctgggcggggcataacacttcggggacttccattctcgcaatacgacccatctgcggcccaaccattccttaataagttacatctgtacatttgcgttgattgcgttgtccttattttctcgtatatatttacacttggttagtctctcggggcagctctttgccggcgcagtgatgccgcttggcgaatgtttcacccacaatcaacggaaagaccaagctagcctcggcatacaccttaacaggggtggcatccttcctgatcttgccccacgatatagcctcatccggtcgagcgccgctatcgctgccgtcaaactccgaggcagtattaatgaacactgagtaatccgctccattgcgcatcagattggcattacaaatgtgatgcttgataacgccgccgcccacgatgatcatcccgctgttgaccgccttgacagccatggtgttgagcctccgcagatcggacagaatgtccaccacgagtccaggttgtcgaaaggagtgaaagtacatcatgtcgcccagactgccatccgtcaaggcgggacaaaagactggtatttgattcttggcagcccaatagtaaatggaactaggatcgccaatccgttcgcccaaccgatgaataatcttcgacggcgaccagatagttccctgggatttttgctcctccagcatctcgtccagcagcggcatcacccagtcctcgaacttacagtaattatcgttcggcaccagaaggttgccaattctgttgattccacgctcgcggagatccctgccactcagctcaaatgaacccatgaacgtgggagccaagcacttgatgaagtcctcctcgacgccgccagctgtggtcacaatgcagtcgatcatacggtgctcggccagaaagcgaatggtctctcgcagtccggacgaaaccaagttggatgtgtagcccaaaaatacggtgcacttgcttcttcgacggatgaagtcgtctgtttcatggctgtctatttggtccgcttccaatggctggtccctgcaatccagctgccagtgttaggggtttgtaacatatcgtagttatgtatttaagttactaacttaccattctgttaatttcccgaatggccaggccaagattcgtggcctgaaacccggtgttcacataggattcgaagagcttactgtagtctaagccttcgttgaaatcgtagccactaacttggggcgtgttttccgccagagcctcgctgcgcttcagcacagcatccttggccaccgatggctccgtcgacataatcagaaattgttgaaattcaaaataaacagctcaaggggagcccaatcgtaatgcattaatcaacatgtgctggttaaggcagccctggtttccgatagagatgtggtttgcaaagtagctaacaaatatttctttaaatttatctgcaaagttttacgtagttatggaacgaagtaagaaaaaccagctatcaaagacttgcgtttaatttaaataaatatatttaatatatatatttaaaaaaaaaaattatgacgatgattttcaaatatattacgacaccggttgcatgtcgaaaatttaggttttaaaattttcttcgtttcgaagtatccaaacttggcttgaatcccgctgaatccgaagtccgcttaccagcactacgcaacaactatcgagcagactgttatcgggtgcaaccatcgattaattacacatatcgctgggcagaaacaaggaaaggatagaaagcactcgaagtgattttttacatcagttctattgttaacggtaggccaaagattcagtgaaacaattgcccttaaaccactgacatttcaaacaatgcaacctgtccctcaagcagcaaaagccccccagagagccagaaactttcgagcacagccaaacgcggaagacgaaacgccagcgagacgaggacgccaagatgattaaactattcacgcttaagcagcagaagaaagacggcgagcaaaagggcagtcagcagaagaaagcgtccgccgcccagctgcgcatacagaaaggtagtctccaatccagcacctggtatgatcaactctcgcttattacttatccatcttgggctgttttcctccccccagatattaacgaactgaacctgccaaacacttgcgccacagactttcccgatcccaatgacttgctcaacttcaagcttatcatctcgcccgacgagggcttctacagagacgggcgcttcgtgttcaatttccgcgtcggatccaactatccg

SEQ ID NO: 17690 - DNA, 1236 bp, DROSOPHILA
atgtcgacggagccatcggtggccaaggatgctgtgctgaagcgcagcgaggctctggcggaaaacacgccccaagttagtggctacgatttcaacgaaggcttagactacagtaagctcttcgaatcctatgtgaacaccgggtttcaggccacgaatcttggcctggccattcgggaaattaacagaatgctggattgcagggaccagccattggaagcggaccaaatagacagccatgaaacagacgacttcatccgtcgaagaagcaagtgcaccgtatttttgggctacacatccaacttggtttcgtccggactgcgagagaccattcgctttctggccgagcaccgtatgatcgactgcattgtgaccacagctggcggcgtcgaggaggacttcatcaagtgcttggctcccacgttcatgggttcatttgagctgagtggcagggatctccgcgagcgtggaatcaacagaattggcaaccttctggtgccgaacgataattactgtaagttcgaggactgggtgatgccgctgctggacgagatgctggaggagcaaaaatcccagggaactatctggtcgccgtcgaagattattcatcggttgggcgaacggattggcgatcctagttccatttactattgggctgccaagaatcaaataccagtcttttgtcccgccttgacggatggcagtctgggcgacatgatgtactttcactcctttcgacaacctggactcgtggtggacattctgtccgatctgcggaggctcaacaccatggctgtcaaggcggtcaacagcgggatgatcatcgtgggcggcggcgttatcaagcatcacatttgtaatgccaatctgatgcgcaatggagcggattactcagtgttcattaatactgcctcggagtttgacggcagcgatagcggcgctcgaccggatgaggctatatcgtggggcaagatcaggaaggatgccacccctgttaaggtgtatgccgaggctagcttggtctttccgttgattgtgggtgaaacattcgccaagcggcatcactgcgccggcaaagagctgccccgagagactaaccaagtatgcaaactgtccgggcaggaagccattaagcgtcgtcggagttgttggctgcaagtgataaacaccaccggcaacagcagcaacagcattgcactccggcacctccagtgggccatgcacattccgccgtaa

SEQ ID NO: 17691 - protein, 411 aa, DROSOPHILA
MSTEPSVAKDAVLKRSEALAENTPQVSGYDFNEGLDYSKLFESYVNTGFQATNLGLAIREINRMLDCRDQPLEADQIDSHETDDFIRRRSKCTVFLGYTSNLVSSGLRETIRFLAEHRMIDCIVTTAGGVEEDFIKCLAPTFMGSFELSGRDLRERGINRIGNLLVPNDNYCKFEDWVMPLLDEMLEEQKSQGTIWSPSKIIHRLGERIGDPSSIYYWAAKNQIPVFCPALTDGSLGDMMYFHSFRQPGLVVDILSDLRRLNTMAVKAVNSGMIIVGGGVIKHHICNANLMRNGADYSVFINTASEFDGSDSGARPDEAISWGKIRKDATPVKVYAEASLVFPLIVGETFAKRHHCAGKELPRETNQVCKLSGQEAIKRRRSCWLQVINTTGNSSNSIALRHLQWAMHIPP

SEQ ID NO: 17692 - DNA, 4221 bp, DROSOPHILA
atagtcaatggcgcccagcaggagggagcagaactcgccgtagatgaggaagggttcgcggaagtcgagaaacacctgggccatcttcactttggcattgggcgtcagcgattcccttagtttgtccaggaactttgtatggatgtcgaccagctcctgaagcgcaacatggattcatgaagtttttaaggtgaacagaataaatcacaggcagctgcaactcactctgatgcgcgggaatatgagacgcagctcgtcctggttgagatgccgctccagcggacccataaacttggtcttcagcgcagtgagaacgtccaggtaattggactccgtgtcgatcagctcgcggatgacatagtcgcgctgctcaaagctcgtcgacgaggcggtctagaggggaaggaagaacatggagagcagggagttagtacggacacgattccggcctaagtgacggggccaccgaagtgtctcatgcatggacaggcggtttggtacgcaattctacctggcttctactcgtcctgtgcagggcgcacaggtcttggtacacctcctcctcttttgtgttggtgtggtcgtaaccggttccattgcatgcaatattgtcggtggtactaaacgaaaacgaaacaaaggccagaaatcataaaataaacaatgcaaaatcataatggacattcgagcagaggtaaaacaataaatgagtagcaaaacgatattcaacagttgttttttttttaagctatttcctgcctgcaactataacatacagttgttaacaatagattatggaggagtattaataaaggaactgaaaacacttttttttggcaagtttaaaatttctactgagtgcgccacatattgaaactcgatagaccgatagtcagtctactctgtaatcgatttccccaccgttagccaacacagcgctgttacgtccaacaggcccaccgccacagcagccctggcttgccagtgccagtgcagccagggctgcatcgccatcaagaacatctgtggcagaacaaataaaaaaaaggaaaatactcgctgtgtattttcggaatttaatttggcaacttcccccctccgaattcagcgacttggcctgctcgcaccgcctggacacctgctactgcagtgctcgcaacatggaccaccacacgtacgccaagagcggatccaagaagtgtaagcaacaaccacagcacgtgctcgctgctccaactgcaacaatttttgcattcttgcacttttgcacttttgcagggtccgcggaagagaagcgcaacctggtggtgcagcggatcgcggcggacgagctcttctcccgctactcaccgaagcacgcggagccatggaagtgagtttcttggggtttcttggttatcaaatccacgaggagatcgcggccaaatccggacattttggccatcgaagactttgtttggtttgttttgctttcaatagagtggcaaaagaaggtgccacaatgtccagatcagatattaggttaaaagcttggttataaacacaacgtaggtttcattgtgattatcattattaattgaaattataactttttttgaaacctaatccatttatagagtcaagcttagaagctcaaacaactcattcttaatgtgtgttcagcattaattaggcactcttgaaattcccaactagttttactaattgaaactttaaaactaagaaaaaataacaattggcatgtacttgattcagtttcactacctcaaattttaaatatagcaaattaaaagcttcgattgctatgaaaactaacccaattccattgacaaacagaaaattcaaggaaatggccaagatcggcgatttcagcgagattgcgctacgcaagcagtggttctccatggtgcagcggtaccgcatccacaaggccaacacactgggcgtcccactcaacaagcagagcatcgaggagctgaacaaggaatgggagtttttcggcctcatccacgcctacatgaaccagaagaccgccgacctgcactcgtacgcgctcaaggagccgaatgtggagcagccgaacaataacctggccatcgccagtgtctactcctgcgacgaggcgcaactctcgccactcatgctgggcgtgctcaatgaccacaactttggcgaacgctcgccgcccaacggatgcgacaccgatgacatggacgagtccaacacgtcgccctgccacgggaacagtggccacagcaacaacgatgagctggacaggctgctggccgaggcgacggcgcgcaaggatgcggcagttggcgacggcgaggatgtgtgcatgctgagcaacaccaactgccacgaaatggaatgcggcccggtgatgattggcggcgaggtgtcgctatccaacagcagatacaacgacttcgaggaggcgacagtgcccacggcaacggctgtgaagagcgagaagccggagaagcctatcccgaaggcgcgtaaattgttaaggaaacaccatcgcaaaggtctcagcgaaaaggagaagtattacaggtgtgtgctacctacacggtgaatcccgtttgctgctaaagattaatcgtaaaatcccctttgcaggcaccgccgtcgctacgagcagcgaatggagaagcgtctgatgggactgtgcaccgtggtgggacaactgctgaagcagtttgctcccgacatggatgtccagccactgttggccctgggcagcgatgtgacgctcagctcgccagcgccaagcagcagtgacgaggagaggagcgaggttctggaggagacggaggaggatcaagagctccagcaggagcagcagcagatgcagctggagctggagcaacagaagctgggagtcgaggccgatgccatgacactcagagtctgagcgaacgcatccgagtgcttctctggtcggtcgcctgcttgtttcagggttcaagtgcaagttcctagctgtgttgcttcacaatcaacaaacaaaatatcgtgtgggctctcaaatgactcccaccactgcgcttcgtcgtcattacgcggacaaccgtccacagtgattttccgctaaagaatagggcgtgcacagcgccgcatagatagacacgtacgttcgttcagtgataacgaaagcataatacgttaatcgaaagaacgaatgtaaacgcattagataaaccagaaagcaaaccaaatacaatacgtatggcaatgtatgtacgaaactcaatgtaaaaaagtcaatgggctcaatgggcgtcttagtttcttagtcatttaacttaactaacgcgcaactagtagcagcctgcgctataaaaatgatgtactaaagaaaaacacagaaatcaaggtggcataattaacataaagggaattgggatataatttttggtaaaacccaaacggacgagagatagtggggcatgttgttaatgggatttggctttcaatcggccgtgctccgtattccgtgttccgtatatcgaccttatcgcaccgcatccctgacaagctgacaagcagaagctctcggttatggatcggtgtgttcttgccccaccctccccaccatcgccatccacgcgctccgatgactgtaccgcactactttcgcgcagcgcagaaactcggtagtatcggtgtaaatacgcgtaaggcggtgatgggcggacggcacttccatagccacttccggtggctatgtttggcccggccttcgatcggtgtcaagttgggttcgataacccagcgccaccgctgctccgttgcattcccgttatggaacctctggtggcggccttgtaggaaccgccaggcggaatcagaatgggaatgccgcagacgcagcgatacagttatctataggcttggggatgcgggctacgtcggtggtggtggtgcgcgttagtgttagtggttcgttgtggttagtggttaatggttagtggagtgagagtgagctcaagcgcaagcaagacaagcagtgcagggcatggattgcataggtctacagagaggaatcgaagggattgtggggcatggcattcgagggaagagcaaggatcgggcgcggaaggaagaagaggttgagggatagaaagaggccagaggaggctgatatctaagaggctgttacacatgacgatacacgggggtggtttgagttctaacaccaaatccgaggagcag

SEQ ID NO: 17693 - DNA, 1613 bp, DROSOPHILA
ggctgcatcgccatcaagaacatctgtggcagaacaaataaaaaaaaggaaaatactcgctgtgtattttcggaatttaatttggcaacttcccccctccgaattcagcgacttggcctgctcgcaccgcctggacacctgctactgcagtgctcgcaacatggaccaccacacgtacgccaagagcggatccaagaagtggtccgcggaagagaagcgcaacctggtggtgcagcggatcgcggcggacgagctcttctcccgctactcaccgaagcacgcggagccatggaaaaaattcaaggaaatggccaagatcggcgatttcagcgagattgcgctacgcaagcagtggttctccatggtgcagcggtaccgcatccacaaggccaacacactgggcgtcccactcaacaagcagagcatcgaggagctgaacaaggaatgggagtttttcggcctcatccacgcctacatgaaccagaagaccgccgacctgcactcgtacgcgctcaaggagccgaatgtggagcagccgaacaataacctggccatcgccagtgtctactcctgcgacgaggcgcaactctcgccactcatgctgggcgtgctcaatgaccacaactttggcgaacgctcgccgcccaacggatgcgacaccgatgacatggacgagtccaacacgtcgccctgccacgggaacagtggccacagcaacaacgatgagctggacaggctgctggccgaggcgacggcgcgcaaggatgcggcagttggcgacggcgaggatgtgtgcatgctgagcaacaccaactgccacgaaatggaatgcggcccggtgatgattggcggcgaggtgtcgctatccaacagcagatacaacgacttcgaggaggcgacagtgcccacggcaacggctgtgaagagcgagaagccggagaagcctatcccgaaggcgcgtaaattgttaaggaaacaccatcgcaaaggtctcagcgaaaaggagaagtattacaggcaccgccgtcgctacgagcagcgaatggagaagcgtctgatgggactgtgcaccgtggtgggacaactgctgaagcagtttgctcccgacatggatgtccagccactgttggccctgggcagcgatgtgacgctcagctcgccagcgccaagcagcagtgacgaggagaggagcgaggttctggaggagacggaggaggatcaagagctccagcaggagcagcagcagatgcagctggagctggagcaacagaagctgggagtcgaggccgatgccatgacactcagagtctgagcgaacgcatccgagtgcttctctggtcggtcgcctgcttgtttcagggttcaagtgcaagttcctagctgtgttgcttcacaatcaacaaacaaaatatcgtgtgggctctcaaatgactcccaccactgcgcttcgtcgtcattacgcggacaaccgtccacagtgattttccgctaaagaatagggcgtgcacagcgccgcatagatagacacgtacgttcgttcagtgataacgaaagcataatacgttaatcgaaagaacgaatgtaaacgcattagataaaccagaaagcaaacc

SEQ ID NO: 17694 - protein, 383 aa, DROSOPHILA
MDHHTYAKSGSKKWSAEEKRNLVVQRIAADELFSRYSPKHAEPWKKFKEMAKIGDFSEIALRKQWFSMVQRYRIHKANTLGVPLNKQSIEELNKEWEFFGLIHAYMNQKTADLHSYALKEPNVEQPNNNLAIASVYSCDEAQLSPLMLGVLNDHNFGERSPPNGCDTDDMDESNTSPCHGNSGHSNNDELDRLLAEATARKDAAVGDGEDVCMLSNTNCHEMECGPVMIGGEVSLSNSRYNDFEEATVPTATAVKSEKPEKPIPKARKLLRKHHRKGLSEKEKYYRHRRRYEQRMEKRLMGLCTVVGQLLKQFAPDMDVQPLLALGSDVTLSSPAPSSSDEERSEVLEETEEDQELQQEQQQMQLELEQQKLGVEADAMTLRV

SEQ ID NO: 17695 - DNA, 3341 bp, DROSOPHILA
ttaaacaaatctacaacagaataaacttgagctgcgcaataataataatttttaagatttacaaatagaaataaaggattaataaaatggcaaaacttaacgcatacaatttgtaccaaaaaaaaaaatgaaagaataatgaaaattcacacaaactaaataaagatttatatatgcgataaaagcaagaagaatgagaagaaaaaactatagagaatgctgaatcaaaataaatatcacgcaaaatcaaccacattaatgtttgtttttggtgcatgtttttaaatcttgtaacgttctaaaatttattgaattttagttcaatttcttctgtaaaatagatttgaactcgttcaaaaccgaacattttagaaaaccaaaacatttatgttctttgttcaatattgctctttattaaaagttaaaggcggtttaagatcgatgaagttgccgtcacgccttgctccaaatggagatgtctagccgcagcaggcgacgtcatcgtgcttgtgctgagcctgaacgtcctcggcgaagtgaacgctgcggaccaccgggtggtggtgatggtcatcgccaaccatgggggcctcgttgttcagttggggaagggctagaatgtatgggaagcagttaagtagagctgttgtcgagcgtaacccattgcaatccttgccagaggccatgaagaaggcgaggcccaggatgagagtgcacacgagtaggaacttcatggtaaagctggtttgttgtacagatggcttgcttgcttctgatgccttggaactgcacagactccctatttatacagaatgcggctcgataaaaaccgctccaaatatacaaaaacacttgtcgttgcacaatttgcgagcaactcgttagttatagatgaattgatattgaaatgtcgcttggtgtatttggcagcgatgggtaacgccattaacgaaacacataaagcttaacaattgatttcttttctttttgtttttttgtacaaaggagcttctataattaaacaaaatgtgtaggggagaaataagaggtactttaaaaatacgcttacaaagcgagggtgtccgaatcaacatgtaggaaaaaagaaaagggtaagggaactagcaattaactaaataaacgtcctggaagctggccggtgctcatgtactgttgttgttactttgccgcggcttgagtatcagcttccccgtgtcgtcacagctcatattaaagtctcccagtaccattcgcgttctcgatgtaattatttgcggagctatgactagtttctgtatgcccaggatgaacaggacgactgcggagagaaatgataaggtttacaaaatcagtaagtcagtttcaaaccaaaaaaattagattagattaaatggaagtgtttgttagctgaaaattcttaatcagttggactatcaatattgatatatacaaatcgaatttgataaagcgaagagctttgacaagattaaaggcaacctaatgttgctaaaatttggagaatgtacttatgtagtttgcatagatgtgatagatataaggagtgtattctactcaaaataacagtagaaatacctaaaaatttgaaattcttgattttgatcctttctttttaccgagtagcctgagataacctgatatatagtatcgacttgctctacgatatgattatatggatttaaatagcatggtatggcttggtattaaaattattctccatactaggtagaatatccgaggttcaatgaccgccgctgttgactacaaaaagtgacctatgtacggagtacagtagtggctacaccgattcttacccaatgttagggtggcgactgtgaagacgggatgaatccagagggactccgttagcggtacaacggtggtgcgcggatcgcgtagccagtaccaggcgctgatggcggtgcacatggacatggcggaaaggacaactgcaagaagctctatggttattacggattgtaatgctccctggtgttctcattatacggatgcaacttactgcgccagcggaacgtcgagggacggtacgatgaaaccacttcggtgaggcgccgctcgaaggccttgagatctgcagaggagcgaggaaaacaaacccagttatggttggtaaacatagtcagtggcttgcgcgttttccggctctcttttgccggcgagttacataccttcgcaggctgacggttccattgcagctatttcctcaaagctcgtggccgtcttaatgcgattaaatttgtccagtttaaatattattgtatttattattattatttgatgaggttctcatagctttcttttcctctttttatgtttttgatgacattccacgtttgagagcactgataacgggctgcgtttctcaacactacacaaagcagggtcgtaccaaagaggggctctttgtttatttcctactttcagtacaaaatggttgtatagctaatttaaagtgagtattatatttatgtattatttatattatatttatattattttaatacaaaaatatcatagtttttattataatataaatataattaatggcttaccggacaaattaagtacccactaaatggtcttctacatacacccatgtgtctaagttattcttcctgcagtacaacggtcacactgcggcagctgttgcaaaaaaaggcggataatatttgtagcaaaatcagtgttttttatacgtaaaatcaacaaatataaagtccctcgaaggcattatgaatagcactaaagtgccgcccgagtggaagaggcgtgtcaagtcggagtacatcaaaatcaggcagcagaagcgctacaaacgtgccgacgagatcaaggaggcgtggataagaaactggtaagcgcgggagagatggtggatgtctgggaatcgaaaatctatgtacacatatcctccagggacgagcacaaccacaatgtacaggatctgtactgcgagtcgaaggtttggcaggctaaaccctacgatccgccgcatgtggactgtgtgaagcgggcggaggtgactagctacaatggcattcccagcggtccgcaaaaggtgcccatttgcgtgatcaacgcggtcactcccatacccaccatgtacacgtgggcaccaacacagcagaacttcatggtggaggatgagacggtgctgcacaatataccctatatgggcgacgaggtcctcgataaggatggcaagttcatagaggaactgatcaaaaactacgatggcaaggttcacggcgacaaggatccctcgttcatggacgatgccatcttcgtagaactggtgcacg

SEQ ID NO: 17696 - DNA, 659 bp, DROSOPHILA
gaaaagaaagctatgagaacctcatcaaataataataataaatacaataatatttaaactggacaaatttaatcgcattaagacggccacgagctttgaggaaatagctgcaatggaaccgtcagcctgcgaagatctcaaggccttcgagcggcgcctcaccgaagtggtttcatcgtaccgtccctcgacgttccgctggcgcattgtcctttccgccatgtccatgtgcaccgccatcagcgcctggtactggctacgcgatccgcgcaccaccgttgtaccgctaacggagtccctctggattcatcccgtcttcacagtcgccaccctaacattggtcgtcctgttcatcctgggcatacagaaactagtcatagctccgcaaataattacatcgagaacgcgaatggtactgggagactttaatatgagctgtgacgacacggggaagctgatactcaagccgcggcaaagtaacaacaacagtacatgagcaccggccagcttccaggacgtttatttagttaattgctagttcccttacccttttcttttttcctacatgttgattcggacaccctcgctttgtaagcgtatttttaaagtacctcttatttctcccctacacattttgtttaattatagaagctcctttg

SEQ ID NO: 17697 - protein, 127 aa, DROSOPHILA
MEPSACEDLKAFERRLTEVVSSYRPSTFRWRIVLSAMSMCTAISAWYWLRDPRTTVVPLTESLWIHPVFTVATLTLVVLFILGIQKLVIAPQIITSRTRMVLGDFNMSCDDTGKLILKPRQSNNNST

SEQ ID NO: 17698 - DNA, 9268 bp, DROSOPHILA
tataaatgaattctgaaaaatgtataaaatgaaatggactcatcattaggtcaatttgtttggaatcaaaaatttcccaaagaaatggttttacatttcagaaagtgacccttaattttcgccatcaatatttattagaacattgaccttaaagcaatttgtatagtcgtcactttaacagatcaaagttatacttaaagtcgtgcagttgcaactgaaactgattcattctacgccttatcgatccatcttcccccgaacttatcccaatttctgttggctatctcgttaggaaattccttttcccagcggccatacggattcatgttcgaccagattctggattcacaaatcccgcgcccaaatctcagggcacacgcaacaacacagtaaacacaagtatcactcaccgaatgtgtgggagattctcggccacacaagctacagagaaacaaacccaattcaaactaaaaatttctaaatggaaaataaattaattttattagttctttataagatactaagacttatactagttggaaatcttctaggcatggtttgtaaatcatccttatatctttcgatattattctaagacttttttcgtagtgcacacacaattgtatttttatgggaatagggcgagagtggtgcgctgagttatgacgtccaacagctgtgcaaaacgatggccacagcatcgggaatagccgctcatatgtgggccagttggcctgaaatatgttgcataagctcccccctcttggcaatatcatttggcagctcacgaatgaactgtggctcccgggaaaatatggccaaaaaaaataaaaaaaaaaaggcggggagtattaaataaaaatggctagagaacattgcattgtttgccgccgaccaagccaatcgtaaatcgtgtgtacacataggtagaaagtattgcagccacttaatacagtcataagtcggccatggaacatttacaagctgaccaagaaatacaatgaagaatcggttttttttttcttttacaggctactttcctttgggctcggagcactgcctcacctggatctgcctggatgtactcttctgcacggccagcatcatgcacctgtgcaccatctccgtggacagatatttatcgctacgatacccaatgcgatttggccggaataaaacacgtcggcgggtcactctcaaaattgttttcgtttggcttctgagcatcgccatgagcttgcccttgagcttgatgtactccaaggtgagtaataatgctattcttttgtttatattctatattccaacaatgcgtcaaaatatagtacccttttggcattctatttcccttaatctaatagtgaaaacccattaaattccctagttaacctagtactcaaaatctaaagtgaaaattacaaacactgtgccaagtcaataattaaaatccaaagcgagacaagtgtctgaaatattttgcgcatacatatgtcctttacttacccaaattaattccgtgctcgccctgctatctttcctttgattccagaatcacgcctcggtgctggtgaatggaacttgccagataccggatccggtgtacaagctggtcggctccattgtatgcttctacattccactgggcgtgatgctgctgacatattgcctgaccgtccgacttttggcccggcagcgccagaatctgggtggtggacagcagacggcggcggccactcccggatgggccagtggatggctcggccaggcaccggccttgggtaaggatgctagacaccacacttctgacccccactctcacccagaagtgtccacgaagagctgctgcttctgctgcagcttaatatgattttcagtttgcctaaaatttgcattttgttctccggattgcactttttgcactgaaaactttacacgacactcgacaaaagtagagagtaggaaatgggcggatcaggatcagcaaggggaaagtgctcaaaagtggggaggggtgacaacactagacaaacaatgcagagacatgtgccggatactccccgaatccgtgtccctgggctttctggagcccaaagtgcgactaagccgcagcaatgcacacaaaatcgacattgtcgtcgacattgaaccggatggaatggggcgggggggggggggggccaacaccccaggacaatcacccattccacccacttgcacacacaaccttacaaataggatgaaaatccagcccatatgtgtagatagctaatttccacgttgccatgaatcgagggccagctacgtaaatggcttgtaatgctctaagagctcttccatagtgctcgactagttttaaaaccgaagttttaagcaccaacttttcaacgaagcctcgttacagccccgttgcgtagggtagtttttaaaaactcaagagctgcgttaacttttagttttattaaccactttttgaaatttccataacacttttcagcgcatctacaaaaaagaggaggaatctttaaacatgtagctaataaataaaaagtgaacagtctgttattttagatttaaagagtctaaattgcttcctgcatccctaattacccctctcgttactagcccagttaactggagcttttggctaaaaacaatccaagatccttcgcttccattatcccttcacaattcaatagaccagattcaatttattttaagcataactaagtggctcctaatgccattgtctgcccgcagaatttattcagcgctcccatttctcatccaattggattgccttgagccccaaaggggacagagagtaattttctgggggacaagctgtggatctctggatgttgaaagtcaatacagttggggaatatttaatggaatgcttctggtggtggcgaatggtgaatgctgaatggtaaatgctgatggtgatggtgactgcagtcgaatcgcgtgcactgcagggcatttttgcgaaaatcgtagcgtgcatttaggggcgattcgcaggacgcggtgtccccgattcgtctaagtggatttgaagcctcagctgcaggcattagggtgtgtatgtatgtatgtgtgggtgcgcatctgtgagcggccaagtgcgactgtgttagtgccgtggatttgggcagttattttaagccaaatctctgctgtaaagcgtccgcatttcggtcaggcacgtagtcggatttgccgtattgtactttttacacgcagagaaaaatcttcgcatttattacacaaagaatcaatgtgtctgattaatataagcaagatatttaatgcaagttagaatagcttcaagcactatttcataaggtctgaactggactaggagaagaatttctctcagtgcctatgttgaaggggcatttaagtgtgctcgtgcgagtttattagcgaatttgtgacttttcgtagcgcactattggactgaatgcaatttaatggaaactgtatatccgtttaaccccgtgttcgtgctccacagaacgacgatgcacctggcggcgccttttgaaaccgggtccaggtaacgcctcctcggtgctgcacgcacactcggccaattcaacggatacggatctcagcactttggacaaccacgagctctggctgcccgattccaggtgagctatcgagtttgcgagccagtgttgcagtgcaaattaccatatatattattcatgtttatgtagcataaaggagccaacgcccacgaccatgacggccttgcatcagttcggtgccgagatgctgaaactatcccgaggcctggagtcggtggcctcgtcatccaccaccggctcacccaccaaatccgaattttccctatcgaaccacctgcagctgcagtaccccagcagcccacagcgatatgccgccacccaccagcagtcccaccaccacaaccaccagcagcatccggccggagtttaccaccagcaggcatcgcccaaaggtcgccacggaaccacagttctgggtctgtccaccaccacgctgggcatcgagcgggagagcaccaggaattccctggccagcagtcgcatgggcggcgaacagagcgatgggtgagttcataaatagtaatataaataagtgagtccaaataatggggtctaaaaatatactatctaaaagtctggaagccaaccaaaattatggttacaattttctcaagatgtaatatgatgctcaaacataattaaattgcttcaccacttaaccagaatctctgttgtcacaaataatattaacacagacaattaaattcttttaactttatcccttttgcgggccacaattttcactagaattgtgtcaaatcccttgaaaagcatagacaattcgggcaggtaccttggaaaaacgtaaagttttcgtggctcttcacctgacaaaaggacaaacagctgcgatgggcaaaccgttttgccagagtgatcctttctagtcgctcgcaggaccttttgttgtcgctgtctcagccggttttcgagtgccagtactgcgcttggccaagtgtgctgaccacaccaaaagccaagaaaatgctcacctcgagtcctttttgtgactcgtttactttctccttttccatttatttagttttcttttttcgttagctcatttttgtggcattgccttttattgtccttccgccttcgacttgttgtgaaatttttcgtaataattaattttttttcgctacgttatcctttttctttgtgtcggtgcaaactgttttatttcttttttttggccaaaaggcagaggcactgcctttttatttggcattcgagccgctcaagtgattttggcgtcgactgaggccttttgccaaaatgtgtttttcattaatttcctaaatttagtctactggcttatgctgggataagtgatgcgacgagaaatttaattaaaaaattgagataatagaagacgaatatattttgaaattaccgagaatttaataagaactggaaacatggctaaactggcatattcaagtaaatagggcgcttcatgtttatgggcattcaggtggaactaatattaactatttaattgcgtatgatatgaaattctatggaagagcctggcaaattctaaaaatacttttattttaggcactcaacccaattcgatattgtacacgcattttattttgatttaattggttatcatatttagtctgcaaaatccatccaataaaagcatgaatttttcactgcaactgcgaacattgatatcttgaatcccccgttcgattttaagcttgaataaaaggcagctcaacttgcgaaatgactgcacattttatctcgctcatatttttcccatttaaccaatcccttatgcatgtttatatcatatatcattgtgactgtgcgcctttcagccaaatgcttggtattgggtattgggagcactatgtgccacattgtttgacagttgaacgaatttgcacaatcaataaaatggatttggctttggctccggcttcctattgtccgcaatggatgggatgccacttggcataaaggacgaaaagaaacgggacgaggtcaaagtcgagtggtttttaattgttgcacaatttgccgtctcatgcggcaaagttgacaaatgatgctggcgatattctaatttttgaacttggctgggagacttaaaatcagctcaacacttcgccacataagagtatatattatatgtatgtgtatgcgaaggcggtatcctgcgatgtcctgatgagcttggcagctgtttaattcctttgtgagggggaaacaataacaaagttggcatcagctcggctttgtttcacttgcataatgagtagctggccccaaataccacctccccactcccccattgcttagccctgttccaacgcatctcaatttatgcgcacgtctcgtgcaaacaaatcaaaaacgcgaaggatgcataatgagctgacatccttatcctgcgtcttggcagcaccgagcatcccgatccctgtcctccctgcagccaccaccacttggccttctgtctgctaacgccttcattagcagctaaccacgcccccaacgccaccgccccacaccgtcttggccaaataaagttggcgcgcatttgcatgcagggcaaaacgggcggcaggacagaaaaccgcaaaggcagctcgcaaatttatgcgctttattaaaatgaatgcaaaatgaggcggtacagaaaaaaaatcgatgtacaatatgtttatatataactttaaattaaagctacacatatgagctaagtatttctgcaattaataatataaaattaaaaaaaaaaaaaatcccgccagtaaagtacagtaagccgaactaacataccaaatataatatagtaaataataatgcaagaatttttcaagtgtaccacaaacaacggagcaagaaaaaatgttagaaggcggtaaaccacaaagagcaaacacaaaaaatgttgcctacttcccggcaaaacaggtgaaagaaacgagctgaccacaaagcgtgctggcttttgttcaattgccgttagcgagtgttcactgcattgttttaggcacctcaccttcgaatagagttttgccaattggctgcgcaattttaattaaaaatgtacgacgccgaaggggagaaggtgaaagaaaatggctcggcattgggtactaaatcaataaatcggtggggtatgacatagacatattttatatattttcattattaaaaccacatggttccttttgttctagtctgctttaatttgattcaggaaaatcgtttaatagaccacttttttaaaatgaaatgaaaataatcatttaaggactttgactgtagtatgtcattatatttatttaatcagtaaagttcttttcctttcaggactctttcacagctttcccaacgattgcgagcgtataaaaagcgacgaagagcttcgtcagctgttcctggacgtgagaaacgtgccgggcatgaggacgcagacgaggatgtggaaacgcccacgtcaacgctgcgccgccacaagcgccataacagtctgcccaagaacgcactctatccgcgacacaccactgtacaggagagcctcgatgacgacgacgacgaggaggaggagagcgcgcaacagaaggatcagcagacgaagtcgaagatctgccactcggacactgagctagatcctccgcagaaggcgaagcagtgccacatagccgggcagaatcatcagtcggactacctgcagctgccctcggtttgcacttgtccgtattttggggacagaccgctccagaattgtgtgaaatcggcggaggtgaagattatttcgtccgccttccgagtgaccaccaccacgacggcggtgagcagttcgcccagcgagatggagctactcatgtgcagtagtggcaataaaaagtcattgacctccagtgtgagtgccggcataacaggtggaccggcaggagcggctccagccacagttggctccaccctcagtccacactctgctcacaatcagggcagctcgctgacagttcagagcgatggtagtgggtacttggctgctccgggaactccttgtcctggccgacgaaagttgagcatctcaaagaccgcctcggtggtcacgtgggattcaagtcgtcatcgtcggcggggcagcagttttggcggagtgcgaacatccctgctgttgacgcccaccaaaacagcgaccacctccaactcatccacaccgttgagaagatcggccaccttgaggagtcaccagaatatgaactaccagggagcgggcgaatgtggtggcaagaccaggacgacaacatcctcaccctgcatgttgcagcgtcagcagacggtgcgatctcatcactcgcggaactccagcgtgatctccagaaactcctcgcgccacggcaggatcatcaggctggagcagaaggccaccaaggtgctgggagtggtgttctttacgttcgtaatcctctggtcgccattcttcgtcctcaatctcctgcccacggtgtgcgcggagtgcgaggaacgaattagccactgggtcttcgacgtggtcacctggctgggctacgctagctccatggtgaaccccatcttctacaccatcttcaacaaggtgttccggcaggcgttcaagaaggtcctgctgtgccgctattcgagcacgagtgcctggcgaccgagcagataacagacgcccgttaaaccgggcaaactgaagacgaatacccacaagtgcgccagtgtggattttcaggattccactgctccggtgcggggcgttctgaaaagaagtgtggcagtggcaagtgacatataaatacggcaaaggccggtcatttcgcctgcggtccaccgcacaacgtgtcgtatacgcaatctcgaaaggacgataatgcccacccgcactccacaccacgcactccgcactgctcacacgtgtgtccttggggcttaaattcttatgtgcctctaattaatttcaaattcaatttgcatgccattgaaaacacatgtcccaggcgtaagaagtggggccaagtgaattagatattgaagtggagtcggatccccgcaggattgccaagggtcggggattaaactagccacagacaacagcataacgagcatgctactcacccctggtggttccttccatttccctcagctctcagcaaacggtgaagatgcacttaattgcggaatgtttgctttcgagcaacgtaataccggcaaacacatttactttatagcaacgctcttcagttatcgacaaagttctggctcaccgaaagttcatgtcaatctgttgatatttgatagcattttccgcgaaattccttttagattcactacgtactcgaaaataaacttgaaaattcacgtaaatttaaagattgtatatataaagttcaacttttgaaattcttaaaaataaagcgccaatgtcgcttcgcaaacttcgatcgataaacgctatttggtttggcatttggcaattatgcattaaatttatggcaaattcactgcccgccaatgcacaaagaatttcatcggtatccattaaagaaaccgacacgtacacaaatccacggcaatttgtgacttttgttgtttgtttgtgtggttggaccggcagattgctatttttatttgaaaagttcattcattttgttttatttctgtggcca

SEQ ID NO: 17699 - DNA, 1251 bp, DROSOPHILA
atgaagaatcggttttttttttcttttacaggctactttcctttgggctcggagcactgcctcacctggatctgcctggatgtactcttctgcacggccagcatcatgcacctgtgcaccatctccgtggacagatatttatcgctacgatacccaatgcgatttggccggaataaaacacgtcggcgggtcactctcaaaattgttttcgtttggcttctgagcatcgccatgagcttgcccttgagcttgatgtactccaagaatcacgcctcggtgctggtgaatggaacttgccagataccggatccggtgtacaagctggtcggctccattgtatgcttctacattccactgggcgtgatgctgctgacatattgcctgaccgtccgacttttggcccggcagcgccagaatctgggtggtggacagcagacggcggcggccactcccggatgggccagtggatggctcggccaggcaccggccttgggtggaccggcaggagcggctccagccacagttggctccaccctcagtccacactctgctcacaatcagggcagctcgctgacagttcagagcgatggtagtgggtacttggctgctccgggaactccttgtcctggccgacgaaagttgagcatctcaaagaccgcctcggtggtcacgtgggattcaagtcgtcatcgtcggcggggcagcagttttggcggagtgcgaacatccctgctgttgacgcccaccaaaacagcgaccacctccaactcatccacaccgttgagaagatcggccaccttgaggagtcaccagaatatgaactaccagggagcgggcgaatgtggtggcaagaccaggacgacaacatcctcaccctgcatgttgcagcgtcagcagacggtgcgatctcatcactcgcggaactccagcgtgatctccagaaactcctcgcgccacggcaggatcatcaggctggagcagaaggccaccaaggtgctgggagtggtgttctttacgttcgtaatcctctggtcgccattcttcgtcctcaatctcctgcccacggtgtgcgcggagtgcgaggaacgaattagccactgggtcttcgacgtggtcacctggctgggctacgctagctccatggtgaaccccatcttctacaccatcttcaacaaggtgttccggcaggcgttcaagaaggtcctgctgtgccgctattcgagcacgagtgcctggcgaccgagcagataa

SEQ ID NO: 17700 - protein, 416 aa, DROSOPHILA
MKNRFFFSFTGYFPLGSEHCLTWICLDVLFCTASIMHLCTISVDRYLSLRYPMRFGRNKTRRRVTLKIVFVWLLSIAMSLPLSLMYSKNHASVLVNGTCQIPDPVYKLVGSIVCFYIPLGVMLLTYCLTVRLLARQRQNLGGGQQTAAATPGWASGWLGQAPALGGPAGAAPATVGSTLSPHSAHNQGSSLTVQSDGSGYLAAPGTPCPGRRKLSISKTASVVTWDSSRHRRRGSSFGGVRTSLLLTPTKTATTSNSSTPLRRSATLRSHQNMNYQGAGECGGKTRTTTSSPCMLQRQQTVRSHHSRNSSVISRNSSRHGRIIRLEQKATKVLGVVFFTFVILWSPFFVLNLLPTVCAECEERISHWVFDVVTWLGYASSMVNPIFYTIFNKVFRQAFKKVLLCRYSSTSAWRPSR

SEQ ID NO: 17701 - DNA, 2581 bp, DROSOPHILA
cttatatacaaacaaaatcggagtaaattacctcaaggtatcgtgcatcgaaaaatatcgttgatttatgcgttatttaaaatatggaacctaaacctattatagagagaatagttcgtaaggcttttaagtttgtacctcagcttttgttttgaagaattggtatgctggaataaatacatcattaaatggtttttcattaccttaaattttgctatcacgtatagattgaatctgattgataagatgggctcatgtaaccttttctgatgtttgaaatctctcctagaaatcttaaattttcttggaaactgcgatagtggcatgtaatatactttttataattggttaaatgtttataaacttgcacatgtgggtcttaatacatatcgactgacctttgtagtacatactcatagaaacactgataagagcataccggaagtctgtgtgtaatttgaagccatgattatatgttttcatatgtggtgtacggtgacttgttttcggctcatttgcacagattttcaattaaagccgcaactgctaactgaagtagagatcaaaacgattctcacagaaaagcggctttcgcccatctgataaatcaattaattaccgccaatgagccgtattagaatataagtaaacgatttcatttgcatatgcatatttattaatcatggaaatagattcttatttaaagggggcgcacctttgaatattgactataaatatttgaatattgactataaatatttggatagtagctgcgaaaatatcaggacacgtagataccgtagtttatgttctaaaaaaaaatatttcgaatcttaaaactattttttcacttattttgcctttctaagcaattttcttaaatattgtaaaccccgagtgaggttctggttattgatagttctgatgatgggccagtcaagtcttggatcgatggcatagagagcctattgtatttttccattgttgatctcccactgagatggcaggtataaaatgggccacatcgccgggtgttcatcagttctctcagagtcgtcgagcgagcaacatgaacgtagtaaaatctttgtgtattttgggtctggttctcgtcagcttgattgccacccaagcagccgatgagcaggtggtaggcggtgtcagccagttggagggaaacagcaggaaggaggctctggaacttctggatgccactctcgcacagttggccaccggagatggtcccagctacaagtgagttagaactgagttccgaatttaaaattcatactaattgatctgctgatcttagggcaatcaatgtgacctctgtgacgggtcaggtcgtagctggaagtcttaacacctacgaggtggaacttgacaatggatccgacaaaaagcagtgcaccgtgaagatctggactcagccatggctcaaggagaacggcaccaacatcaagatcaagtgctctggtgacgatggcgaactggaccgcacctggtagaagattcttcgtgagaattgccctgaaagaaataataataaaaaaaaaaacaagatacacgtgatttaaaaaatgatttttgattaattttcggggaactattgttgcaaagtatccaatatattgttgggaaaaataataggagtgtataaatacttgatttgctttgtttacgttccgtgctaaccaattcccatcgctaggcaattacacacatactatacatatacatatataagatactatatatttattgagataacaaccatagaagctttcactccaacaaaagctccagaagctgactcacaatcggaacggaacagagtgatatcatttcatgttttggttttggttttgttgagttttgctactatcgccgccatgtccaacgttccaattgtaggcgggatcagtcagctggaggggaatgagaggaaggaggctctggaactcctcgatgccaccctcgcacagttggccaacggagatggacccagctacaagtgagttaaggctaaactcggtctagagcttgccacttattaattgattttactccaattgaagggcacttaatgtaacctctgtgacgggtcaggtcgtagctggaagactcaacacctacgaggtgcagctggacaatggatccgagataaaacagggcactgtgcagatctggagtcgcgcatggctaaaggagaacggcaccaacatcaagatcaagttcccgggtgaggacgaactggaccacacctggtagaaggttttaccttagacctacatacagtttaactcttatcttaaatgttatacatatgttatatactggacttaattatagatacccttaggggggaaccatattcttgcgacctcaggtagcgtacagaagagagccttacctttactatctgggaggatttgtgtacatttggttacattaaaacatgatccgatggaaaaggttctcttgggtttcaggtacaagccggtgaagtaggttataaaactgttccgatgttggttaaccagttctgttggcataaccagtttgtttatatctcaatata

SEQ ID NO: 17702 - DNA, 523 bp, DROSOPHILA
atggcaggtataaaatgggccacatcgccgggtgttcatcagttctctcagagtcgtcgagcgagcaacatgaacgtagtaaaatctttgtgtattttgggtctggttctcgtcagcttgattgccacccaagcagccgatgagcaggtggtaggcggtgtcagccagttggagggaaacagcaggaaggaggctctggaacttctggatgccactctcgcacagttggccaccggagatggtcccagctacaaggcaatcaatgtgacctctgtgacgggtcaggtcgtagctggaagtcttaacacctacgaggtggaacttgacaatggatccgacaaaaagcagtgcaccgtgaagatctggactcagccatggctcaaggagaacggcaccaacatcaagatcaagtgctctggtgacgatggcgaactggaccgcacctggtagaagattcttcgtgagaattgccctgaaagaaataataataaaaaaaaaaacaagatacacgtgatttaaaaaa

SEQ ID NO: 17703 - protein, 149 aa, DROSOPHILA
MAGIKWATSPGVHQFSQSRRASNMNVVKSLCILGLVLVSLIATQAADEQVVGGVSQLEGNSRKEALELLDATLAQLATGDGPSYKAINVTSVTGQVVAGSLNTYEVELDNGSDKKQCTVKIWTQPWLKENGTNIKIKCSGDDGELDRTW

SEQ ID NO: 17704 - DNA, 3563 bp, DROSOPHILA
ttttgcgatcacttcgcttagataagacctattcccaattcccaattgccaatttccaagggtgacgtcttgcttaaagcctccggtctaggacaccactggcactttaagccataactgccagctgaatttgcaaccgggccaaaacatggccaacgatgggcagggtagcgaagggtagcatcgtgcttcgcaagctataaataattaattaattcagacgtagacgagtttaatgggtagggaaagggtaggtggggggaaaggggaggtgtttgtgagacgacagagcgttctatgcaaatttccgaatatagaccataaattcacaagccaaacgaagcccgatgaagccatcacttatgccctacctataactgcgctcagtgtacaatgtaccctatatatactgtacgcttatgctgccataattatatatgtgtatatatatatcggatactttgcggatattaagttgcggcaagttctctgaccaccgatggacttcaatggcgaccacgcccagccaactcgatggaaagtactttggaaaactgcttttagcgacagttttcgcttgcctttttcccggctttttctgaattccttttttttttttgctttttgtattctttaccgactggctttgctgctaaatccctgcttgctaacaaaatgtctattctattctattttaaccctgtaacgcagcttccgtttctggttttcgcaaagctgcaacggaaacattgcataactaaaaaatagctgctgtttacgagtagattgtttgtttattgtgtagtcatctccagctttggtccctttccccaactcgcccgttcactttgtatccctgtcagcagttcttaatttaataaagcgtagtatttaaattaattaacgagcagcgtagctcgcggtgtaaacgggcttacacaaaggtgcaaaatgatatcaaaaatctggtgcgagaaaagttgcggattcgcaggatgctttactggaacagttggtccttctggcggagcagtgatttgagatcccgggccagctggtcgtgttcatcctccaggcgatcgagcatcttgctaaggactttatgcgtgacgatcccgtgacagttgctcctgcacagttccatgatcttggccaggtggaccattcgctcccgctgcaactcctcctgcagctcaatctggtggcgcatctgctgtagatcgtcctcgtcgtacgatagcttctgggccaagatgcttctgcgataagtaagccaggtgttctgtagacatgccatcaccttatggcgataccacttgagcgccaccctctcgaatcttcgatccagagcctgtagttcccaaaaattacgaagcccaaatttctggaagcaggtttggaaaaatctcaaccgtttggattttccgcgccagcgtttcagacgctccaaggccttgtaggcaccaactatgaaccctctgactctctgttcagctttcatagtatccattgagagatcaggcatgtccatcacatccttcatcgtgccatccgagttgtagtatgccaagcactggacacgcagctgttctctacgcatcagcaatccctgaacagttgggtccgtaacgccaataggagaatggcattgggcactggctcgctcggcaggaacatccttatgaatcttctttggcggctttggcggcggaatcttcgatttatattttgattcgattgtgtttttcaaacgttcggccatttcctcaaagcaatccctcagatttttcacagcacttgatcggcggttgacctgatctatgacattggtgatcttgatgagtttctcttgggataaggaactggaggaatgggttcttccgctgtcaggtgcatcccgattgaatgtggagctcgatggatgctgcttatttctcgagagctcatactccaatagttcgactctcttcttcacagtgtgactatcagcaccatttggggactcgaagccagtccttggataaacttggctatccttcgagtcagaggatcgcgtatttgtttttcgtattattgtcacaatgctggcaaaactactggtcgtaggatcattttccgattgttcggaaacctccttgatgggttccagtttcctgggtcgtaaaatttgagtcgagcacttcttgagcagtgtaggtgatttgccagtagctaacttcttacatggctggcctctgtactcatccaaaattacgttcagattcctactgtagttacgcacatccgtgaacggttccttgagcactccaaagtccttcaagtggccatgcatgagcagcatcaggctatttcgggccaacttctcgctgagaggagccttctcgaatatctttatccatctggccatgatggggcgatccgactgcttagcccttgcctgatcggcatacttgtaactggctagctgctgcctgaaatggcgatccagtaactcctcgcttagatccttcatggccacattcgcatattcaaccggaatcaactgattttgttcccaaaaaatatttgtaattttaatgatttgaataaaatgaaaccgcttactcaaatcgggtaaggaaatgcggaaatataagtgggactagtggccttactcggcgactgtcaccaaacgtctctcaaccgcagaaaggggaggggggtcaaaagtggagctcagggtttctcagagatgcttcaagtggtgggcccacgtctggcaacaagcacaaggagcagcgacactacactttaaacaaagaatatcagagcttacttttcaaagaacttaatggattttcttgtcgaaacactcttacctggtgcgtctctacactacgtggactaaactggacttcacagtgatagcttttgcatttaccacttcatttaagaaaactgttgtgtattaatctaacaacatgttacctcccacaaatagtttaatgtcagtaatttgcttatggccatttcgaaacaatgaattattagtgtaacagcagtagcaacaaaacagtatgcggttgccacgtaaattttcattagcgcagcgcgcgtataaattaggaaaatgaagcagcagcagcggcagcaggcacttgagtgcaccgcaacctccatcaagatgccccctggtggggtgagtgggtggtggagtgggtggcggatgggcggcttaaccgcagcaacaacaacagcgaatgcgatgcgaacctacatacatacatacataggtgctgcggcttgtggcgaactgtgagcaaaagttgcaaacgaccgactgcctgcataaatttatattgttaaacatgagctagaaaaaagcacgcgcagcctgtcaaaagaaagcaaaaataaagagcaaagaaattgcctgacatgcaaaaagcggtttggaaaaagagtaaagtaaatgcataaagtacatagcaaaaatagaataccttcgtatagagctgagttcgcagcaatgccaaaaaaagacctcttacgcaaaaatataatatgaaaacactctctatttt

SEQ ID NO: 17705 - DNA, 1563 bp, DROSOPHILA
attttttgggaacaaaatcagttgattccggttgaatatgcgaatgtggccatgaaggatctaagcgaggagttactggatcgccatttcaggcagcagctagccagttacaagtatgccgatcaggcaagggctaagcagtcggatcgccccatcatggccagatggataaagatattcgagaaggctcctctcagcgagaagttggcccgaaatagcctgatgctgctcatgcatggccacttgaaggactttggagtgctcaaggaaccgttcacggatgtgcgtaactacagtaggaatctgaacgtaattttggatgagtacagaggccagccatgtaagaagttagctactggcaaatcacctacactgctcaagaagtgctcgactcaaattttacgacccaggaaactggaacccatcaaggaggtttccgaacaatcggaaaatgatcctacgaccagtagttttgccagcattgtgacaataatacgaaaaacaaatacgcgatcctctgactcgaaggatagccaagtttatccaaggactggcttcgagtccccaaatggtgctgatagtcacactgtgaagaagagagtcgaactattggagtatgagctctcgagaaataagcagcatccatcgagctccacattcaatcgggatgcacctgacagcggaagaacccattcctccagttccttatcccaagagaaactcatcaagatcaccaatgtcatagatcaggtcaaccgccgatcaagtgctgtgaaaaatctgagggattgctttgaggaaatggccgaacgtttgaaaaacacaatcgaatcaaaatataaatcgaagattccgccgccaaagccgccaaagaagattcataaggatgttcctgccgagcgagccagtgcccaatgccattctcctattggcgttacggacccaactgttcagggattgctgatgcgtagagaacagctgcgtgtccagtgcttggcatactacaactcggatggcacgatgaaggatgtgatggacatgcctgatctctcaatggatactatgaaagctgaacagagagtcagagggttcatagttggtgcctacaaggccttggagcgtctgaaacgctggcgcggaaaatccaaacggttgagatttttccaaacctgcttccagaaatttgggcttcgtaatttttgggaactacaggctctggatcgaagattcgagagggtggcgctcaagtggtatcgccataaggtgatggcatgtctacagaacacctggcttacttatcgcagaagcatcttggcccagaagctatcgtacgacgaggacgatctacagcagatgcgccaccagattgagctgcaggaggagttgcagcgggagcgaatggtccacctggccaagatcatggaactgtgcaggagcaactgtcacgggatcgtcacgcataaagtccttagcaagatgctcgatcgcctggaggatgaacacgaccagctggcccgggatctcaaatcactgctccgccagaaggaccaactgttccagtaa

SEQ ID NO: 17706 - protein, 503 aa, DROSOPHILA
MKDLSEELLDRHFRQQLASYKYADQARAKQSDRPIMARWIKIFEKAPLSEKLARNSLMLLMHGHLKDFGVLKEPFTDVRNYSRNLNVILDEYRGQPCKKLATGKSPTLLKKCSTQILRPRKLEPIKEVSEQSENDPTTSSFASIVTIIRKTNTRSSDSKDSQVYPRTGFESPNGADSHTVKKRVELLEYELSRNKQHPSSSTFNRDAPDSGRTHSSSSLSQEKLIKITNVIDQVNRRSSAVKNLRDCFEEMAERLKNTIESKYKSKIPPPKPPKKIHKDVPAERASAQCHSPIGVTDPTVQGLLMRREQLRVQCLAYYNSDGTMKDVMDMPDLSMDTMKAEQRVRGFIVGAYKALERLKRWRGKSKRLRFFQTCFQKFGLRNFWELQALDRRFERVALKWYRHKVMACLQNTWLTYRRSILAQKLSYDEDDLQQMRHQIELQEELQRERMVHLAKIMELCRSNCHGIVTHKVLSKMLDRLEDEHDQLARDLKSLLRQKDQLFQ

SEQ ID NO: 17707 - DNA, 5828 bp, DROSOPHILA
ctttgggcgaaattaatctgtatcaatggattgccaacaagaagccgctaaattgggattgtacatacataagtgcatatggaaatatagtggatgttaaaaacccccctttttaggttttatctgtgatacgatctttagaacgattagaaagcagcatagtaattttcatctcttcgccaaaattgaatgctttaatatggctataactattcccactagtttgataaacggttctgaaatcgaaaacatttgaaaagatagtatagtatatataccagacataaacttaatccttcaaatcgttcaacattcttcttatttcggcccccaatcttatagataccttatctccatatatcgaatcatagatcataccatagattatcttctgtaccatacattattattaataggtatgcgatagtttgtaactgcatggtaacagaacacaatcagttcatttatatgatatctcctaatatgactatgctttcatgattctatatcctcattataaataaaacataattcaatagtaggataacaataagatcagcgtgccattagagtccttaaatccgctctaagaactgagagccagtagagatgcaagtcccggttcccaggaccccatcatcccgtcgtgctcttccgttcccagaacatctcgatctgctggtagccgtgtgcccgcgaagctgaagaccaaaaactggacccaggcagctagacccagtcaaaaataaaaaaacagaaaaaagaagaaaaaatcgcaaagtaggggagaccacaccccgctgaatggaaaatcgtcgaatcgctgggcaagcggaaaagtcacacgcgccagcatgaaacgcacagagcggcgttcgcatgcgccgtcccgctcgcacggcgatagtggcggccgatggagcgatgcgattggtcgctgccagcgctgctgctgcgctgccgcctgcgccggtataaaaggacatcatcgccagtagccgagtcaattaagggcaaagactcgagcggtgagcgtgcggctctactcccatatatacatatatatatatatatatattcaacatcctaaccgatagaaaagtagcaacagcagcccagttatgtgcttgccaaatgcaattaacaactgattgatttggaaactcagcagcgataatcgagttgaaaatcaaccaaataatacactaaatggattgaaagtgtcgcagtggcaaaagtgttgttagctagttagtgtgtcttgtgtgctgttactgtgcgttccaaggattaaagtcgtggaggagaatggaacacgatagcttcgatgatcccattttcggggagttcggcggcgggccactcaatccactgggcgccaagccactgatgcccaccacaacggccatgcatcccgtgatgctgggcagtgtccacgagttgtgcagccaacagcagcagcagcagcagcagcaacgattgcccgactgcaacaccatactgccgaatggcggaggaggaggagcaggatctggcggcgctggaggatcgcccaactatgtgaccaagctggattttgtcaacaagatgggctgctactcgcccagccagaagtacgagtacattagtgcgccgcaaaaactggtggagcagcagcagcagcagcagcatcatcatcaacatcatcagcactacacggccacgcccccgcccagccacaatggcatcctgctgcacaagcaatcctcccagcagcaacagcagcagcagcaacagctggtgggcatcctggactatcatccgctcaatggcaagctggactactcctcgtcgcccaaagatcagtacgagccgcagcagctgcagcatctgtacggcggcagtccgcatcatctggaccatttggatcatggcagtgatggcttgctccaggactcctcgcccgtcatgatcaacggaggatccgctggtggcaagctaaagaagcccgatgagatgtgttcgcagttggaggcgggtggtgctggagttactccgccaagtagttcctccacggtggttaatggcaccaccaatggcactggcaacgccaactcctcctcctccgctggcgtcggcattcagggggcggcgggcacagcggggggcgtggcagctcctgcagccaaaaaggacggaagcagcagcaagaagaagggcgatcccaatggcatcaagaagaagaagacgaggtaagcggtcgaagctgctacgctgtcaattaatttaacgacgggaaatcaatgaaattatgtggcacaagatgatagcacttgctatttatgaccgtgaccacggggcgtatgagtaatttggagtaaggacattgctagcaactcgcacggaaacccgtgcaatctggggggctaattattaaataatgagtaccgatagcagatagatagatccacagaacatggttatctctatagaattttctaatattctaaaatatagtttcagtttagaacttttttgtaatataaatagatactatgggttttttcatttttccctttttttaatccctattatatgaccaactaactgtatgaatcccattcagactttcatctaatcctctatactttccatttttaccttcagaaccacctttactgcctaccagctggaggagttggagcgtgcctttgaacgtgctccgtatccggatgttttcgcccgcgaggagctggccatcaagctgaatctgagcgaatcccgtgtgcaggtgtggttccagaaccgacgggccaagtggcgcaagcacgagccaccgcgcaagacgggctacatcaagacgagcactccgccgacggcgacactgaatcccggaaccctagccccaccattcactagctacccgcagacgacgacggtcacgccgccgggcagcatggacagctggaccagctaccagacgccctacgaactgacgccccagttcagcctgctctcgccggcggccagtccgtatggcacctattccggccagtacggtgcctatgtgcacgaaagccagctcttcccgatgcgtcactacgagtacggtagtcccacgcgcatggaaatgggcgccacaaccggttcggtggccggaaacggagatgagtcggtggccaatggcggcagctatcagacggcggaactgcagaccgcccagcagcagcaactggccgacggcacactggtcaccgtccatgcccaccaacagcagcagcagcagcagcagcaactcaatggcaagtacctgagcgccgaggaggccaaatacgtgcacctgcagtgccatcagagtggaggtggtctggagctaagtcccggcgccagctgtcatctggtggaggcgcagggccagcactatgtgaccacggcgacgggaggagctgcatccgcgggcggcaccagcagcgatgacaacgacagcggcggcatgcagactgtgatcaagagcgaggaggtctcccaacagcagcagcagcagcagggacagagctacgtcctgccgccttttttgcactgagagaaatgctcacacaccggcgacagcaacaacaccagcgacgctgggccacgcccatcagcacgccgaacgcccgtttccgtcggccattttgaagggatggaggcgtggcgtgtgcagcatttccaactgtgtttctccgactgaaagtggggctccagaaaagcggattcccaaagataaagcctcataagtagtagaattcatcatcggattacttaaaactagttgctttcaaaaaatttggcgagagtccacaaattttatatttaatttgataatattgtttttttagtttatatttccaatcccttggagtttttctagccagtcccacacagtttctagccactgttttcatattgccataggttccttttaggtttaatgacgcaagttgcaacaacaacgggaatccacaagtcttgccaaatcataatgaggttattatgcctgtctaagtctaggttaatctagggctaggggctctgcaacgagagccccgcccccagaatgcattccaaatgtgccttaccaaaacgggtgacgagtgacctccctccaaattggaaagcttcgttgcccaacaaacttagttttagttattctactcgtagactaagttccatttgctgtttttgctgtagttagacaataaagtgctttttatattgtatactagctcatttggctttacaaattttattacttactaattttgtaaaatggcttgcaaattttgttacaactacattcaatttagtttaatttctaattgtaagcaattacataaactaggacactttgcaaatgtatataatagacgtataaataaatcgtattttgtaccaataattgatcagcttccaattcaaaaaaggaacaacataaaagactcataaaaacaaaactgatggttaatacacttgttttcgaagacaagtattaaaagtaatgcatagaaaataatatagcagattcacaacataattaatcgctatggagcgacttcagattctttgaaagtaatcaaaatcaatgccaatcagaactgagcaaggaatcacaaatgggatttcaggtacagtacgaaataagaaaatactttacggactcaatagcaaagcaaatagtgcctattttcacatggactcagttccctgctccaaaaccgcctgccaatcgatgcctttgaagaatggatgagcctgcaattggtcgtagtccaaacgtagctccggagaaagctgcagcagttgctccagcagatccttggcatgatcggaaatctccaacgactcactaggatactgaacacaaccatagaggtccagttgcccgggatgcgtgactttgtagggctggaaagaaagcagattgctattatccaaacattttcaatcgagaactcaaaacttacaactcccagcagaagctgatagagcaccacgccgtagctccaccagtccgagcgaaaagtgagcggtctttctggtgccacaaagtgattagccactgcctccaagttcagtgccttgtgcacatagttgtcgtccgaggttagaccctcgttctgatagaaatacgtcaggagcagctgtcccttggcgcccagtaaaatgttgcccatgtgcagatcgcgcagaataacgcccttgccgtgcagactgtgtatggcgatggccagttcgcaagcccactgacgcaggcactgctccggaatgggtttacttcggatgcgattttgatccacctttttatttcttttgggtgtaacgactcccgcttgcaaattgctcagcgtgtttgttacggactttaaaagctgctgggagctgcgaaccaaatcgctgacatcgctgtccgaagtcagaggtggctcctctgcctccttctcctccggctcctggtccgagggaaaaagctctccataattgacactcttactactcgtgggcgtgtagctctgcaggtaatcgtacaacatgccgccctccgcctgccgcagtagcagaaaaatcttctgctccgactgaaagtaggccagcagttggaccatgtaaggcacctgctggggcagaaagatgctctgggtcagcgagtgactggccggcttctcgacgcccttcataatggcagccggctgctgggatttcgtcacacactgcacctgcatcacacggtcctggagaatctgcagcaccttgtagcgtgccaactgattccaggggcactccaaatggctcacgctaccgccgtctgtcgt

SEQ ID NO: 17708 - DNA, 3413 bp, DROSOPHILA
gagtcaattaagggcaaagactcgagcggtgagcgtgcggctctactcccatatatacatatatatatatatatatattcaacatcctaaccgatagaaaagtagcaacagcagcccagttatgtgcttgccaaatgcaattaacaactgattgatttggaaactcagcagcgataatcgagttgaaaatcaaccaaataatacactaaatggattgaaagtgtcgcagtggcaaaagtgttgttagctagttagtgtgtcttgtgtgctgttactgtgcgttccaaggattaaagtcgtggaggagaatggaacacgatagcttcgatgatcccattttcggggagttcggcggcgggccactcaatccactgggcgccaagccactgatgcccaccacaacggccatgcatcccgtgatgctgggcagtgtccacgagttgtgcagccaacagcagcagcagcagcagcagcaacgattgcccgactgcaacaccatactgccgaatggcggaggaggaggagcaggatctggcggcgctggaggatcgcccaactatgtgaccaagctggattttgtcaacaagatgggctgctactcgcccagccagaagtacgagtacattagtgcgccgcaaaaactggtggagcagcagcagcagcagcagcatcatcatcaacatcatcagcactacacggccacgcccccgcccagccacaatggcatcctgctgcacaagcaatcctcccagcagcaacagcagcagcagcaacagctggtgggcatcctggactatcatccgctcaatggcaagctggactactcctcgtcgcccaaagatcagtacgagccgcagcagctgcagcatctgtacggcggcagtccgcatcatctggaccatttggatcatggcagtgatggcttgctccaggactcctcgcccgtcatgatcaacggaggatccgctggtggcaagctaaagaagcccgatgagatgtgttcgcagttggaggcgggtggtgctggagttactccgccaagtagttcctccacggtggttaatggcaccaccaatggcactggcaacgccaactcctcctcctccgctggcgtcggcattcagggggcggcgggcacagcggggggcgtggcagctcctgcagccaaaaaggacggaagcagcagcaagaagaagggcgatcccaatggcatcaagaagaagaagacgagaaccacctttactgcctaccagctggaggagttggagcgtgcctttgaacgtgctccgtatccggatgttttcgcccgcgaggagctggccatcaagctgaatctgagcgaatcccgtgtgcaggtgtggttccagaaccgacgggccaagtggcgcaagcacgagccaccgcgcaagacgggctacatcaagacgagcactccgccgacggcgacactgaatcccggaaccctagccccaccattcactagctacccgcagacgacgacggtcacgccgccgggcagcatggacagctggaccagctaccagacgccctacgaactgacgccccagttcagcctgctctcgccggcggccagtccgtatggcacctattccggccagtacggtgcctatgtgcacgaaagccagctcttcccgatgcgtcactacgagtacggtagtcccacgcgcatggaaatgggcgccacaaccggttcggtggccggaaacggagatgagtcggtggccaatggcggcagctatcagacggcggaactgcagaccgcccagcagcagcaactggccgacggcacactggtcaccgtccatgcccaccaacagcagcagcagcagcagcagcaactcaatggcaagtacctgagcgccgaggaggccaaatacgtgcacctgcagtgccatcagagtggaggtggtctggagctaagtcccggcgccagctgtcatctggtggaggcgcagggccagcactatgtgaccacggcgacgggaggagctgcatccgcgggcggcaccagcagcgatgacaacgacagcggcggcatgcagactgtgatcaagagcgaggaggtctcccaacagcagcagcagcagcagggacagagctacgtcctgccgccttttttgcactgagagaaatgctcacacaccggcgacagcaacaacaccagcgacgctgggccacgcccatcagcacgccgaacgcccgtttccgtcggccattttgaagggatggaggcgtggcgtgtgcagcatttccaactgtgtttctccgactgaaagtggggctccagaaaagcggattcccaaagataaagcctcataagtagtagaattcatcatcggattacttaaaactagttgctttcaaaaaatttggcgagagtccacaaattttatatttaatttgataatattgtttttttagtttatatttccaatcccttggagtttttctagccagtcccacacagtttctagccactgttttcatattgccataggttccttttaggtttaatgacgcaagttgcaacaacaacgggaatccacaagtcttgccaaatcataatgaggttattatgcctgtctaagtctaggttaatctagggctaggggctctgcaacgagagccccgcccccagaatgcattccaaatgtgccttaccaaaacgggtgacgagtgacctccctccaaattggaaagcttcgttgcccaacaaacttagttttagttattctactcgtagactaagttccatttgctgtttttgctgtagttagacaataaagtgctttttatattgtatactagctcatttggctttacaaattttattacttactaattttgtaaaatggcttgcaaattttgttacaactacattcaatttagtttaatttctaattgtaagcaattacataaactaggacactttgcaaatgtatataatagacgtataaataaatcgtattttgtaccaataattgatcagcttccaattcaaaaaaggaacaacataaaagactcataaaaacaaaactgatggttaatacacttgttttcgaagacaagtattaaaagtaatgcatagaaaataatatagcagattcacaacataattaatcgctatggagcgacttcagattctttgaaagtaatcaaaatcaatgccaatcagaactgagcaaggaatcacaaatgggatttcaggtacagtacgaaataagaaaatactttacggactcaatagcaaagcaaatagtgcctattttcacatggactcagttccctgctccaaaaccgcctgccaatcgatgcctttgaagaatggatgagcctgcaattggtcgtagtccaaacgtagctccggagaaagctgcagcagttgctccagc

SEQ ID NO: 17709 - protein, 612 aa, DROSOPHILA
MEHDSFDDPIFGEFGGGPLNPLGAKPLMPTTTAMHPVMLGSVHELCSQQQQQQQQQRLPDCNTILPNGGGGGAGSGGAGGSPNYVTKLDFVNKMGCYSPSQKYEYISAPQKLVEQQQQQQHHHQHHQHYTATPPPSHNGILLHKQSSQQQQQQQQQLVGILDYHPLNGKLDYSSSPKDQYEPQQLQHLYGGSPHHLDHLDHGSDGLLQDSSPVMINGGSAGGKLKKPDEMCSQLEAGGAGVTPPSSSSTVVNGTTNGTGNANSSSSAGVGIQGAAGTAGGVAAPAAKKDGSSSKKKGDPNGIKKKKTRTTFTAYQLEELERAFERAPYPDVFAREELAIKLNLSESRVQVWFQNRRAKWRKHEPPRKTGYIKTSTPPTATLNPGTLAPPFTSYPQTTTVTPPGSMDSWTSYQTPYELTPQFSLLSPAASPYGTYSGQYGAYVHESQLFPMRHYEYGSPTRMEMGATTGSVAGNGDESVANGGSYQTAELQTAQQQQLADGTLVTVHAHQQQQQQQQQLNGKYLSAEEAKYVHLQCHQSGGGLELSPGASCHLVEAQGQHYVTTATGGAASAGGTSSDDNDSGGMQTVIKSEEVSQQQQQQQGQSYVLPPFLH

SEQ ID NO: 17710 - DNA, 2702 bp, DROSOPHILA
ttaaaagcatttgtgttatttccaatgtgataataaatttgaaaatatatgtagcttttatactcattaaactacccctttgactttgactcactttgtacaatttatcgtatctatatctcaaaccaaataaattgcgaatcgaaagagttttacacctcgttaattggctgttcaaatagaaatgtaactattttgattgccttcactgtggcgcaatggcaattggcaaccgatgtttgtatggcaactggcgaagcaataaaaccgagcaaatgaaatttgtattcactttatataattttgacgatttttcaaatcaaatacagacgcacacacgaaccgcacatataaaagtcggatgtgccagacatatatgtacatatgttagaaagattcccttttttcgaaacgaacacaatcatgtgcaaacgtgtttttcaaatggattacatgaataaaagatttatacacgtaaggtaaatcagtagcgcgttaccaagatactaaccgacatcctgccctacccgtgctccttcgtactcctccataggactcctccttagtactcctaccccagttttccccatccacaacaactccctattcccaactgaagacgtgcaagtgaaaatatgcgcagatgtaagcaaatttgaggaacgacggagggcaaaatgtgctggaaaagaggaaaacgcaaacggaaaatcccacagaacctggctaaaggtagatgatgcctcttgccatttattgatttgtttatcattttatgtatttatgccgctttgatttcaggcgccaaaacgaatcaagcgcgagggaaaatagaacattgccaactggattattccgagcacacacacaaacaggacatgaaaatattcacagcgaggtctttgagttttgtatttagataacattttagttggcacttttcgagttgacagttatttattgcatttcgatatttgttatatttatacaaggattgtttattaataatcttaaagaattatctaaaggtgggccaattttcaatttcaaaagaaagctatagattttagttataaatctaaggaacattaatttcacaagggacactttaaatgttatattagttgtagcaattgcaatcactttgagtaatattttttttacatttaccaaacaaaaaagttattaatttcttatactcagcttacgtttgtaaatccaatcacactgcttctagtaagtggaacattgctgccactgtacacaagcccggaatagctacaaattcacctagtattccggttggcccgcagcagcaggattcaccgccctagatacgagtagtatggatacgtggcgtatgcgccataaaccggtgcatacgcatacgccgcgtaggccggatagctggcatacgccggatagtaagcggcggaggagggagccagccaagaggcacccgctccggtggcataactcactggcgtcgtgaccaacagctggggcttcgcctggctcagggccacgagccacaatgcgaactggcaggattattgataggtttgaaatatatccacaaatccatatatccacagttcggcgcactcaccatcaagaccttgaccaacatgactcccattcgattactgctcctgcggactggctggctggctggctggctttgcgaaacgaaactcaaaatttcactgctcgattggccgggctagtcaatcatatttatagcctttggctggagggcagggcatcggatcacatcggatcggcccagagaatcgttgagaaccgggcagagagtcggagcagttgggccatcattaatattgctagacctgagtgcgctgagtggcataaattatattcttaatgctatttgaaattgccgagaaagaataaatataagacaacgactaataagcgtctcaaattgatgaaattcccgtgtactctgtcggtcataaaatggttattaaaaagtgattgaaaaaaaattatttcgaaattttgatgatcaagaagaaaatacaaagatgttgtcataaaattgcaacaaacataaatatacgattaaaaattgtagaattaatttggaaagtaatcagttaatccttgcttgatttagtagaagacttagagtaatatgcaataaggaaatctagaacaaacattttatacataacactgatataataattcattatacaataaaggggtacatgattaaccagttttatcaatttaaaaacgataaagctaagataagaaatcaatggatacctattctttcgataacttccctttcgctttcgcagcctcaactttctccatatttagcaccatttccggctgcgtcacaaagtttgccaaacaccaaacgattccgcagccgcatttgataccctttgtttcacaattgatggctagcagcgaatgtcgcgccgccttctttggacagccattcattactacaggtagaaccgccctacctgagtcaccaaatacccctctctcccaacctccctcaaaagctggcactttgcataaaatatttgcgtttacttagacgttgtaaaaattataattatgtgtgcgtgcctgacatgcatccccatgcattatgaaatgggggattgaaacgaaaccatattttgcgatcacttcgcttagataagacctattcccaa

SEQ ID NO: 17711 - DNA, 634 bp, DROSOPHILA
attttgagtttcgtttcgcaaagccagccagccagccagccagtccgcaggagcagtaatcgaatgggagtcatgttggtcaaggtcttgatgttcgcattgtggctcgtggccctgagccaggcgaagccccagctgttggtcacgacgccagtgagttatgccaccggagcgggtgcctcttggctggctccctcctccgccgcttactatccggcgtatgccagctatccggcctacgcggcgtatgcgtatgcaccggtttatggcgcatacgccacgtatccatactactcgtatctagggcggtgaatcctgctgctgcgggccaaccggaatactaggtgaatttgtagctattccgggcttgtgtacagtggcagcaatgttccacttactagaagcagtgtgattggatttacaaacgtaagctgagtataagaaattaataacttttttgtttggtaaatgtaaaaaaaatattactcaaagtgattgcaattgctacaactaatataacatttaaagtgtcccttgtgaaattaatgttccttagatttataactaaaatctatagctttcttttgaaattgaaaattggcccacctttagataattctttaagattattaat

SEQ ID NO: 17712 - protein, 82 aa, DROSOPHILA
MGVMLVKVLMFALWLVALSQAKPQLLVTTPVSYATGAGASWLAPSSAAYYPAYASYPAYAAYAYAPVYGAYATYPYYSYLGR

SEQ ID NO: 17713 - DNA, 10505 bp, DROSOPHILA
aacatgagtggttaattatcatgagctacattccgccattagatcattacacacagccattactaaaatctgaacttttatatctagataaattagataataacattcacatatcaatttcgtatcattttacatgtcatgaatcataatatggagattcagtttgaaaagcatgtggacgtttgattccgctgaaaaggatatattgaaaaatatatatacttatacaataatgtttatctgcgatttgagcatatatgtaaatatatttttaatacatgtaccaagtgatcttgcaaaaatgaacttctaatttgactgatcacctggttatgtcattcttaaccttcatttagatgccaaattatattttatagcctcgggtgatattttttctttgcgtgtttccgtatcccacttaccaccattcctcgttgtctgttgccaggattgttgctgttgtcactcccgccccctccagttgttgtccttgttgctactcccgacacttcctgggcgaggacaatgcactgccttgacttttgatggggcaggaggaggaaggcggatctggagacggagccggggagctgggctgttgtcactccttgggctcatgttttgttttcgtgtctctttgtgaaggccatcatggtggttatgtaataacagtgccgaccataggccgaaattgggtaaagttagatttatatctcgtggcgtttgctgtgtgattactcatacgccctgtggcaggagcaaacagagtagtagcgacgctaggagtcagcgacacttgcccaaattgagcactcgttttggttttgggccatggcgcctttttcctttcctgccttccgtgcccttcgtgcggcttcgtcatcacaaccggacggattcgtgttcggctgacgaaccggatcgcagatacttcggccgttggctttttcgacttccatggcatctggtcgttaggccagccgttcattcggcaacgaacccccgacatagaagcacgtcagcatgtggcacaaccggagaaagtaggaaaaacaaacggagtagaggaaaagcccaacaaaaaaaaaaaacgaacgacggccagggaaaaatgccaaaaaacctggtgggaaagttcctaaccattctgttgagacgcaaggagtgctaggatcaagtgtttgtgtaagcaacgaggcctgtacagtgtacacatgtacatatataccatcgcaacatagacaaactggcgctggactgtctggcgccagagtttggggttgtgatggttccattcggggaaatggttcctttgtctgaggaaagtgcacttttcagggctcgatcacatatacgtaaatggacgattcacttgcccgatggacagtgttaattaaattttcatcagcagaaactttcgagtcattcaatcgataggagaagttacataaattaggagggggtaatcgatttagcaaggtcacagacaaattgactccggcttttactcactccccgacttttcatttttacccctcgaatagccatcaagatgatgtcggaatactggattatctcggcccctggcgacaagacctgccagcagacgtacgacacgatgaacaatctgaccagcaagcaacacaacctgtgcaataactacaagttccatattccagatcttaaggtaagtttattgtatagttacgtaactgaagtgcaatatatttgtgtgtattcataccaacatctaaccactattattaaatctttaaaggtgggcaccctcgaccaactggtgggcctctccgacgatctgggcaaactggacacctatgtggagcagatcacccgcaaggtggccaactatctgggcgaggtgctcgaggatcagcgggacaagctgcacgagaacctgatggccaacaacagtaagtcgtctgcctgccaccacttaagttgtattagcctagcttagtctagcttagcttagttccgtttagtttagtttagtttagttttagttgacgtggttaggtgatgcctgtcccgagtcacgaatctatatcgttttggttctttagttatttctaagcagttcttctgaccgtagtcacttttgaatcggaatgctcagatataatcgtaccatgtgtattgcccatatctattgtttacccacaactattctgtactaactaacaaacaaaagtgagaccttaatcgaaatccacctttcccagccatcgaggggctgcaaagaactcggttactatggaatgttttgatctatctatgtctctatgtgagaaaagcccaacctgactaacacgaataccgtctatttcaatcatgactttaatatacccttccagtagttcaagattatgcgagaaacagatttaaaaactaatcgattttcagccgaagcccttcggcgctacatatatttggttcgagtttctagtttctaggcctttttaattttttcgttctctaacatttattttcctttacactcctgggtttcttttgatttttgatttgatccgtttcgtttacgttatcttttgatttctattgaactcatgcgcacaatcatcaccactgaaaaaaataaggatatttcgtaggcatctaactcaagttgatctaaaaagatacagtgccatcaaacaacaatggaatttaactttgcggaccaaaaaaaaaaaactacaaaatagttgaaattgtaacgaagagaaaaaagaaatgttgaaattagccgaatgggaatttgcgttgtttattttgtgttgcgtttgttgtacaatttaatgcgcaccgaactcacacactatataaatctaaaactattctatactatgccagctaaacaacacacacagatacacacacacaccagcgtatttttggccccattcaagggcgcccaagtccccggtcaactactccattgcgttggtcgaaggtcgcccctgaaaataaaatatatacatatataatatatcaaaaaccatgacaaacaatagaaatacactcattcacacacgctgaaggagtacagtgaacactttgtatattttacatgaattgttgtacgtttcttttcggttttcaatacaattgagttggacaagttatttgtggttttccgtcatttgaaagcccattagtttttaaatcattcaccgcaaaaaaaaatagaacgataaaaaagatacaatgaagacgaaggaaagctaatttgtaaagatatagaaccataaactgcatatataaaaatctatatatatataaatacttgactatgaacttttgcgcgagtgtcgttccctcatacatatttcttaatttttatttcgagtttacatgtactatgatttgtataaataactttgtaagtgcgagcgtcttaaagttgcccgacttttgtactgtacatatatgttttaactatatagactgttgtaattgttgtctgtgtgtgtgcgcgtgtgtgcctgattgcagtgtgtgtgcgtgtgtgtatctgtgttgtctcatttcctcacctgcatcgaatcgcttggaaaaacgcttctttctgtaccatttttcacccgaaaaacccactcacacacacagccaaagtgcggagatgcacctcaaaggacctttttccgccgaacgagtgtgtgtgtgtgcgtgcgtgtgggtgggcgggagtcagtgtgtctgtgtgtgtgtacctctgcacctgttcatacgcctttcacatccaccgcaattcgctaattgggaaagatgggagatactcgcaattagagctaattggtaaagtgtggagcacacaaaaaaaatcgacaaagaaacgcttttacactgcaaacaaaataatcgagtaccagaaaacgcccaaaatgaaagcacaaaatgagacgcaaacatctatcagccctgggatcactgaattcccccaattacatattttttgttccactgttgttcatgggatgccattcacttccgtttccttttcgcacacatatatacatatttcaaaaaaaaaaaccaaaacccaataagcacacatgagtttcaagttaattacatttttcccatatgatttcccttatttatttatacgatatttacaaacgataagtataattttggttttgcttttggttgatggatcgtaacgatcgtaacgatgattacccagatttcttcggttttagagttatgatagcagttgatcgtgatagtagataggcagagcgtgaggtttagcccctaaatgtatgctacatagttttacttataatttatttcgaccgtcccgcccggaaattgagccgaaccaatcggaagggaaaccctagctaagactaagtctgcaaccgaatctaaatgccttgtgttgtattgtctgtatcggtaatcgaatcgccaacaacaaatcaaaaacgacaccaaaacatcatctcaaaaccgaaacccgatcgccatccgaatgaatcctgtgaaccgccccaaattccggcacgcgaaccccgaacgaatcttgcgcggatgcaggtcctgggccacctgacgacagcatgccgtgtcgccaccaccagcgcatcaagcatctcagtctgcgacaccagcgaaaacaccagcacacgcaccaccaaaacaaaccccaacactaccatcaccaccaccatcaccaccagctgccgcaggatctcaagggtaaatccgcagccacctgttctcccgccactcctcctgcgcctgcgtctgcaccaccccatcttccgcctgcctgtgcctgcgatgtccttgcgcctggatccttaaccggcggtagcctaactaacctgtccacgagtcacgagccggagccggagtttgacgtctgtccgtgcgatgagtgcttcgcctgtgccccgcccagcacaagtgccacggccagcacgctactggcggatgagtgctactcccagactgcctcctccatgctcagtgccacacggtgtgcactgtccacggtggcggcgatagccactggtagcggtttgggcaatggcccgagcaccagtgccgcagccgctgcagctgcatccaactcctccggcggtggaggtggaggggggcccgcctcctgctcgacgctctgctcctcggcatacttctccacgtcggcgcccacgaccagcagctcggtacacagcagcatgtcccgctctaacagcaagcggctgaataacaacacttgcagcatcaacaataacaagctcagcttccgcagcggcagccatgtgagccagctgcatttggccacgcagcagccgcagcatcatcattcgcatccgcatcagcaaccgcataccaatccgctgcagtcgcccgtacaaaagtccatgtcggaggacgagggcgatgcgtcaaatgcccacgaagatggggaaacggacgaggaccccaagagtccgcacagtgtgcagtccgatctgtcggacgccttcgactggtggttcaataagcccaagcgtaactctaagaagagcaggtatcttatcatcgcattacctactttgtagaacgttgccaaatcgccagcaccccagacaaaaaaaaataaaaagaaaaaaaaaaacccaacaaaaaccagaatataaaagccagtcacccgctgtcatcccgctaaagctaagccaaatgaacaccacctccacaaccaccacccaacttatacaaaagccttacaccaaacacgctgtaaaaacacaagatacaacaccacacacactgaaaacaatggcgcacccgctttgcctgccctcatccaaaaactaaaaaaccaaaccaaacaccacaccacaccagcaatatgaaacccagaaaatccatatatgtttgagttgattaagaaccaagaaccgagtcaagtgcaataataatgtatttcttttttaaatcactccccatcgaccatcgcacacattcgcatttgaccaccccatgatcaccatcaccatcgtcatttcgccactcgcaattcacattgacagtgcacaacagcaacacgagacagcacagctgcaacaccaacagacgacacagcaacatgcaacaccactgaccccacagaaccacaatcaataccaaaaccaacacctatccaaagcaatgacattttggcatcaagcatcgaccacaccgcgctctagttatcgctctttcttcaattctcttgccgatcaaatttatagcaaacgttctacaccgagtcaattaaatataaacaatggatttaatttaacaccaacacatagatcgtctccagtgagtagttgttgtggcagtagtagccaggggcgatccagtccggacacggatcccgccgagccgcccgagtttccgctgagtccaggttagcatgccccgggttggtctcgttcccattcgaaccgaaccgacccaatccctcttctagttacatatatcgtctatgcagatctcttgatctcgacgttgacatatatacctactatgtgtgtacatgttgatgttaccgttgctcttccgtttccgtttcctttcgtttccttttagttcatcattattttctctgattatgatctgatctgattctgatttctccttattgtttcttgagcaacttgatgtttcccgacaccaccacctatctgaaccactccaccttctttgatcgtcgtccactgtcgggagttaactgcaaacgcagacgagttcccgtttccgtttccgtgttcagtttcgatctttttgttaacgcaaatatttctcccagtgatcgtatcgaagttcttccttctttcgccacttttgatttgcctttctctactttctctgtggtatttgcaaacgccttttgtttgcgctttcgttttgctttcccgcgatttgactatgaatatttcagtgtatatgaacacacggatctggtgattatttgtaccagtgtaaaagtgaaaaagcgattatgttgttctttcagtgtacgctcaccaaatcaccaaatgttgttctgcgctccacatcattacagccacgactaacgccgattcccattaagctatatactactcagtcagctatgtcacctcaaaaacaaaaataaaaatcacgataataatttctaaaactgcggctttgcccagcgccaaatgttgatcaatctctgagttcctgttcgctttgttttcgcattatactttcgtatcttgagtgtctatatacatatatatatacttatcacacagcattatgttttcaaaatccagctaacgtgttgtgccgtatgacacgcaaggtatttccaattgcgactaatatgcgtagtccaaaattcctcgttatccccgtagcctatgtaaatgcatcctaaaatttatagttattcaatgttccttgttaatataatccttatgtgtatcctgtacgtgtgtgtgtgtatgtgtgtgcctgtgtgtctgagtaaattaatgtcatttatatgtgcgtaataactaactaatcagcatttttcagttaccttatttactttacttatacttgtataactctaatttaaaatagctttcgagcctagtttccttcaaactaattcaatacgatttttagatcaattacaattactatgtatttttttcaatttcgttttgtacttaaacattaattgaacaaccagtttgttcagctagtcaactaagaaaattagcgtatttcgtgccagtcagatttaactaataccgatattccattgcatcgatcatcaatagccgaactaccccagtacttgacccgcttccaatgggacatggccaagtatccgatcaagcagtcgctgcgcaacatcgccgacattatctccaagcagatcggtcagatcgatggcgatttgaagaccaagtcgcaggcctataacaacctcaagggaaatctgcagaatctggaaaagaagaagacgtaagtgacgataaataagtattttaacattatagatattcatataatactccgcgctttgtagtggcagtctgctgaccaggaatctggctgatttggtcaagaaggagcacttcatcctggactcggagtacctgaccaccctgctggtcattgtacccaagtgagtgacatacatactattccattataaactgatgatatttatcataacttcacgcacagggtcatggctaatgactggctgaccaactacgagaagatcaccgacatgatcgtgccccgctcgtcgcagctcatccaggaggacgccgactactgcctgttcaacgtgacgctcttcaagaaggttgccgaggagtttaagctgcatgcccgcgagcgcaagttcattgtgcgcgactttgtgtacaacgaggaggagctggctgccggcaagaacgagatgaccaagctgatgacggacaagaagaagcagtttgtgtgtagcccactgagagcgtgtgccattggaaatctgttctaatctcgaatccattgcagggtcctttggttcgttggctgaaggtgaacttcagcgaggccttctgcgccctcatccacgtcaaggcgctgcgcgtgtttgtggaatccgtgctgaggtatatcaccaagttattgccataatgcaatgttttatatgtaatttgtgaacccacagatacggactgcctgttaacttccaggccatcttgatcgagcccaacaagaagagcgtgaagcgtctgcgcgatgtgctcaaccagctgtatggtcacttggatggcgcctccgccggcggtgctgtcagcagtgctgatgtgggttacactcgatacctaataaaattatcacccaaactgacatgatttcattccattctctccacagaacgtagacatccccggcctgggctttggccagtccgaatacttcccctatgtgttctacaaggtcaacatcgatatggtggagcaggccaaggtctaagatcgcccgtcgcccccaacattgcatacatccagccacacaaaatacactttaatacaaaagaaaaaaaaaacaaccaacttaaaaatcagctgaaccattcgcagacatctaatgaaacaaaattaatagattactttaaataattttagtcattgttatctaattattgttgttatttatgttgcgcgttgccgatatctgtttcaaatctacttccggttcgagaaatcgaggcgcgcccaaatcaaccgaaataagtccttaaaaaagaagtaagaaaacttttgcaataatcccagatcttgtggaactttccgattgttcttttgtccccccttcagtttgcaaagcagtattttatgtttttcttatgccttatatatgtttatcacatgatggaagaccagagtgtttaacccgcagccaaatttacacgcattctccttttttgttcgttttttggtagctatacaataaacatttgagttacattttgttttacaacattttcgtctcgtttcgtgcttatgctccaccacttggtatctgtatccgtgactaacagccaacatacaaacaacatgcccaaaataaatttaagcccgaaaatggtgtcgcaaatcgcaaactgaaacgttcacggagctaattgtgctaacaaatttccgatgctatggtacgtttcgactaaagacaaactaataaccaacggaagtattgtatttatataaatgttgcctagagatatcgatcgaaaatctataagcaaaaaaatctgcgcgctgtttgcatacattaatcgctgagaagatccgctcgagcctgtttgtttaaccccgcgtgtgcgttaacccaataaaaacccaaaaaaagaaaaaccatcatcagcgattgagagtctaccacatgagaacaataatattctatgcgtatgtaaagtttttcaataattcctattgctaaatcgaaaattgtgtaccgagttgtaggcgaaacgtgagagagatacagtatctatatataaatattttaaagttatgcatactatgtgtaaaaatgaaacgaatgaaaccatgtaaatgtcattgcgttatataaggtgcaattaagccatccttgtaaataattataaagaaagaaagacattcccaactttgttttgttatcaattatttggatcggagcagagtccagttcgcatttattattaaatactttcagcttaggactaaggtacaaaacgccctttgaatatcaactttcacagatttcattcgaaagagattgtttatacaatacgtttaactttacgttttatagacaaataattaaaaactgttgtgcgaatgtgtcataatttataatattgggcaatttgaatttgactcgaactaattctgtgaaagtgaagaaaggcgttcgaatattttaagcaattctctttcggtgctagatttcctgtttcggcttgttttgcgtcgaggcgttgcgcgaaatcttca

SEQ ID NO: 17714 - DNA, 2027 bp, DROSOPHILA
ccccgacatagaagcacgtcagcatgtggcacaaccggagaaagtaggaaaaacaaacggagtagaggaaaagcccaacaaaaaaaaaaaacgaacgacggccagggaaaaatgccaaaaaacctggtgggaaagttcctaaccattctgttgagacgcaaggagtgctaggatcaagtgtttgtccatcaagatgatgtcggaatactggattatctcggcccctggcgacaagacctgccagcagacgtacgacacgatgaacaatctgaccagcaagcaacacaacctgtgcaataactacaagttccatattccagatcttaaggtgggcaccctcgaccaactggtgggcctctccgacgatctgggcaaactggacacctatgtggagcagatcacccgcaaggtggccaactatctgggcgaggtgctcgaggatcagcgggacaagctgcacgagaacctgatggccaacaacagtcctgggccacctgacgacagcatgccgtgtcgccaccaccagcgcatcaagcatctcagtctgcgacaccagcgaaaacaccagcacacgcaccaccaaaacaaaccccaacactaccatcaccaccaccatcaccaccagctgccgcaggatctcaaggccgaactaccccagtacttgacccgcttccaatgggacatggccaagtatccgatcaagcagtcgctgcgcaacatcgccgacattatctccaagcagatcggtcagatcgatggcgatttgaagaccaagtcgcaggcctataacaacctcaagggaaatctgcagaatctggaaaagaagaagactggcagtctgctgaccaggaatctggctgatttggtcaagaaggagcacttcatcctggactcggagtacctgaccaccctgctggtcattgtacccaaggtcatggctaatgactggctgaccaactacgagaagatcaccgacatgatcgtgccccgctcgtcgcagctcatccaggaggacgccgactactgcctgttcaacgtgacgctcttcaagaaggttgccgaggagtttaagctgcatgcccgcgagcgcaagttcattgtgcgcgactttgtgtacaacgaggaggagctggctgccggcaagaacgagatgaccaagctgatgacggacaagaagaagcagtttggtcctttggttcgttggctgaaggtgaacttcagcgaggccttctgcgccctcatccacgtcaaggcgctgcgcgtgtttgtggaatccgtgctgagatacggactgcctgttaacttccaggccatcttgatcgagcccaacaagaagagcgtgaagcgtctgcgcgatgtgctcaaccagctgtatggtcacttggatggcgcctccgccggcggtgctgtcagcagtgctgataacgtagacatccccggcctgggctttggccagtccgaatacttcccctatgtgttctacaaggtcaacatcgatatggtggagcaggccaaggtctaagatcgcccgtcgcccccaacattgcatacatccagccacacaaaatacactttaatacaaaagaaaaaaaaaacaaccaacttaaaaatcagctgaaccattcgcagacatctaatgaaacaaaattaatagattactttaaataattttagtcattgttatctaattattgttgttatttatgttgcgcgttgccgatatctgtttcaaatctacttccggttcgagaaatcgaggcgcgcccaaatcaaccgaaataagtccttaaaaaagaagtaagaaaacttttgcaataatcccagatcttgtggaactttccgattgttcttttgtccccccttcagtttgcaaagcagtattttatgtttttcttatgccttatatatgtttatcacatgatggaagaccagagtgtttaacccgcagccaaatttacacgcattctccttttttgttcgttttttggtagctatacaataaacatttgagttacattttgttttac

SEQ ID NO: 17715 - protein, 442 aa, DROSOPHILA
MMSEYWIISAPGDKTCQQTYDTMNNLTSKQHNLCNNYKFHIPDLKVGTLDQLVGLSDDLGKLDTYVEQITRKVANYLGEVLEDQRDKLHENLMANNSPGPPDDSMPCRHHQRIKHLSLRHQRKHQHTHHQNKPQHYHHHHHHHQLPQDLKAELPQYLTRFQWDMAKYPIKQSLRNIADIISKQIGQIDGDLKTKSQAYNNLKGNLQNLEKKKTGSLLTRNLADLVKKEHFILDSEYLTTLLVIVPKVMANDWLTNYEKITDMIVPRSSQLIQEDADYCLFNVTLFKKVAEEFKLHARERKFIVRDFVYNEEELAAGKNEMTKLMTDKKKQFGPLVRWLKVNFSEAFCALIHVKALRVFVESVLRYGLPVNFQAILIEPNKKSVKRLRDVLNQLYGHLDGASAGGAVSSADNVDIPGLGFGQSEYFPYVFYKVNIDMVEQAKV

SEQ ID NO: 17716 - DNA, 2276 bp, DROSOPHILA
cacttgactgctggccaccggcggggtttgctgtggctgctgggcaccaaaacagcgggtcacatggttgtgctgtgatgaggaacttgagcccgaggaggtggatcccgaagaagtggacgacgtggacgagggcggatggcgtatgctaagattattcaggcttagctgatccgggggattgcgggagcgactggatccggctggaatgtgtgggaaatgggagaatttaggaggcttcatagatggcttatcgccgctgcaccagatttccaaactatgcgtcacccagcgagtatgtggtcctcttcggctgcatgtgtatgacctgcgtgggcggttcgagaccaaaggggtaactcacttgcaaacaaatttttcggtcgttcggccattgtgtgtggtggctgaaagtatcgatgcgcctttgtgtggctgtcctaaggatgttttgtccgttttctgcaggcgccgcgccccgaatacaacacgtcgacttgatgctcctttggccctccgatcgcctggttactgggccgcctttgatgggctcttcgccgtttgcaacgcaactactttttcagcaatcgagcgcactgatatgcactttttccgcaatttcgctaaacatttacataaatagcaaccaaaacttaaaagagctagagatgaaacattgattatttgcggccaatcgatagccatcgatagtatgcgcactagcttgcgataagcagtcctgcaaggtgcaaaagtagtgaggtgggtaataaaacgaatataaaaatgtcacctataaataattatttctttaaaaccaagagatttgagtttctatttttcacaaattaatcccagctttgttaaagtttttactagttgaaaagttacatttcgtcaataagtgacgtcgacgcctacataaaccaatctgcgccaccttaaaatcaatgcacaatcaccagtgatttaaaaccagaaaattaaaacatacataatcatgtccagcggatttgttcgcagcagctacaaattgttcgtcggcaacctgccatggacgataggtagcaaggaactgcggacctacttctcaaagtacgggcacgtggccaacgcggaggtggtctttgaccggcaactgggcctgtccaagcactatggctttgtggttttcagccaacgggatgccttcaacagcgccagcaaccagaacacccatttcctcgatggacgagtgctcacagtccagcgggcgaatgaaagtcctcagagttaatcaatgaagaatttaatgatttattggttagaccaaaggaaaagcatgagaaatgtttgttaacagcttagttttacacaaatgaatgcagcacttgcttcaaatcgtggcatctttgattcatttgggcaagtagaacttgctgttggtgcccaccacgtccgcaacattagtgtgacccagccgtgtgatcagcgccgacagctccgccttaatgtcttccacaagagcgggtccctcgtacactaaagccgtgtagatttggacgtaggaagctccagcttcgatcttttcgtatgcatcatagccggaagccactccgccgacgcctatgatgggaatctttccatcggtgagctggtacatctgggcgatcatctctgtggagcgggccttgagtggaggaccacttaatccgccagtttcctcggccagcttgttcttttcgatgttttcccgcgacaccgtggtgtttgaaacgatcaggccatccacgcggctcttcttgcgcttgattacccacacgatgtccttcatgtcgtccaaagatagatccggcgaaagtttcaagagtataggcacattcttgttcttatccagggaggatttcgtgtcgttgacctgttccaggagctctcttagcttctccttgctctgcatatcgcgcaggcccttggtgttcggactgctcacattaatgaccaggtagtctgctacgggcccgaaaacccgaacaccctgtacataatccgctatcgggctcatggtggtcttgttccggcccagattcacgcccacaactccattgaagttctcctttttgcggagcaagcgcagccgttggagcacggcctgatgcccgtcgctattaaatccgtaccgattaatgatggccttgtcctcggtcaaccggaatactctcggcttgggattgccctcctgagccgccggggtaactgtgcccacctctataaatccgaatcctagatcctgcaggccg

SEQ ID NO: 17717 - DNA, 276 bp, DROSOPHILA
atgtccagcggatttgttcgcagcagctacaaattgttcgtcggcaacctgccatggacgataggtagcaaggaactgcggacctacttctcaaagtacgggcacgtggccaacgcggaggtggtctttgaccggcaactgggcctgtccaagcactatggctttgtggttttcagccaacgggatgccttcaacagcgccagcaaccagaacacccatttcctcgatggacgagtgctcacagtccagcgggcgaatgaaagtcctcagagttaa

SEQ ID NO: 17718 - protein, 91 aa, DROSOPHILA
MSSGFVRSSYKLFVGNLPWTIGSKELRTYFSKYGHVANAEVVFDRQLGLSKHYGFVVFSQRDAFNSASNQNTHFLDGRVLTVQRANESPQS

SEQ ID NO: 17719 - DNA, 4846 bp, DROSOPHILA
agttcatttcggaatattgtggcgagatcatatcccaagatgaagccgatcgccgtggcaaggtttacgacaagtacatgtgctcatttcttttcaatctgaacaacgattttgttgtggatgccactcggaagggcaacaagattcggtttgccaatcattccattaatcccaattgctatgccaaggttatgatggtcaccggcgatcatcgcatcggcatctttgccaagcgggccattcagcccggcgaagagctattctttgactacagatacggacccacggagcagctgaagttcgtgggcatagagcgtgaaatggaaattgtttgataacgagtctacttatgaaaatcgtatcatacaaattgaataaaactatatttttgaaaacacacctaaacggatttagctacattggctataattggtttgggtcgcgatttgaagattaattttttggtgcaaacggcgcgcacagtgtactccgttctttggcgactcttgtgctcctgggcgatcgtatgatccagcactgtgcgctccgctcccgtggtggcgttcagcatactgacatcctgcgaggccatgctcgtttctaggagtcgttctccctcattggtcttggacttttccagcaccgcaaatggtttatccaacttttgttcacgtccctgaagaatgtgatgtccaatgatgagaatcttatgatataagtaaaatcagattgtttaagagctggttaaattataactttacaattacaactcacaggttggccatatttattgtagtagagatcgccaataaactggccgtgcatatcctggttgctccgcacctccaggtcgccttgcagctctataatggcccaatcgcctttgccagcgttttgtctaaaataaaatcatgggtttgggttacttcagtggtaaaggtgcacttaaaagtgaataatacaatattgtaagcccagtttccacggaaagtttctaaagtttgttcagaattttattcatgcttcacagtggtttgtgcttttcttaggtctatcctctgaattttttgaagagcggatgcacgctgccaatgttctttttacgatgttcgtagtagatggcatcatctccgccagacatggagctcagtccgccgacacgtctgacggcgccgcccgagccactgggacggtagcccggctcgcccggcagcttctcatcctcgcagtccaaatcggaagcggataggaccaactgcagcagttgtccctgctcctcctgtgtgccgtacatcaaatccgagtccgtgtccatgcccttgagatgcgtgataaccttgtagctatagccctggttgaccaagaaccgctgtcgcttgcgggagtagctcatctccatggtatcctgcgagacgagtgtatagaagaaggcgttgtattcctcggcaatggcacccttcttagcacgcagaatacgacccagacgctgggcctcctgacgacgagagccgccatgcgaagagatctggataagcacattagcctcgggcaaatcgaaactggtgtctgccactttggacacgaagattgtattaacctgaaataggtattgttaaataaatgttcccaaaattcttgaacagttggcactcaccttggagttaaacttaaagttctggaggatctggatacgttcgttctgcgaggtgggaccatagatgaaaggcttgttcatcttgatcgcatagtgttttagcgcaaacacattatctgagaagacgattgttttgtcgcctcgttgctcgtgatatttaataagaaactggcagctgcggaacttggagggattcatcacatagagcaacatctttttggaggtcttggtggtcaggtactcgcgatagaactccggtgacatgggacaccacacctcggcgcactgcacgcgtgcaatatatcccttcttttgcagctctaaccagttggcctcgtacagtttgggtccaatgaggaagttgagatcggcaatcttgtcatcttcacgcagtagtgtggccgtcaatcccagcttgcaatgagattgaacgatggtcagcacgcgacggaacattttggctgggatggtgtgcacctcgtccagcaccatgatgccccattcctgctcctgcagccaacgcatggtctgctctgcttcccatgatctcttctgcgtgtgcgttatcatagagtatgtggtcacaagaattccacagcccatgggtttgtcttttgcttcagaggtgaatctacaaatcatgctgtcatcagctgtggaccacatcttaaactgctgcttccactgctccacagaaacaccactgttgcacagaactagtgccctctttcgtacggtgcagcatgctgtgacacccactagggattttcctgcaccacaaggaagcacaataacaccagagcgggctcttccattgccaaacatcttgcgcagactcttctcctgatatggacgcagaacggcagcgggtttgaggtcaatattaatgtctggattgttggtatcgttgcggaaatcgtactccgccaatagaggatgctctatctcgatgcatcgtttctgaatcacttcgatcttctcctgggccacctcaaacgacacggtcttcagattggcctcatcctcgtcctcctcctctttgtcgatcttctcgtagaagtctgtgatatcttctggcactgctgtggttccatcagctcctgcggctgctgcaggatctggtgtcggcttgtccgtggctcctggcggcagtttggtcccgaattgagtaatagccttgccgtccagggttccctgaatgaaatcctctccctcgctgcgtatgaggcggcatttctggatcactggatccttaagtaacttttgcagcacctcaggatgtggtgactcgataaagtacttgttatgcttcaagaccagcttgaccttgccataggatagggtgcagagtcgtataaactcaaggatgccttcgggaatgctggtcttgctcaatctcttcaagtattccacaatgtcatgggtttgcagtcccaccgaaacggcggcatataaactgtatgcggtaagtttgtactcgtgaatgtgttcgggtcggcagacgggctccgaaatggcgataagaaaatcgtgggcatgcttatagacgggcgagaatgattccaggaagacgtgaccattgggcgcaacccaaagtggtcgatttccgtgatccggacgcagttgcatctgcgaccggtaatccttggcgccgtactcatccgtattgatttgctcgtcattggtctccgcattcttggacgctgcacccggaattccttccgattctgtggcatccaaactatcattgtcgtccaccagttgggtgaaagcctcatcctcggcacgccgctttttgcctgggaatagttcttaaattacaccgaagctcattggttttccatgtgccccacactcaccgaacttgtcaccaccgctgcgatcctttctcgattttttcggcggtcccatttaaataaaacacaagcaaaaatttcacaacaaatccgagagctcaagaaattaaacaaagatatcgacggaattcgataaatttcagtcaactaaagtaacacagcacgtatggcaacgtcggcagttgagtgcctcgtagaatgctgtttgttttcacatgtttttaccctatgtaaatcgttactttcactgcattttaagctacttacgtttttactacaatgggcatcctgtttttgtattttgaaatgcaaatagttggtaaatcacgtataaacacagacgagcgcctaaagccgctttcgtctcttttgcaacactgatttatcggtggtcgataactatgaagtaccaccttgccaccctgcgtggcgtcagctgtgtacggttttagaatcactggatattcaaactgaaattcaaaaaatttttatccactgatttctctatgcaatcccacttgccttgatctaatgatcattggatgtggaaaattaaccttgtgccttcacaatgggcaccgaaaagaaaaaacacccgccaaaaaagaagtcacaggagaaaaaaaagagcggtcatagcaagtcgaagcagaattctttgaattccaatctgcccaagatatgtttcgtcatagcaattttcgatctgctgcatgcgttatattttacagttcaagcaatgattcttctggttaaacaggtagctattgtttaattaaaacacaaaattcttaataatcattaaattaaaccaataatagttcagcgcgtttgctatgttggcgcttttgggtgtcattttttgggttataatggtcatcctgttgatggttggcctttataaggtgagtttgaatttatttatttagtggtattaattcctaaaattataaacacattagcgcaagccagttttcgtaaggtattggcttatattttccatagtcggctttataaccgatattctatttctactttggggcattgcgacctcaataactgtggactgggaccgtcttaatgagttttcaataattttccttggaatatgtaagtgatatttaaatttaaaatcaaatacaattctaatgttaagtataattttagttgttgaaagcgcctgcatatatttcatacatcggtactatcagattatggatgaatcgaaaaagaagaggaccctatgttgtaagatagctttaaactaatattacattttactactaatcgattttatataggtggcggaaaaaacgaaaagaaaaagtctaaaagc

SEQ ID NO: 17720 - DNA, 2559 bp, DROSOPHILA
gtttatacgtgatttaccaactatttgcatttcaaaatacaaaaacaggatgcccattgtagtaaaaacctctcggatttgttgtgaaatttttgcttgtgttttatttaaatgggaccgccgaaaaaatcgagaaaggatcgcagcggtggtgacaagttcggcaaaaagcggcgtgccgaggatgaggctttcacccaactggtggacgacaatgatagtttggatgccacagaatcggaaggaattccgggtgcagcgtccaagaatgcggagaccaatgacgagcaaatcaatacggatgagtacggcgccaaggattaccggtcgcagatgcaactgcgtccggatcacggaaatcgaccactttgggttgcgcccaatggtcacgtcttcctggaatcattctcgcccgtctataagcatgcccacgattttcttatcgccatttcggagcccgtctgccgacccgaacacattcacgagtacaaacttaccgcatacagtttatatgccgccgtttcggtgggactgcaaacccatgacattgtggaatacttgaagagattgagcaagaccagcattcccgaaggcatccttgagtttatacgactctgcaccctatcctatggcaaggtcaagctggtcttgaagcataacaagtactttatcgagtcaccacatcctgaggtgctgcaaaagttacttaaggatccagtgatccagaaatgccgcctcatacgcagcgagggagaggatttcattcagggaaccctggacggcaaggctattactcaattcgggaccaaactgccgccaggagccacggacaagccgacaccagatcctgcagcagccgcaggagctgatggaaccacagcagtgccagaagatatcacagacttctacgagaagatcgacaaagaggaggaggacgaggatgaggccaatctgaagaccgtgtcgtttgaggtggcccaggagaagatcgaagtgattcagaaacgatgcatcgagatagagcatcctctattggcggagtacgatttccgcaacgataccaacaatccagacattaatattgacctcaaacccgctgccgttctgcgtccatatcaggagaagagtctgcgcaagatgtttggcaatggaagagcccgctctggtgttattgtgcttccttgtggtgcaggaaaatccctagtgggtgtcacagcatgctgcaccgtacgaaagagggcactagttctgtgcaacagtggtgtttctgtggagcagtggaagcagcagtttaagatgtggtccacagctgatgacagcatgatttgtagattcacctctgaagcaaaagacaaacccatgggctgtggaattcttgtgaccacatactctatgataacgcacacgcagaagagatcatgggaagcagagcagaccatgcgttggctgcaggagcaggaatggggcatcatggtgctggacgaggtgcacaccatcccagccaaaatgttccgtcgcgtgctgaccatcgttcaatctcattgcaagctgggattgacggccacactactgcgtgaagatgacaagattgccgatctcaacttcctcattggacccaaactgtacgaggccaactggttagagctgcaaaagaagggatatattgcacgcgtgcagtgcgccgaggtgtggtgtcccatgtcaccggagttctatcgcgagtacctgaccaccaagacctccaaaaagatgttgctctatgtgatgaatccctccaagttccgcagctgccagtttcttattaaatatcacgagcaacgaggcgacaaaacaatcgtcttctcagataatgtgtttgcgctaaaacactatgcgatcaagatgaacaagcctttcatctatggtcccacctcgcagaacgaacgtatccagatcctccagaactttaagtttaactccaaggttaatacaatcttcgtgtccaaagtggcagacaccagtttcgatttgcccgaggctaatgtgcttatccagatctcttcgcatggcggctctcgtcgtcaggaggcccagcgtctgggtcgtattctgcgtgctaagaagggtgccattgccgaggaatacaacgccttcttctatacactcgtctcgcaggataccatggagatgagctactcccgcaagcgacagcggttcttggtcaaccagggctatagctacaaggttatcacgcatctcaagggcatggacacggactcggatttgatgtacggcacacaggaggagcagggacaactgctgcagttggtcctatccgcttccgatttggactgcgaggatgagaagctgccgggcgagccgggctaccgtcccagtggctcgggcggcgccgtcagacgtgtcggcggactgagctccatgtctggcggagatgatgccatctactacgaacatcgtaaaaagaacattggcagcgtgcatccgctcttcaaaaaattcagaggatagacctaagaaaagcacaaaccactgtgaagcatgaataaaattctgaacaaa

SEQ ID NO: 17721 - protein, 798 aa, DROSOPHILA
MGPPKKSRKDRSGGDKFGKKRRAEDEAFTQLVDDNDSLDATESEGIPGAASKNAETNDEQINTDEYGAKDYRSQMQLRPDHGNRPLWVAPNGHVFLESFSPVYKHAHDFLIAISEPVCRPEHIHEYKLTAYSLYAAVSVGLQTHDIVEYLKRLSKTSIPEGILEFIRLCTLSYGKVKLVLKHNKYFIESPHPEVLQKLLKDPVIQKCRLIRSEGEDFIQGTLDGKAITQFGTKLPPGATDKPTPDPAAAAGADGTTAVPEDITDFYEKIDKEEEDEDEANLKTVSFEVAQEKIEVIQKRCIEIEHPLLAEYDFRNDTNNPDINIDLKPAAVLRPYQEKSLRKMFGNGRARSGVIVLPCGAGKSLVGVTACCTVRKRALVLCNSGVSVEQWKQQFKMWSTADDSMICRFTSEAKDKPMGCGILVTTYSMITHTQKRSWEAEQTMRWLQEQEWGIMVLDEVHTIPAKMFRRVLTIVQSHCKLGLTATLLREDDKIADLNFLIGPKLYEANWLELQKKGYIARVQCAEVWCPMSPEFYREYLTTKTSKKMLLYVMNPSKFRSCQFLIKYHEQRGDKTIVFSDNVFALKHYAIKMNKPFIYGPTSQNERIQILQNFKFNSKVNTIFVSKVADTSFDLPEANVLIQISSHGGSRRQEAQRLGRILRAKKGAIAEEYNAFFYTLVSQDTMEMSYSRKRQRFLVNQGYSYKVITHLKGMDTDSDLMYGTQEEQGQLLQLVLSASDLDCEDEKLPGEPGYRPSGSGGAVRRVGGLSSMSGGDDAIYYEHRKKNIGSVHPLFKKFRG

SEQ ID NO: 17722 - DNA, 5084 bp, DROSOPHILA
tggccggagccgttttcaccgtctttgcgagattcggtaggcgaacccttccttgggctccaagaactcccttcctcccactaatctcactcattttcccacagccttcaacggaatcacacagtttgtgggcatggcctgcatcacggcggtcattggatttctgcgcacctggctccacgttccactgcctctggtctttgccgactacttgcccaaggaaaggtgggttcttttggcaagcttatagcatttatcacaaaattataatatatattcctcatatatttccatctcgtttaaggttcgccactggctatggccttttcatgttcatccaaggcaatgccatgttcctcatcggtcccattgttgggtttattcgggacaagaccagggattacattttcgtctttcacatcctaaacggcttcatgatcctgtgcgccgctccttgggtcctcgaagtgctgatcgtcaagtttcggaggcgtaacaaaatcgaacgcaacaacgttgatcacgaggatgttgataaccagggacgtagtgcaatggtccaataaaaaaaactctaccacccccccccccccttcctttttttttaacaaaacatatcgtgaattattgaggtaatttaggtacaattacgagaagtattaagcaaataaaaccaaaacatgtttttagatgggaaattaaattgtcaaaagtatcatttgcgataaagaaaaaaacagcttgttcttaaaatggaaatttgataatgaaacatatatatttaatatttaatataatagcttggaaaaatgaatgtgatacagtatttttcaaaaaaggaaaaaacataaattcaaaaatcacagttaaactgtttaatacttaacggtaatgtcacagttttcggtatttacaaatagagaagtcggtagcttagtacaaccatttggtattcgccgctgtccacgtggcggtcacactaacggggtccaagaaactgaaatttagtaaataatatagaataggatagttaaccaggtgacaatgctgcagcaaatcaagatgctggtgctgggcatcatcacgctgtgccggcgtgccttgtgctgcttctccaggcgccgcaagctcagccacagcggctccgccaccggatccgccgaccaactgcaagcggtcaacgtgatcgtggagcgaggcgacttctccgccaccggcgccacctccgctggccaggccggcggtggcaggacagcgggggcgcgcgagcgggactggaactcctgggacgacagtccgcgcaccgtggaggagcacatcgagcagtaccgccagcgaatggcccagccacccactccgcccaaggaggaacccgaaccggacttcttcagtgtgagttggtactcaggcaatgggcgcggattacgcagattgcgccgcttgcacggcccatagtcgtagcccaattgtagggatattcacgctcgctgatggtgggatagtgggctatgttggggctaaatggcgacatccccacctgtacacgtatctaggtgacttcggcgtgtttaccctataccctatcaactgcacaagtttgtatgtgggccataatcacgtcataaagattagcagccatagaaaacgacaggtataaaaatctagaaagaaatcattttcgaaactattcacaaccatttatttcaaattacgcttaatttctagttgtgtttaactaaatatttgtggaatatttaaaaggtttacttaaaaaatatgaatatttagcttattactgtgataatttgttaatatttcaatagttttttagaaatttcaaaaatatgattttatgagtccacaacatttgaaccaggaatacttaaagagtgtacttaaacgcattatttgttaatagatacttgcagatttgacaaatgcaaatgtcaaaatatttatcctatgatttttaaagctataaaatatagaaaacttgcatagtaaactaaaaagtgagtgcttacaacgctgaataatatttgttaatgaacagccgtttttagtttgctaattgttcatattgaggtatctgttttatgaacaaaaactccatattatttctacgcaacaggcattgatttaagtaaaaaataaaaaacatgaagaaccatccagctaaataagttagttaatacctacaaaagtaaaaacaagcaaataaaaaaattgtgaatcacaatgcatatattctttatatgactatatatagaatatataagtatttataatatctgtgtttcatatcctcaacgatttggctaaaatgtaaccttcttttaggagctgacgcccaccatcaagccgcagatgaagttctacctggaggatccatccacgagtgcggcgaccagccaacaaagtgacttttcaagactgcaggcccaggacttggtgccaattagcgtaaatgtgagccagttatagcccgaatggaatgcatgaaacgaactaatgtttcttactcggcaggccgatctcgaggactgggtggatgataatgccggcggctgggaggagctggacacctcccagaccaagcacattctgcgtgagaagcgtcgtgagttgcgccatcagcgacagccgcccgtccgcccggccccgcccactgtgggcgctcagcgactgaccgccggacagcgagcggcgtagttgtagctgcaccagcccctagccaacctcaccaacctcaccagcctcacccactctgaccattccacaaccgaccacctgcattctgtttcccctttcttttgttcgatttagttgattggctacacgaaataaatcttgcctttcactcgcacttccctcctcgcggatcagttgggccacacttcctgatggctctgcggtttggacgcgctccattggacccgcttccatctgcagtgaagtgaagtggcgtgcagtcgagtcaggccgagtgtcgagtccataaaagcgacggcaggcgacggaagtcgcagatttctatgcgatgctgttgccggagctgctgctactcggcttggccgtctccctggcggacagctacgaccgaagcgtcaactactgggaggcctttgcgcccggcaagctgctccagcgcctggacgctctcaccgtcacggatgtggaccaatcgaaggtggtcaaactgccgcagttgatgcagcccatcctgccagccaacgaagcgcaggccaaggtggatgaggacgtggacgtggatgttgagacggatgcagaggcggcggccgttgacgatgtggacagccttagtgcggagaccagccacgagggctactccggcgaggacaactacgagcgcaactacgagcagttcgtcaaggagtacttcgatcgggctgccgacgacgatgaccacgacgaaggcgaaggcctggtggaggaggaggaggaggagacccaggcggaggccaccaatgtcagggatcagcgctgccggcaggtcaaacggaaggatggccagctgtgcgagatctgtcgccagttgaagaacaacgaggtgtccgaaacgtgcagctactcgcacgacgaccaaccgcagcagtacgcctatggcagcggcagccagtacaagcgttaccgcgacgatcccgcacagaaggcggatcaggagcaggccgagccggtggcgcccagcagcctgtgcgtgcgccgccagcagaagaacagcgtctgctacgagtgcaaggacagcaagggccagaagatcgaacgctgctacgatgtgcaggcccgcaaggccaagacccgaaagacgaaggcctcctccacccgtcatccgtccagctccgttcacaaacgtaagccgcgttcccagcagtcgcagcagtcggagcaggagcagcgcatctacaagcgcaccattagctacagctatgcccagggcacggatcagcaggggccgcggtcggagcagccggccggcgggacaacggagctcccagtgccacgccagcgtcgccggcggctggtgaagattacgcgtcggcgcggaccggctaaagtgcaataaaaatcgtgttttcattcgcatgactcaatgtataccccactcgttagcttagattgattaccacacacattttttttttttgttacaataaatcattctgtaagaacacattgcatacttgtgggctaatcagctggaagagattaagatcacgattagctagaaaaaggttttttatcccaaaaatcttcgaatatcagtaggtgaagttccgaaatatgaggcactcttgtggatttttatacacatctactattagcataggcatttcgaaatatttgcttgcttttgagtttgttttaagccggagctcaagattcattataaaatttgatatgaagtgtaattgtggcaatggcaaagtatggaacaattgtaagacatatgaacaacaaggatatatgcaaaataaaaccatgattcaatgttaataactaacaagcaagtgagacccgatgaattcatttcaattgaacaagaaaacttgcacaaaagtcgtttattgaggggagcgctctcgtcgatttcccaaccatttcatttatttgtaaaaaccacaaacatcattacattggcattaaactggatgcgacaatttgcaattgaaacgaacaacatttacttaacaataattttggagctgccgatgcgaaagggaaagggacagcaggcgagcggcgaaagagacggctatagcagctggtgataaatgcagctttggctttgggaatcgctaacgttaactattcggattcgacattcgacgaaatgaaatcgaagtgtcttcaatttgaaacctcaactcaaacacacacacaacttgaacacttagcacatgaaaagattttgaaaccgacactctagcctagcattttagtatgcatttttaaatctattgttgctccggtgcttggtgcgcataaaaaatgacattgcatattcctagtgctgtgcgaaatagttagaaatagtttacctagcaattgccaccgttctcaac

SEQ ID NO: 17723 - DNA, 1667 bp, DROSOPHILA
aaatttagtaaataatatagaataggatagttaaccaggtgacaatgctgcagcaaatcaagatgctggtgctgggcatcatcacgctgtgccggcgtgccttgtgctgcttctccaggcgccgcaagctcagccacagcggctccgccaccggatccgccgaccaactgcaagcggtcaacgtgatcgtggagcgaggcgacttctccgccaccggcgccacctccgctggccaggccggcggtggcaggacagcgggggcgcgcgagcgggactggaactcctgggacgacagtccgcgcaccgtggaggagcacatcgagcagtaccgccagcgaatggcccagccacccactccgcccaaggaggaacccgaaccggacttcttcagtgagctgacgcccaccatcaagccgcagatgaagttctacctggaggatccatccacgagtgcggcgaccagccaacaaagtgacttttcaagactgcaggcccaggacttggtgccaattagcgtaaatgccgatctcgaggactgggtggatgataatgccggcggctgggaggagctggacacctcccagaccaagcacattctgcgtgagaagcgtcatttctatgcgatgctgttgccggagctgctgctactcggcttggccgtctccctggcggacagctacgaccgaagcgtcaactactgggaggcctttgcgcccggcaagctgctccagcgcctggacgctctcaccgtcacggatgtggaccaatcgaaggtggtcaaactgccgcagttgatgcagcccatcctgccagccaacgaagcgcaggccaaggtggatgaggacgtggacgtggatgttgagacggatgcagaggcggcggccgttgacgatgtggacagccttagtgcggagaccagccacgagggctactccggcgaggacaactacgagcgcaactacgagcagttcgtcaaggagtacttcgatcgggctgccgacgacgatgaccacgacgaaggcgaaggcctggtggaggaggaggaggaggagacccaggcggaggccaccaatgtcagggatcagcgctgccggcaggtcaaacggaaggatggccagctgtgcgagatctgtcgccagttgaagaacaacgaggtgtccgaaacgtgcagctactcgcacgacgaccaaccgcagcagtacgcctatggcagcggcagccagtacaagcgttaccgcgacgatcccgcacagaaggcggatcaggagcaggccgagccggtggcgcccagcagcctgtgcgtgcgccgccagcagaagaacagcgtctgctacgagtgcaaggacagcaagggccagaagatcgaacgctgctacgatgtgcaggcccgcaaggccaagacccgaaagacgaaggcctcctccacccgtcatccgtccagctccgttcacaaacgtaagccgcgttcccagcagtcgcagcagtcggagcaggagcagcgcatctacaagcgcaccattagctacagctatgcccagggcacggatcagcaggggccgcggtcggagcagccggccggcgggacaacggagctcccagtgccacgccagcgtcgccggcggctggtgaagattacgcgtcggcgcggaccggctaaagtgcaataa

SEQ ID NO: 17724 - protein, 540 aa, DROSOPHILA
MLQQIKMLVLGIITLCRRALCCFSRRRKLSHSGSATGSADQLQAVNVIVERGDFSATGATSAGQAGGGRTAGARERDWNSWDDSPRTVEEHIEQYRQRMAQPPTPPKEEPEPDFFSELTPTIKPQMKFYLEDPSTSAATSQQSDFSRLQAQDLVPISVNADLEDWVDDNAGGWEELDTSQTKHILREKRHFYAMLLPELLLLGLAVSLADSYDRSVNYWEAFAPGKLLQRLDALTVTDVDQSKVVKLPQLMQPILPANEAQAKVDEDVDVDVETDAEAAAVDDVDSLSAETSHEGYSGEDNYERNYEQFVKEYFDRAADDDDHDEGEGLVEEEEEETQAEATNVRDQRCRQVKRKDGQLCEICRQLKNNEVSETCSYSHDDQPQQYAYGSGSQYKRYRDDPAQKADQEQAEPVAPSSLCVRRQQKNSVCYECKDSKGQKIERCYDVQARKAKTRKTKASSTRHPSSSVHKRKPRSQQSQQSEQEQRIYKRTISYSYAQGTDQQGPRSEQPAGGTTELPVPRQRRRRLVKITRRRGPAKVQ

SEQ ID NO: 17725 - DNA, 3282 bp, DROSOPHILA
gcttttgccgttgccaaaggaaggggaatcccccctggctggcttttgtttctttggcgaagagagaaaaccttttatagcggttattaaattgctctttaagtgcttggcacggggcgtaagctatttgccctatcccaggttgttacctgttacctgtcctccgcatcagttgctcctccaaatccgcgtacgtgttggcatatcaattcacattacggtccgaataactgcatgcattcatctgcgccaaggaatcccgttcatatcaagcaggattcgtccggcggcgggtagggagaagaaagagggtgacatcgccgggaggttggacaggatgtcggagatacgctgccattggcactgacataaccccatgtgcagtgtatcacgttccagtcatttggtggctgccacttcataattcaataaaacaataaaagcaaaatccttacaaattacagcaatcaaatcatacgacttacatgggcatcagtgatgacaattcagggtctgaatattttgcactttcaaatatcatttagtatgtgagcagaaatattatacatatcataggtgctgagatttccaggaataccggcaatactatctgaaatattagtttttggaatatggaatatatatatatttggaatatagaatgaaaaacctgctaggagcactagcagcacttccctggaaatggaggatattgcgcttcccgagcatatttccataaattggtcacaatttgctatgcgcagcagcacggaagacaaaagccctgaaaggacgacgcacacacataggaaggaataagcacttggcgcgcgatggcagccgttaaaggatgggcagagtcacccaaaattatgacgccaaggataatcgtagtgaagcgagtatgtgtttcccactccgccggggaatacgtgaggcgactatagtagcctcgggataccggcacacgaatcgtggccagaaagtagttactgtttctactgctctacgcaatactttattcatggtacaaccgatatctatctcgaaaagcattggtgcgcgtgggataaaatgtgagtttgacaaatgtataaggcttatgtactatcgttggaaatgtactatggcgcccttggaaattggcctacaatgtgtagatggcattgacattgggtccatggttcaccatggcatccttgtgcacctggtactggatttccataatgcccagatgcagcagctcctttatctgcctgccaatggacaggatagcctctacattgcgagagtccttcgtccaaagggctgtaaagaaagttgaccttagagataccccaatgtgaaatgctgtcttatacccacatagcttattagccttgttgcgcacattgatgaccactccacatatctcgtccgagtgctggaagcactcgccaatcatgcacaaaagctaaaggagataatgctttataatgcattgagcttataattatggtgcaatcatgtggcttaccaaatcgtgccacatcttatctatataggtcctggaggccttgtccaggagcagtatccaacgaccaccgttcttattggtgtcatcctcccacatgggactaaatatttatatacataagacgaggttcaaagagcagactttcagaactcaccgaatatttttcttgaagaccatgtagtcattgaatatcttcagatccgatggcggcttcacaaagtagtacacactgtcgaaatagaataggatatatatatataggatatatatatatatatatgaatctgtgtctgacctgaagaagtcctcaacggtgttgaagctggtcacatcgacgagcatttcggcccagcgcttggtacgatcgttctccaagtgccacaaagtccaggtatgctccaatggatgcttcatggccaggtcgtagtcgatgtttttcatcacccggttcaatgagggctgcaactcctcctcattgccgctcatcagttccaaaccatcataaactgccagaccatgtgaccagtcattgggatctccatacggcacccatgctaaatatattcgattcgcatatcgaatgatgaatcgtaaaaaaaaagatctgctgtcagcttaccagtttcctcagcattctgcaatccgttgcttacgtaaccggtgtacaccattgttttttattgattcaatgcgataaacgaacctttttttgttagttttctcgttttattttactaaaaaaaactccttgaaatggtatatgtctcgtgcaaagtataagcgttaatgaaaatggcttaacatgagtgcacactttgacaaatcaagatatgacagctaaagcgttgccaccttggttatgaaaaagtattggaaaagtcatgtgaccatctcgttgcgtaatatgcttattttcaaaagactctatccctttatcgcctttattatttaaaatattttatggtacatcctgccattatttcatcaataaatcttgtatccaagtcttaagcaccccattcaaacactccgatattgcagctcccattcgcacattttggttgcaaaatcaaattgagtcggttaagtacgagcccgagggtctatcaattgaaatgtcacgctaataaaataaaatgccaccgagcatacgataaatgcacgaaaataataaaatgtgactcaaatgagcgacgacgacagcaaccacagacacagacacggccacacaaagttggcagccggaaagacggatacgattgggaatggaactggagcgagtagaggaatccccctttcttgtctgctctggctgctccttgtgcaacagtttggcctgcagtcaataatcgaaatcgacttgggcttgtggcaataaaaatttgtcttcgccgcttaagttgtgcgccttgttgcacacacaaggtcctgggtccctccgtgccggagtcctttggcaaagccccacacctcacccctgcccgaacccatcaccacgcccctggcggcggtgcagataataaaatatgtgagtcgctacgtggcagctcctttggcgttggcaaagtagctttgggcccttgtaatgtgcaccatttgttgcgcggctggtggtgcggtggcaccaacttgcactccaaccaagatgctccgcaccagctccatctccgtttccatctccatctgctggatgcacgggtgagttatgccggccaagtttggaacaaaagtgttggcactgctccttgttcttggttctcgcagcc

SEQ ID NO: 17726 - DNA, 977 bp, DROSOPHILA
agacatataccatttcaaggagttttttttagtaaaataaaacgagaaaactaacaaaaaaaggttcgtttatcgcattgaatcaataaaaaacaatggtgtacaccggttacgtaagcaacggattgcagaatgctgaggaaactgcatgggtgccgtatggagatcccaatgactggtcacatggtctggcagtttatgatggtttggaactgatgagcggcaatgaggaggagttgcagccctcattgaaccgggtgatgaaaaacatcgactacgacctggccatgaagcatccattggagcatacctggactttgtggcacttggagaacgatcgtaccaagcgctgggccgaaatgctcgtcgatgtgaccagcttcaacaccgttgaggacttcttcagtgtgtactactttgtgaagccgccatcggatctgaagatattcaatgactacatggtcttcaagaaaaatattcgtcccatgtgggaggatgacaccaataagaacggtggtcgttggatactgctcctggacaaggcctccaggacctatatagataagatgtggcacgatttgcttttgtgcatgattggcgagtgcttccagcactcggacgagatatgtggagtggtcatcaatgtgcgcaacaaggctaataagctatccctttggacgaaggactctcgcaatgtagaggctatcctgtccattggcaggcagataaaggagctgctgcatctgggcattatggaaatccagtaccaggtgcacaaggatgccatggtgaaccatggacccaatgtcaatgccatctacacattgtaggccaatttccaagggcgccatagtacatttccaacgatagtacataagccttatacatttgtcaaactcacattttatcccacgcgcaccaatgcttttcgagatagatatcggttgtaccatgaataaagtattgcgtagagcagt

SEQ ID NO: 17727 - protein, 244 aa, DROSOPHILA
MVYTGYVSNGLQNAEETAWVPYGDPNDWSHGLAVYDGLELMSGNEEELQPSLNRVMKNIDYDLAMKHPLEHTWTLWHLENDRTKRWAEMLVDVTSFNTVEDFFSVYYFVKPPSDLKIFNDYMVFKKNIRPMWEDDTNKNGGRWILLLDKASRTYIDKMWHDLLLCMIGECFQHSDEICGVVINVRNKANKLSLWTKDSRNVEAILSIGRQIKELLHLGIMEIQYQVHKDAMVNHGPNVNAIYTL

SEQ ID NO: 17728 - DNA, 8173 bp, DROSOPHILA
ttgcaggatgtactccttacgccgttggatgactgccgcatcgaatctcttgaaatatgtgctatctgtgggcactggcaacttgccgggtagttggagactcttgtggcgccggctaagctcgcgatgcagccgcttgacatcgtggaaccgtttccacaccaccaggcaggtcagagcttgaggtaccgaccttgggaagacctaaaagtgggtgaggtttactatttggaacagttcatctgcccccaaaaaaaacgacttacaatcgaggtgattttgtatattgtgtacccgcccttgtgctcctgggtgtccgtcactgtgaagctgtggatccagccgcccaggttgagagtcattctggtttctgctgcaagacctggtggtttagtttctaaacatatttcccatatcaaatgtcgttgttccccaacttttttgcaacattaaagctagtgtgaccaaaggacgccaaaataaccacttccggacttcgaaattaaataagagcatttagtagcttatttttttaacttagaaggattaaattaaaccataaaaatattaactgttttttaaacacttttatttaaaataaaaaacggtcacattttaaaatttaaaatttatactctaatcgaaagtatcataagtatcgatagtctgcagtgcatgtgggttatgtcatgactaatgacaaattgaattgcacagaaaaggtggaagtccctgctaacgacattgcttcatgtgttcatttaatacaacatatttatagctatagcttttttaaatgtgtcaatttactataacattttaaaacttccgaataaaagcttcacacaaacggattttcacaagtaatatccagatagaaataccattttaaaaagaaatttttccgattttaccaccatcgcttgcgcatgcgcacggaacgcgtgatgcgtttttaagtccgtcattaggccatcgcccatcaattttagtgtttcaaccgccgcccgatacggtcacaccgctcgagaagtagagaaaaaagaaggcgacgaaccacaggcagcaagcaaaatcgacgccgcacgtaccgggagcatttaaataattttttctgtggattaattttaccgaaaaggcttcaacacaatgactgagcgcgagaacaatgtgtacaaggcaaagctggccgaacaggccgagcgctacgacggtgagtagtgattccgaaaaaaaatggtagcaaaaatggtagaaaacggtagacaaatgctagtagagtagggaaaaaattttctcgactgaggagcgccaacgtttttggggaggggtcgcctgggatttttttttgtcttcccgatccattgcgtcgtcgcgtggtcgttgaaaaagtctagagctccgcttttcgtccgaatgtgccaattaaaaggttttcttccagagaaaacgatggaaattttcaattttcatcgctgtagctgcattcgaagcgacgcagcgtcgcgatgagtagtatttcttgcgaaaagaacgggagatggaggaaacagtaagaagaggaagaagccgaagaagaagcagagcgtcggaagaacgaaaagagatgaatagagtgtaaaacctgatttttaccggcaaaaattcgcgtggttttgcacaaaaagagaaagaaacggaattgcgtattataatttacagcaaatagtttgctccgctctttcttttttggaactatatagtattagtttagaaggggaaaattttgtgtatttggcgttgcgagcaagggctgcgcggcagctagcattttattttcttccttggttgctaagggctgtttgcagttgattccagttcgcgttctttttttttctttcttagtagttgtcaaggcgtaactttctagaaacgacacattttttggggattctagtttcttaaatacacttattccacacccaaaatcaatgattgtggggcaggggtaggtgcagtcctctctttcagaccccctccccctttttttccacgaaatgtgcttttcatgcgcagcagcggcgtcgtcaccatgccgttgctgcgaaaaatcgatgaatgaatcgattgtgtcgccggctgtctccctctctcactttctgcctattgcttaattctttatttatgcaaattagttgcggctagttgcaagcagttatgcggccacttggcaaccctatctgataatgcgaaaaaaggaaatataaaatttttctgtgcttcttctgttactctcgcattactcatgcttatgcgcatgtatgcatgcgtgtgtgtgtgtgtttgtacggaggtgtgcgtgtgccgatgagtgtccgccgggcggtttttattgttgcttcttctgtagcctttgcttatatttaattaaaaatactccaattaattaaaaagccagctcaaaatgcaaagaaagtcgcagtgggagggggacggcaaattcggcatttgcaaaaagcgcgcgcttaaccaattgccataaacgctgcgtgcgccaaaacgagatggctagtgtgtcgaagtgtcggcgacgctgcacagtggctgtaaaaagttaacaaacatttggcgattcctctgtctgccgttccttcctgctgctgtacttgggcagcgactatagcaacaataattgcaaacggtactctgcacctaattgcctgcaaaactgacaacattaacgggcggtggcggcggcaaagaagtcaatcaactattagcacacacaaacagggcatacatgcatacatacaccactggtggggatatttgtgtctgtatcacatgtttgtcttcttattttcgcccatcggtgtgcgttggtgtgcagcacttggcgttggccttgtcacactcggacattttgcggtggagctcatgctggagcaccaataccattgcgcgcgaagagagagaaagagcgcggcggagagcgaagcggagcggcaaagccgccagccggcaatgtctgcgcccccaatctgaacttgcctcgccctctccgcccctgatctcatctcctcttcaaacccctgctccccttttctgcacacattaacgtcagcctttaagtgtgctttctcaggtgctgccccctgcgcccaccatcccccgctccatgctctttccatcttgcgctctctgcgttctatctacatttttttcgaggtcgcgcgctgctttttccgttgatgttcgttctcgtcaatgtcgtcaatatgcgcaaaaggcagacaaaaaaaaaatgagtggaaaaagtagcatacatacggttgattgatgggcggtgggtggcggtggtgttaggtgtgttttgtttgttgctcgctttttgctcaaattgcaccattttaggggctgttgttgctgcttcctttgtctaattacacattctctgcccgctgtaacggtatgtgcgcatgttttttcagctgctgcgcccttatgcgactcacacacacacacatacacacacacacaaaaccacgcgcactcatacccacacgagcgcaagacacacccacaggcgtctcataagggaggggtggatctctgggggcgtgttggtaggagggggtggaaaatcctgcccattccttttgctccctatttcgtcccaatatttcattccagctcgcgtgacttctttttacttttgggtggtggtggattgcctttgcagggttgtcgctagtttatcaaattccaatacttatttcttggaaaaacaacacaattgagatgaccacgctcatctttgcaatcaacttgtttatgaaaaagattaatcattttttataataaaaaagatgaatacttttcaaatgtagttcaactactcacgaatctacttagaatctattccatactattttcgccaaatttgctagactttcgtgaactttgcactttctactgaaagttcatatgattcgagaagtttccatacatttctttttaccacttcgtggttccgcaaatgatttatcatgcccgcgggacttggctctttatttttgggacgcgtttattgattttcgccttgctatatgtacatgatttagtgactggtctgacgcgcatgtctcataattggttgtggattacttactactaagcaacatgtgctgtatacttttaaagttgcaaggatcccagccacccttcaccacccaactgcgctccccctccccttccccctccctacccactctcaagttcattttttatgcgtaactcagcatagcttgcaagcgttgtaaaatgcgtgtgcacatcatcatccacattggtttcaaacagcccgccaatgcgaacaacaatgtttgaagttcaatcacagccacaaatattcgtgaatcatgcaactttattggcaatttttcacaaatacgtgctacaacaaaaatcgcactaataagcagacagtcggcaaatgtcccgatgtctttgtgtgtgagtgctagtgtgtgtgtatgtatgggggtgttggtgtgcgaaatacgtcagcagctgacgggcagcgggtgcgagcgagagagggcagacagtgcaagtcagcaaacgcgctacaattacaatattttgaatagtagtgtagtctagctctgtattgttatcagccaccagatatgcccgagatagttagcctgcaactggctttacccagacaggcagcactgcaatgataatttagatgatttggttcggaaatatcttacatttcctttggtcagatatcaaaaactaatcttgcataattccaaatactaatcatatgcccgaaaagcatttaaatgaacttcgaaatatatttagacttcaattgactgactcgaaaaaggaaatgaaatggccaaatgatatcagctcttaacctactcactttaatttgataaacgagctccttgtttgcttccgtgttgagttccgaacatgtgattcatgacgcagttttagatggtgatgcagacgcagatagagatgcccccgatggggacgataggattgggtgcaacaatgtggcggaagcccttatcaccggctgattggatggccccgtattggtattggtattggtattggtatgacagaaccagctaaatcaggcgtagacgcaacgccaccttatgcataaatatatctgcataacttatatatcatcgcggattgggcgtgtcggcgataagaaatggaaaataggtagtctaggctgtcgcgaggggacaaggacaagcgggaggaaagtccagataacaagccttccataccttggataaatttatctacgcaaaatgtatataatgtatgtatcttgttggctttccaattgaaatgtttggtttttatttttaatcttaacatgaaatatatgaaagcaattcaaaaattatatgaacaatcaaacaaacatttgtattctacgaaattgttgataaaatagcgtccgatagcattgtttaaactacatcataaacattacttcttactcactcaaatgaagtatttgtttaatgatgtatattttccttaggcattgcagaatgaatatacatatatgcgaactaatgattaaactaatcgttagttaatgggcaatcccttaaatttggtttgagatgttacacttgattattgtaaacatttactcttatatactaaagaccacacctttcatttgttatgtcctctttacagaaatggtggaggccatgaagaaggtcgcctccatggacgtagagctgaccgtcgaggagcgaaatctgctgtcggtggcgtacaagaatgtgattggagcacgccgtgcctcgtggcgcatcatcacctcgatcgaacagaaggaggagaacaagggggccgaggagaaattggagatgatcaaaacctaccgcggacaggtggagaaggagctgcgcgacatctgctcggatatactgaacgtgctcgagaagcatctcattccatgcgccacatccggcgaaagcaaagtattctactataagatgaagggcgactaccatcgctacctggccgaattcgccaccggctccgaccgcaaggatgcggcagagaactcgctgattgcctacaaggcggccagcgatattgccatgaacgatctgccaccaacacaccccatccgtttgggcttggcattgaacttctcggtgagtgattgtgaagagacacgatgtcgtcatatgttttctatatatatattttaaaatccttgcaggtgttctactatgagattctcaactcgccggaccgcgcttgccgcttggcgaaagccgctttcgatgatgccattgccgagttggatacactgagcgaagagagctacaaagactcgacactcatcatgcagctgctgcgcgacaacctcacattatggacgtccgatatgcaggcagaaggtaagttgtaatatcacatccacttgttcggctccgttattaagttctaaatattatactaagaagtagaccccaacgcaggtgatggcgagcccaaagagcaaatccaggatgttgaggatcaggacgtgtcgtaatttaagtaaacccccgcccttccatttaaaacacattatataccttctaaagtaaatataataccatataatatatatgcatacaacaacaacaacaaaatcaacaacaacacgacaacaacttcaagaacaacaacatggaaccaatgcggcaacaacaaccatagcagtcgatcaccacaacagcagcacccgtatgtgtatcaacatatttgcaacatgataacagcaagcaaagcagcaggaacacaaattgtcatccacaataaacagcatggaaaacaacagcacaaaaacagaaaaaaaaaacaactatccaagcaaaatgtttgaaaattgggcggcctggtgggcgtggcgcggctgttgctgcggcccagaatcgaatcgcaacataaaaaattcgcggtactattaagttggcgtcgcttcgcaatttggctccttaacgttagaaaactgcaacatcaagtctactacatttgaattttttgcattcgagaaaccaagcattttattatatttgaataaatattatatttaattatgagaagcaaaaacgaaacaaataaaattcatttaaaccacaaaacacattaaagcacaagcagaaaaagaacgaaagtcgaaacactaaacgaaaattgagaaacaatcacacgagagtaaatcacaaagcaaatttcatcgagttggcatgcattaatttttaaaacaaactttaaatacgacagcaacacgtaaaatacaactttaattttaagccaataataaacgtgagaacgaggtaataaaaatgaaaaacgatttaataagcgcaaacgtaaaagtaaaacataaagtcgaaaatgtaaggaaaaaatacagcaattaatttaaatttaatacatgaataaaacgtaaatggagtaaacgaaacgaaatgagcaaacagaatgaaagacgcaaaaagctaaaaactatattaaatgagaaaaaggaatgttagttaagcgaaattcaaaacgaattcttaagcttaaatttgtatgtatgtaagtgtactgttcaataacaccgacacaccctcacagacacacacacacacgcgcagactaacacacacccaccacccacacagacacccatattacgcatacgagccgtttgttttctcttagcgtttccttgctctctcacactcgcactcatattcacactcacacacccatgcatggtcaaatcacatgaaacgaaaccgaacaatcgaacgggaatttggtggatttctgtttttcgcctttcgttttgagttctccatcgcaatcgcaaacaattttcttcatcatctcttaccttgcgcaacaaagaaacatattaataatatagaaaagtatttgtagttgctaaatacaagaaacaaaaagaatacaaaacaaaacaacggtacatatatatacgtatatatatatatatatattgtatacatatatacttgtatattttctatgcctaccacttatgtaatttgtagagatttcgaacttttcgccccaccacccaactaaccatctctccagagattccgattccaaaactccc

SEQ ID NO: 17729 - DNA, 1513 bp, DROSOPHILA
ccgccgcccgatacggtcacaccgctcgagaagtagagaaaaaagaaggcgacgaaccacaggcagcaagcaaaatcgacgccgcacgtaccgggagcatttaaataattttttctgtggattaattttaccgaaaaggcttcaacacaatgactgagcgcgagaacaatgtgtacaaggcaaagctggccgaacaggccgagcgctacgacgaaatggtggaggccatgaagaaggtcgcctccatggacgtagagctgaccgtcgaggagcgaaatctgctgtcggtggcgtacaagaatgtgattggagcacgccgtgcctcgtggcgcatcatcacctcgatcgaacagaaggaggagaacaagggggccgaggagaaattggagatgatcaaaacctaccgcggacaggtggagaaggagctgcgcgacatctgctcggatatactgaacgtgctcgagaagcatctcattccatgcgccacatccggcgaaagcaaagtattctactataagatgaagggcgactaccatcgctacctggccgaattcgccaccggctccgaccgcaaggatgcggcagagaactcgctgattgcctacaaggcggccagcgatattgccatgaacgatctgccaccaacacaccccatccgtttgggcttggcattgaacttctcggtgttctactatgagattctcaactcgccggaccgcgcttgccgcttggcgaaagccgctttcgatgatgccattgccgagttggatacactgagcgaagagagctacaaagactcgacactcatcatgcagctgctgcgcgacaacctcacattatggacgtccgatatgcaggcagaagaccccaacgcaggtgatggcgagcccaaagagcaaatccaggatgttgaggatcaggacgtgtcgtaatttaagtaaacccccgcccttccatttaaaacacattatataccttctaaagtaaatataataccatataatatatatgcatacaacaacaacaacaaaatcaacaacaacacgacaacaacttcaagaacaacaacatggaaccaatgcggcaacaacaaccatagcagtcgatcaccacaacagcagcacccgtatgtgtatcaacatatttgcaacatgataacagcaagcaaagcagcaggaacacaaattgtcatccacaataaacagcatggaaaacaacagcacaaaaacagaaaaaaaaaacaactatccaagcaaaatgtttgaaaattgggcggcctggtgggcgtggcgcggctgttgctgcggcccagaatcgaatcgcaacataaaaaattcgcggtactattaagttggcgtcgcttcgcaatttggctccttaacgttagaaaactgcaacatcaagtctactacatttgaattttttgcattcgagaaaccaagcattttattatatttgaataaatattatatttaattatgagaagcaaaaacgaaacaaataaaattcattt

SEQ ID NO: 17730 - protein, 260 aa, DROSOPHILA
MTERENNVYKAKLAEQAERYDEMVEAMKKVASMDVELTVEERNLLSVAYKNVIGARRASWRIITSIEQKEENKGAEEKLEMIKTYRGQVEKELRDICSDILNVLEKHLIPCATSGESKVFYYKMKGDYHRYLAEFATGSDRKDAAENSLIAYKAASDIAMNDLPPTHPIRLGLALNFSVFYYEILNSPDRACRLAKAAFDDAIAELDTLSEESYKDSTLIMQLLRDNLTLWTSDMQAEDPNAGDGEPKEQIQDVEDQDVS

SEQ ID NO: 17731 - DNA, 5020 bp, DROSOPHILA
aacagtaaggagcgtttttgatacaagcgtttgaagcgaacttttggaaatgtattgcccgatattgtagccctactaaataatatattataataataatatatatatgaatatgtgtgtatattaaattggtaaaataaagcgatgaaaagtatgcatttttgcgaataatatttcctggaactgcacaggctggaaaagttaacaaattccaacagattagatcttagaaatcttagaaataaaaaaaggcgtgcggcttagccttctttaaaatagataaataaatgggtatagatgagtaactgaaggaaaagtgcaaggtttttaaaatcatttgggaactcaaacatccggttaagttacacccaaccccataatcgccatcatttagtgcgaagtttatgcgtttatagtatcgagttgagcaaaactcaccgtctgcgtgtaaacaaatgtaatgcgtgaagaataaatttaagtttgtataaattaagcagtagatatctcgcaggagggtgtggtatgcgacgacccacgaggactgttgtaaatctagtgacaaacctgtccgtagcactaggtctggaaattcttatcagcgtaggagtcgggccaacttgttctcgataaagaccccaaatgatgctccaaaaattgttttgttattcgcaaatgtaccattaccattacaacacggaatttggaattcgggggcgtggtagtagggcgtagacaacccacccacccgatctctcgtctatttacactagcggaaatgcttgaaaatcacgacgggggccggcaccgcagggaaatttgtaaactgtatgcgagtatctgggctaatcttatcgggaaagccatattatgtatgaacctttgtcataagaagcttagcttggccataaagtcccgaggtgcgataagcggataatcgaggaggctgctactggtagcgccgacttatatgatgggattgatatacgcacacggacggatgcctcagactgggatcgtctggttgacgatcgagcaccgactccagtcgcgcccagcataccagatgaagaagtcgaaatcctacacactggaggcacccgatggcggctggggaatcctcgtctgcattggcatggccctgccttttgtaagtactaacgcagggaactcaatcggccaagaaatgcaaagtcagtgggtatcgaggtggttcttaagtgaatggaaaatagtttaaataaaattcagagtaaactttttttttctagaactaatgatataatggcataaataaagaacgcaattagcataaattcaaacgattacttacagacaagtgcccttgcggctttgccatcgtttggcctggtcttcggcgagttcctgaagagcattggagcggagacgagtgccatggccatcataacgagtgccttcttctcgtcgatgagcttcgccggcctgttctccggctccctgttccagcgctttggaatgcggcaggtgggcgtcactggcggcatcttgtacttcctgggcactggaatgcagttgttcgccacctccacgctacacctgatcatggcctttagcgtcgttcagggattcgccttcgggctgatggtgcccacctgctatacgacattcaaccattattttgtcaagaaccgcgtgatgtggatgagctttgcccagacactgattggcttgggctccatgctatatccgattgtcatgcagaagttgatgtcatggtacggcttccgcggttgcctgctcatcctcacgggactgaatgctcatgcggtgttcgggatgctggtcatgcacccagtggagtggcacatgcgtcgcgtgcccatccagcccgaggagcaggaggaactcaaggagttgagcccaacggtggtgattagagtgcagccggaaacaccgcttaaggctaccagagaggagcccaactttcataccgctgatccaggagcgcgaaagctctcccacgccgaggagcaaatgctgaaggttctgtccagtcgggcctcgagcatcaccagcctgggcaattggtccggacccgtggtggtcagtgacgcctcgccccagatgatgcacagcctgcagacctcacggcgtccgagcacgattgccggtgcatcaggtgcagtagctccagcccacgctaccaaaaagagctgggtgcgcaccatcgtcgacttcctcgatctcacgctgctgaagaagcccattttcgttaacatcgtgctgggcatcacctttgccctctactccgacatcaccttcttcaccatgcagccagtctacctatttgagctgggatacagcagggtgagtcattaccacaatatccacagttaagggctggagcagtaggcttaccgtagtttacactaaacttgctagctctattgaaagaaatgtagatgtggtgggttgattgaaaaattacataaaaattgtatgcatatatgttagcaaagtagaatagacaccatatttatgtgtaattaacataaattttcgcaatctttccatatgtactttttacttttcgtatccctaatcatatccctaatcttgataaccttattcaaaatttctttgagaaaccagttcaaactgaattgaaattatatcacgtggtatagatcgtatatctaaagtcaccttgaacaatctctaaagcagtcgacttgctgcttgtcaagcagtttactacttgccaagcaatatctacgatgcttgcatataatcatatcttgcaaagtaaggggtatctaatagtcgcggaacccgacacccgttgctgatttaattgaatttttgttcttgtgaattatatacaaatagatttcttttaggtatcacaaaatgccaaaatttacttgcgaaaacgcagtttcaataataattactaacttttaacgcacaccaaacttaacactttgagcgatcatataagcaactgataaatctgaaatcgataacaaaaattaagttatatgagatttagaagcaacttaaaagaataaaaaacgttcacaaaaaaaggcagaaacgaacgcgacgccattttgaattattcgaattcactttgtccgctttcgccgttaaaaaacggctaatcggaaacagtattttacagattaaaaaaaaaaaattaaaaaccttgtaaaagaaaaacataaaaataacataagcttaccgtaagaatatataaacgatttctaagtggttttcccagtctgattattgcgattaccaggttatttccagttctttcagtaacttctacatcccataaataatattgttttttttcagcccgacacggccaccattatcgccattggagcggccgcagacttggcatctcgtattttcctggccatcaccgccgtgtgcatccaggttccttcgagatacatttatttggccggagccgttttcaccgtctttgcgagattcggtaggcgaacccttccttgggctccaagaactcccttcctcccactaatctcactcattttcccacagccttcaacggaatcacacagtttgtgggcatggcctgcatcacggcggtcattggatttctgcgcacctggctccacgttccactgcctctggtctttgccgactacttgcccaaggaaaggtgggttcttttggcaagcttatagcatttatcacaaaattataatatatattcctcatatatttccatctcgtttaaggttcgccactggctatggccttttcatgttcatccaaggcaatgccatgttcctcatcggtcccattgttgggtttattcgggacaagaccagggattacattttcgtctttcacatcctaaacggcttcatgatcctgtgcgccgctccttgggtcctcgaagtgctgatcgtcaagtttcggaggcgtaacaaaatcgaacgcaacaacgttgatcacgaggatgttgataaccagggacgtagtgcaatggtccaataaaaaaaactctaccacccccccccccccttcctttttttttaacaaaacatatcgtgaattattgaggtaatttaggtacaattacgagaagtattaagcaaataaaaccaaaacatgtttttagatgggaaattaaattgtcaaaagtatcatttgcgataaagaaaaaaacagcttgttcttaaaatggaaatttgataatgaaacatatatatttaatatttaatataatagcttggaaaaatgaatgtgatacagtatttttcaaaaaaggaaaaaacataaattcaaaaatcacagttaaactgtttaatacttaacggtaatgtcacagttttcggtatttacaaatagagaagtcggtagcttagtacaaccatttggtattcgccgctgtccacgtggcggtcacactaacggggtccaagaaactgaaatttagtaaataatatagaataggatagttaaccaggtgacaatgctgcagcaaatcaagatgctggtgctgggcatcatcacgctgtgccggcgtgccttgtgctgcttctccaggcgccgcaagctcagccacagcggctccgccaccggatccgccgaccaactgcaagcggtcaacgtgatcgtggagcgaggcgacttctccgccaccggcgccacctccgctggccaggccggcggtggcaggacagcgggggcgcgcgagcgggactggaactcctgggacgacagtccgcgcaccgtggaggagcacatcgagcagtaccgccagcgaatggcccagccacccactccgcccaaggaggaacccgaaccggacttcttcagtgtgagttggtactcaggcaatgggcgcggattacgcagattgcgccgcttgcacggcccatagtcgtagcccaattgtagggatattcacgctcgctgatggtgggatagtgggctatgttggggctaaatggcgacatccccacctgtacacgtatctaggtgacttcggcgt

SEQ ID NO: 17732 - DNA, 1692 bp, DROSOPHILA
atgcctcagactgggatcgtctggttgacgatcgagcaccgactccagtcgcgcccagcataccagatgaagaagtcgaaatcctacacactggaggcacccgatggcggctggggaatcctcgtctgcattggcatggccctgccttttacaagtgcccttgcggctttgccatcgtttggcctggtcttcggcgagttcctgaagagcattggagcggagacgagtgccatggccatcataacgagtgccttcttctcgtcgatgagcttcgccggcctgttctccggctccctgttccagcgctttggaatgcggcaggtgggcgtcactggcggcatcttgtacttcctgggcactggaatgcagttgttcgccacctccacgctacacctgatcatggcctttagcgtcgttcagggattcgccttcgggctgatggtgcccacctgctatacgacattcaaccattattttgtcaagaaccgcgtgatgtggatgagctttgcccagacactgattggcttgggctccatgctatatccgattgtcatgcagaagttgatgtcatggtacggcttccgcggttgcctgctcatcctcacgggactgaatgctcatgcggtgttcgggatgctggtcatgcacccagtggagtggcacatgcgtcgcgtgcccatccagcccgaggagcaggaggaactcaaggagttgagcccaacggtggtgattagagtgcagccggaaacaccgcttaaggctaccagagaggagcccaactttcataccgctgatccaggagcgcgaaagctctcccacgccgaggagcaaatgctgaaggttctgtccagtcgggcctcgagcatcaccagcctgggcaattggtccggacccgtggtggtcagtgacgcctcgccccagatgatgcacagcctgcagacctcacggcgtccgagcacgattgccggtgcatcaggtgcagtagctccagcccacgctaccaaaaagagctgggtgcgcaccatcgtcgacttcctcgatctcacgctgctgaagaagcccattttcgttaacatcgtgctgggcatcacctttgccctctactccgacatcaccttcttcaccatgcagccagtctacctatttgagctgggatacagcaggcccgacacggccaccattatcgccattggagcggccgcagacttggcatctcgtattttcctggccatcaccgccgtgtgcatccaggttccttcgagatacatttatttggccggagccgttttcaccgtctttgcgagattcgccttcaacggaatcacacagtttgtgggcatggcctgcatcacggcggtcattggatttctgcgcacctggctccacgttccactgcctctggtctttgccgactacttgcccaaggaaaggttcgccactggctatggccttttcatgttcatccaaggcaatgccatgttcctcatcggtcccattgttgggtttattcgggacaagaccagggattacattttcgtctttcacatcctaaacggcttcatgatcctgtgcgccgctccttgggtcctcgaagtgctgatcgtcaagtttcggaggcgtaacaaaatcgaacgcaacaacgttgatcacgaggatgttgataaccagggacgtagtgcaatggtccaataa

SEQ ID NO: 17733 - protein, 563 aa, DROSOPHILA
MPQTGIVWLTIEHRLQSRPAYQMKKSKSYTLEAPDGGWGILVCIGMALPFTSALAALPSFGLVFGEFLKSIGAETSAMAIITSAFFSSMSFAGLFSGSLFQRFGMRQVGVTGGILYFLGTGMQLFATSTLHLIMAFSVVQGFAFGLMVPTCYTTFNHYFVKNRVMWMSFAQTLIGLGSMLYPIVMQKLMSWYGFRGCLLILTGLNAHAVFGMLVMHPVEWHMRRVPIQPEEQEELKELSPTVVIRVQPETPLKATREEPNFHTADPGARKLSHAEEQMLKVLSSRASSITSLGNWSGPVVVSDASPQMMHSLQTSRRPSTIAGASGAVAPAHATKKSWVRTIVDFLDLTLLKKPIFVNIVLGITFALYSDITFFTMQPVYLFELGYSRPDTATIIAIGAAADLASRIFLAITAVCIQVPSRYIYLAGAVFTVFARFAFNGITQFVGMACITAVIGFLRTWLHVPLPLVFADYLPKERFATGYGLFMFIQGNAMFLIGPIVGFIRDKTRDYIFVFHILNGFMILCAAPWVLEVLIVKFRRRNKIERNNVDHEDVDNQGRSAMVQ

SEQ ID NO: 17734 - DNA, 4025 bp, DROSOPHILA
ggcgatgtcgtcatgacgtggtggatccaagctgcgcattttgaagacatacggcattcgctcgggcacatagctgtccctcgcatgcttcagattaaggagccgctcgaatatcccgccaaagtagcaatcgtggtagtgacgacgcacttctgcgggttcgtggcgctggtccagagcctgggagaccgcctcccagttgccatagccgtgggtgcgaagtgttttcagcagtatgcgctcgtcccgtgccgtccagtgtggctcatcggcgaaaacctgtatgttgtcgcggactatgatgtaagcgtggttattgcggtgagaaaaggcctcctttccacgtgagaaacattgcaggcagagcagggtgtcgaggcactcggagcacttaatgtacggctctgtgagactgcagcgacatgtggcacaccgattggcatcctttgtagccgatggaacactgctattctggtcccgcgtcttttcctccatctcctccaagtacctgtgcaacgtgtgcggattatacaaaaccatggagttcctggtgtgttcattctgatgtgcatggatgaaccgcttaacctgtggccccagtggctcaactgcaaagaggcaattcagtgtggtaaaaatgtggaggagtgccacttttggggcactcgaagccaaaggtttcagccagtttcacttgtaagttgcatttcggttggtgtagggcgttggttacctttgggaaactgcaggtcggcggcgtcctcatccaccatatccacggggttcataaaagacatagtgagctaagaactgctcagtttgttaaagtttatattaagaaattctaatttgcacaataaaatgtcgctgtttttagtgatgagaaaggcagggctataactggcgaagaagctatcgataggtgggtcgcatcgtgcgtagatacgttggtcacactagcaagcatgttgagtttatcattccgggtgttttgattttgttcggaattcttggtttttttccaagagagttatgtccctggtgccagaagcctctacctcgagagcgcccaagtactgctacttcttcaagaccctgctggtggaggaactggagctggaaacttcctaccacaacctgcactacggtcagtgcgcattaattggacgtctggcgttcaaggcgaatcagtaccgcctagaaaacgtgcgcgttaagtgtttgccaaagtaagtttttctatattacctatccatccggtccttaccaatgatgctgcatctttcaggaagtactccttgggcgagggcaccgtatccttgcttattcttggccttacccatgacaaagtcgtcgaaaatcgcgtgagtaccggccgctactgcattgtgcgtggtgaagtggtgctacataatgtgcagcatcccaaaggtgccaaactgaccgccggcggtgtctacgacaagatcaatagtctgtccaacgatccgttggcccaaaaacagtatctcagcgcgctacttgccacctacagaccggccatcgacttatggtacatccaggtcatcgacagagccgaggacttgctgactcgcaggctggagatgagaagtctgatcgagaaatgaacacacaccacctgaccacctcgcgaaccaatccgcagttctatatattcagtcagctctttggtaacgatttcgactggaataattgcaattgggggggcattcaaaacgttacctggaaagaattctggcagcgtgaggggcatgagctgctcgagcaaaagtggcacaagcggtttcccgaatacaaagatcttatcgaggtggtttcgtcggaggagcaaggcctttggcaggaactgtgggagaagcacgccagcgattacagtgaaaagttctggtatatatttagctgtgcctttgagaactaccaacacgatttggccaaatcatttggccttgacgtcgctgaaaactcagaagatgttgaggaggacttgcagaacctaagccttacaaataagccaataaaatcgaaacagcaaagggtcacagagaaagaggaggacgaatcatacttgactgccaacgacgatcccgaggattgtgacgaggaacaacagctgcgccttctcggattgccaacatcatttgcgtcgaaggcagatataattaattatagaaaggaaagaaagacacagtacgaactatctagcagcgatagcgaggacgatcatgatctgttgaccatggagaacaacgaaaacgaggctctgcacggcgttcagagcggttctgttaaaaagaaaaaacgacggcaaaggcaaataaaaaaactcaaggccaggatgccagagtgcatgcaagaggataacaacaaaatggtcaagtactgggtcaagcgattctcgctgttctcccgcttcgatcagggcattcggctggaccgcgagagctggttctcggtgacacccgagaagattgccaaacaaacggcccgacgactggcctgcgacgtgatcgtagatgctttctgtggatgcggcggcaatgccattcagtttgcaaacacctgtggacgcgtaattgctgtggacatcgatgccgagaagttggccatggccaagcataatgccggcatttatggtgtggcccataagatcgagtttatccacgccgattttctgcagtttgcggccagcacaaagctgcgcccaaatgtggttttcctgagccctccgtggggtggtcctgactaccaaaagcaggccacctttgatatcgaaacaggtctcctgcccgtgggtgctagccaactgatgcagctgtcccgtagcctggcatctgacgtagctttctttctgccacgcaacgccaatatgaagcaggtggtcgctctaagtggagttgggcagcagtgcgaggtggagcacaactatctggacacccgaatggttgcgctcactgcttattatggtaaaggaatcataaagggttcagtgggagaagatgagtaggattcgattgagagtaattttaataacatcattgtttttatataaataaatatatttaatttcatacatatgtatagttgaatggatttaaaaaaaaaaacgggctcataatttcatggcattttttgcttattattagatataaatcatattcaaaacgagccaataacataatatgaaaataaatctatgaaaggcattttaactaatatgtaatacaaatgatttggtaagtatctttaattaaactcgaagcatataagcacacagagttcacaaattcctgtaattatggatcaaaggaaaatgttggctatggtcaacaacttttttgttcattgtttatcgccttaagtttttccctctttttgccacatagaaagataggagaaaagttgactaatgaataaagccgcctcacatgtaacgcaagagtaaaatcttttcacccatcccttcagtgcagtgattgttgccaagtgaccggcgatgccaaagagtccaagctctttagccaatttagatggcttaacaaagctcaactggccaatggtcaatggtcataaccataacgttccgcaatcccttcttgcaactggcattggacttttaattaaaacgcaaaaggaaacaaagcgtgcgtcaatttttaagaactttgtgccacaagttgtgacttggcccaaaagccatggaacacaggcagccagccgcatcctgctgaacctggcaacgtcggttcgggggcaattaacatgctcgtctcgcggcgcaggcagcagttccttcggcattccacagcagacggcagacgatgagccggaaccagaagcaacaacccttttcatggcttacagcttacttagctctttcggatggggtgcgttcgcttgaaggggcttgtggtgtggccagtgggcggtgggcggggcatgtgcggaatttatagctgccaactggcaacagagatatttaccccttcctccattatcccccaacc

SEQ ID NO: 17735 - DNA, 1966 bp, DROSOPHILA
ttcggaattcttggtttttttccaagagagttatgtccctggtgccagaagcctctacctcgagagcgcccaagtactgctacttcttcaagaccctgctggtggaggaactggagctggaaacttcctaccacaacctgcactacggtcagtgcgcattaattggacgtctggcgttcaaggcgaatcagtaccgcctagaaaacgtgcgcgttaagtgtttgccaaagaagtactccttgggcgagggcaccgtatccttgcttattcttggccttacccatgacaaagtcgtcgaaaatcgcgtgagtaccggccgctactgcattgtgcgtggtgaagtggtgctacataatgtgcagcatcccaaaggtgccaaactgaccgccggcggtgtctacgacaagatcaatagtctgtccaacgatccgttggcccaaaaacagtatctcagcgcgctacttgccacctacagaccggccatcgacttatggtacatccaggtcatcgacagagccgaggacttgctgactcgcaggctggagatgagaagtctgatcgagaaatgaacacacaccacctgaccacctcgcgaaccaatccgcagttctatatattcagtcagctctttggtaacgatttcgactggaataattgcaattgggggggcattcaaaacgttacctggaaagaattctggcagcgtgaggggcatgagctgctcgagcaaaagtggcacaagcggtttcccgaatacaaagatcttatcgaggtggtttcgtcggaggagcaaggcctttggcaggaactgtgggagaagcacgccagcgattacagtgaaaagttctggtatatatttagctgtgcctttgagaactaccaacacgatttggccaaatcatttggccttgacgtcgctgaaaactcagaagatgttgaggaggacttgcagaacctaagccttacaaataagccaataaaatcgaaacagcaaagggtcacagagaaagaggaggacgaatcatacttgactgccaacgacgatcccgaggattgtgacgaggaacaacagctgcgccttctcggattgccaacatcatttgcgtcgaaggcagatataattaattatagaaaggaaagaaagacacagtacgaactatctagcagcgatagcgaggacgatcatgatctgttgaccatggagaacaacgaaaacgaggctctgcacggcgttcagagcggttctgttaaaaagaaaaaacgacggcaaaggcaaataaaaaaactcaaggccaggatgccagagtgcatgcaagaggataacaacaaaatggtcaagtactgggtcaagcgattctcgctgttctcccgcttcgatcagggcattcggctggaccgcgagagctggttctcggtgacacccgagaagattgccaaacaaacggcccgacgactggcctgcgacgtgatcgtagatgctttctgtggatgcggcggcaatgccattcagtttgcaaacacctgtggacgcgtaattgctgtggacatcgatgccgagaagttggccatggccaagcataatgccggcatttatggtgtggcccataagatcgagtttatccacgccgattttctgcagtttgcggccagcacaaagctgcgcccaaatgtggttttcctgagccctccgtggggtggtcctgactaccaaaagcaggccacctttgatatcgaaacaggtctcctgcccgtgggtgctagccaactgatgcagctgtcccgtagcctggcatctgacgtagctttctttctgccacgcaacgccaatatgaagcaggtggtcgctctaagtggagttgggcagcagtgcgaggtggagcacaactatctggacacccgaatggttgcgctcactgcttattatggtaaaggaatcataaagggttcagtgggagaagatgagtag

SEQ ID NO: 17736 - protein, 178 aa, DROSOPHILA
MSLVPEASTSRAPKYCYFFKTLLVEELELETSYHNLHYGQCALIGRLAFKANQYRLENVRVKCLPKKYSLGEGTVSLLILGLTHDKVVENRVSTGRYCIVRGEVVLHNVQHPKGAKLTAGGVYDKINSLSNDPLAQKQYLSALLATYRPAIDLWYIQVIDRAEDLLTRRLEMRSLIEK

SEQ ID NO: 17737 - DNA, 5022 bp, DROSOPHILA
tcaaacgattatatagatgggcggaagggatcggaagctgcaaggagcgagcattcgtgtcatagcaggcacacaagttacaaaaactaaaagtttacgaaatacgttcattatttcattttggtttttgcaattgtttttttcttttcttttttttttatgggaaatatttgggggttggatttggatttggctcacctagagctggggccggtatggcaccatctttggtcagtacaactgtgtggggtgtttgagagaaaacaaaatgaaaatcatataaataacgctggtcaatcattatcattatcatcatcatcatcaataataacattgtcaaagcagacgcataaaacataacttagtcgaaaccacaaatacgcattaattcttatgtgtattaaatattatttttggtgtaaatgtgcgttttagttagacagccgcaaaacccctttttatttttaaattacaaaatatacaaatggcatgatggggttatacaagtattcaatttgcttttccccacaaattagtggcatttattttggatttcttaaagccggggaacatttttctagcgtgcgctgccaacgtaaaagaaacaaaattgtaacattttcattaggaaacacacattcattcgctggcaactcaatttctcagtttcagttagtttcagtttttggccaccaaagaagttgatgtgaaaagttcccaaaaacaaacaaaatataacaacggagaacaaaacacaaaaaaaactaaaagaaactaaaacttgaggaatgttaggaaactaaacaatagcagcaaaaacaatgcacacttaaattgagcagacttttattgctattttcgtagcttttgctgctgttgcatttcatcgtaattgcatttcttagccgaacatttgaacttgtttcattatgtggcttaaacttagctaccacgtatggtatgtatgtgaatatataggtgtgggtatgtgtgcgattacatgtgtgggtgtgtagtttgagtgtgttgagtgttagggtcacttaccgttgggtactgctgtcacttttttggtttgtacacgtgcagtggcgttattcaccttcacaattggttatttgttttaattttttgatagatcagcgagcgtggtggttgtagttgttgttgttggtttggtgatgaatttttaaaattttttttattatatcatatacacacatatgaacagagtatatatatatataatttttttttttaaatttcgcatgtatagaaaatgtagaaataaattatgtgttagttaacaattacgaaaatctttgcaaatagtgttgaaagtgtttgtggaagtgtgcgtgtgtgtcggaaaggcctttaaaagttcatttattgtaattttatgaaaaaaccgaatgattattatccgtttaagctcatataaaaagtaacaaagaaaacatttatgtagaagagtatttacataaatactgaatactttttgaattccatttgtttcgactgagaaaattaatttttgaacgctttcagtgagcggacggacgatcatttccgtttccggttgctccgcacacacatgaaaatgcatacatgtatggcatccatttgtggacactgggtcttaattagactcgcgcgatttccgttgccatttgctggggaaataacattccatttcagccttttatgcggctcagttaatttgtttaaccaaccgacggacagacgtactttttcgtactttgcgcattttcagcatattttaaatgccaattatttgcggctcacccagtgagcattaatcaaaagggaaggcgaaaatgagaaatgcgtaattaatttttaatgaaaggcaaataagaatcaatcactgtgcgctattccttggattaaatgaaaacagataaataaaaaagggtagttggatggtggatttttaaagccatatctcttcggcacccaaggattaaaagttgaaaatcaatttctttccgccactcctgtgatacattctacataatatatattagttgtgtgtggtgtgtgtgtgttggttggtaagttgtatatatgatatggcatgcacccacctcgattttgcgtccctcaaccacggtgccgtgtagacgttcgcgtgctcgttctgcatcgttgctgttagcgaatgttacaaaaccgaatccctgccattcgcaatcaaacatgcaattaaagaaacatatagagtatatagattacgattttcaaaaaactaaaaaaattaaacgatttggtacaacaaagtcagctctcttcttcgggttttgttgaagtcgtagtatatttaaatgtatatatatatatatattatgtatattttaaatagataaagctaaagctacaaatacatcaacaaggcggccaaggacatgcttttcggacaggggccattggcacatctttgtactccgggggtggtttgaagtgggtcgggattgttggattgggatttttggggctgggtgttttttttttatatttttggattggcgactgcgacatgcacgtgccctgcttttgcaacctactactcattccgccacttccctcgcctgcctgccacgctctccactcattctttcgccaaaaactccttgagcatctcaaggtgttgggggcttcgttcctgaattatgcacaattcctggtgctatggcaactatgcaattattttcacctggctccagctgcagtccgggcataataataatgctgcaaaaaagacaagtcgacaaggttgccatggcgacggacaaagacatctctcctcatctgggaattcttaaagtgcataattcaaatgaattgtgcgacaattagatgcaaaatgccgcgcacaattggcggcagagagagatggcgacaccagcgagacagagaggtacacagagagcgagcaggcaggcgatacagttgcagagaaagagatggcgtgcttctttctagaaagtatagaaagtttggcgcaacttaccttgctgccgcgttcgttgaagatgatttccacgtccagaatggtgccaaattgctggggaatagaaaaataataaatattaattttcgaaatgctttcaaagggatagtcaagtttgtaagaagtgtctaacgcagatcttcgtaccgtgtataatttgaattttatgagcgcgatagaaagaggtaaacatttttatttaaagagacacagtcagtttctatttactttttcaatatttcatttctttcctgaaggtctgattttctaggtctgattcttcataaagggtactaaaaataaaatatattcaatccaccacatccgtactcaccccaaacatggctctcagatcgggatcccggaagcggaacggtatgttggagacgtgcagccgtttcggctgacttttggcatcgagggaggcggccgcaacggcggcaaccgattgggccgggactagggcgctgctgagactagtggccacattggcgctgggcgacacgatgccgctggccgcagcggcagctgcattcaggtgggcgatcacctgcgatgtgctggccggcacaacggcacagcctgttggtgcaccaccattggcaatgctgtccaatccggtggtgggcaaaagtccaacgccactgctgctggtggccgccaatgtgccggaagctatcgaactgcccgtcacggaggtgcccgacgattgcatcgacgtgggactgctgcacaggagcggctgttgttgctgttgctgctgttggtgggcgggcggcgtctgcaggagcggttcaccactggccaccggcgatgtatcaccggacatgctgccctcggtggcgctgccattgagggtcagtccgcatccgcccgcctgcgaggctgttgcgctggacggggagttgctgagcggagaactgggagtgccgccgcctcctccgccgccgccgccgccagtatttccaccgccgccggcattttgcatggcggagctctgttgtgattctgctgcctcattggcgatcaatactgtggactgcaaggaagaacataaaataataaatgaattagtgggggtttgtattaacattaacataatttaaaatacgatttactttaaaatataataacttaaaagaaaaatgcttaaattttccaatgttccatattttaacaatatactgcaattctattaaaataataaatctttccgatttctatttctatttgacgatgttatcttgcttgccttaaaaatttgcgttcgcgaaaaccggcaaaagtgaaaattaaatatttccaatatcatttggtggaaaagcgatttttgtgaaactttcaaaagcactccacctacatgccgttgttgtttgcagttgatttgcgtgtattttttctgcagttgaattttcagtgctgcctggcaaatcgaatgcgaacaagtgccgcaataaataaacaattgaaatgaaaatacaattttcaagtggtttacatcccgggagagatgaaaatcctgcgagaggtgcggaaaaactcggcatacacatctgtatatacatacatgtgtaagtgtgtgtgtgtgtgtgtatgtgggtttgacccaataaaaaaaagtcatatatatgcacacacggggatataaatacatacagacacagaacagagaaaatagtagctggaagtcccatacatacacacacacacacacttatgaatgtacgtacgtattttgtagcacaaacttgtgttgacttatgcaataaaactgtcgcgcaaactgttgcaatatacccaatccaccacagcgcagcagaaaatccaccaacgtgcccgcgaaaatgtttgcattttgtatttctgcattattaaaactgaaaatgtacttgccatcgatggcatggcatggtatgctattgttgttccaatgccccaactcccccaccacctacggcagtttccccgatccggaataatatgaaata

SEQ ID NO: 17738 - DNA, 903 bp, DROSOPHILA
atgcaaaatgccggcggcggtggaaatactggcggcggcggcggcggaggaggcggcggcactcccagttctccgctcagcaactccccgtccagcgcaacagcctcgcaggcgggcggatgcggactgaccctcaatggcagcgccaccgagggcagcatgtccggtgatacatcgccggtggccagtggtgaaccgctcctgcagacgccgcccgcccaccaacagcagcaacagcaacaacagccgctcctgtgcagcagtcccacgtcgatgcaatcgtcgggcacctccgtgacgggcagttcgatagcttccggcacattggcggccaccagcagcagtggcgttggacttttgcccaccaccggattggacagcattgccaatggtggtgcaccaacaggctgtgccgttgtgccggccagcacatcgcaggtgatcgcccacctgaatgcagctgccgctgcggccagcggcatcgtgtcgcccagcgccaatgtggccactagtctcagcagcgccctagtcccggcccaatcggttgccgccgttgcggccgcctccctcgatgccaaaagtcagccgaaacggctgcacgtctccaacataccgttccgcttccgggatcccgatctgagagccatgtttgggcaatttggcaccattctggacgtggaaatcatcttcaacgaacgcggcagcaagggattcggttttgtaacattcgctaacagcaacgatgcagaacgagcacgcgaacgtctacacggcaccgtggttgagggacgcaaaatcgaggtgaataacgccactgcacgtgtacaaaccaaaaaagtgacagcagtacccaacggtaagtgaccctaacactcaacacactcaaactacacacccacacat

SEQ ID NO: 17739 - protein, 287 aa, DROSOPHILA
MQNAGGGGNTGGGGGGGGGGTPSSPLSNSPSSATASQAGGCGLTLNGSATEGSMSGDTSPVASGEPLLQTPPAHQQQQQQQQPLLCSSPTSMQSSGTSVTGSSIASGTLAATSSSGVGLLPTTGLDSIANGGAPTGCAVVPASTSQVIAHLNAAAAAASGIVSPSANVATSLSSALVPAQSVAAVAAASLDAKSQPKRLHVSNIPFRFRDPDLRAMFGQFGTILDVEIIFNERGSKGFGFVTFANSNDAERARERLHGTVVEGRKIEVNNATARVQTKKVTAVPNGK

SEQ ID NO: 17740 - DNA, 4734 bp, DROSOPHILA
cacggcataaacacagatgagcgaacgttgcgttgcaaaagccacatatttgctatttgccgatatgctgaggctggtgatcgctccatgcttgtttggtatcaagagcagaaacttgccgttccgattgaacagatacagcgatccggatgaggcaccgaaaatgatatagctgtcggagatgtcgaagcaggtgtactgaagggaggaagggcgtgcattagtgaatggtctgctatcaaattgcgggtgagactcaattggattgacttgctctcaccttgatgcgattgtggtgtttcagcggcagcgacagcgacagcgaaaaatcaataaagttcgtcaggcagtaggcgtcggccatcttgtgggctttttcgttgtccgaagcgttcgttaatcacatagctcgctttgaaatcgcgattacgttattgcattgcacatcgcatgcatttatttacaaaaattatgtttttatcagcgcgacgagtaattcgtgtacataggtcgttggaactgtctggcagctctgttagtgctggcaggtggtcgataacaagtggagtgtgattagagcgattactttttatttcaaatactttgtaataaacttgttagtgtcttaattaaaacaattcaaatcttcaatttgaaatgtatattaaaatcaaaagtttcatgaaatcacagacgttaaagtatcgatacatttagtgctgtaaaatgacagctggcttgtttacccttataagcttcaagtctggcaatactgcgaccagcagctgtcgtaaaacttatccttcaaactttcaattaaaatacgtttttctgaaaaaatcgcttatcaaactcccatacataaaaataaaactattattacacaatgtttactaaaaaaaattggatatttaccacccagccgaacagctgttcgctgctacctcccccaacccataaacctactgtcaagtaaacgtcaaaacagtcgcgcgactcgccaagcgaaaaaacctgcagaaaaattgaaatgcggcgtgaaagatactagaaaaataacaaataaacaccgggtatccgcaattaaaacgcttatgtacatagaagccaaagtgtagcaatgggcgacaaggaggagcccgtaacacccgctccctcgcccacggaggagggtatggccaatattgggtctgctggagccggggatcagccgcaaacttcagggaataataccaacgttaagatcgtgatcattggagctggaatggctggcctatcggctgcaaatcaccttttgcaaaacggctgtgacgatttccttattctggaggcacggggccgggtgggcggacgcattgtgtccataccgctcagcaataatcagaaggtaccatttgttatataaccccctcaagtccaaaaaccaaaacaaaccatcataggcgaccatatggtattaaaggaaaaacacttccgactcggaaaaaccacgagcatgttgtaacacattcttcgccccagccagttgattatagatttttccacggactgcgcagtcggtcagctgttcacgcttttcattaaagctatttttatacatgttcctgttccctctatttgcctattgttagctttatttgttacatatgcttacatgggggtaattaatgtaattgcatctgtcgtgaatcttactcacgattttcattccgttcattagcatagttttgatcggtttggcggcaccttatcaagaaatttgttatacaactttcttcggcaacgtttgtcagattagataggggttttctgaattaagccaatgatgacgtatctagtgcaatgccctgaaaaactcacgggtttgcgggctaacgatcacgtagtcttagttatgggactgaaaaatttattatttttccagttttccacattgtttcacttcacatgtactaattacgcccctaaattatctaatataggtcagttcttatcttttttatactagaaagttaaatgttaagctttgcctacttatctgagatgttcctatttaaacacttctatttcacagatagaacttggcgccaactggatacacggcgttctgggcaatcccatctttgagctggccgtacaacatggtctagtcagcgtggtcaacgtaccgaaaccgcacaaggtggtggccaccacggaggacgggcaccaggtgccttttaacatacttcaggagatctacgaggcgtacgtctgctttctgaggcggtgcgatgagtatttcctgtgtcagtacagcccgccgccggatatacacagcgtgggagagcacattaactatgagatcgaaatctatctgagcggggtccaggatcccaaggaaaaacgcctcaagcaatccatatttaactgcctgctcaagcgagagacctgcattaccggctgcaacaacatggacgaggtggatctcctcgaacttggtaaggctaagctaaaaataaagtatatacaatatgaatatatattttattttaggcagctacactgagctacaaggaggcaatatagtgttgccaactggttatagctctattctgcgaccgctgggtgctcagatagccaagcagtccatactgaccaaatgcccggtgaagaaaatccactggaagcggaaaaagaccttcactgggctggagacagtcgacgagaactcggaggacgagcattcagacgactctgaacgaacggtgacggaagtgccgacgggggaaattcgtggcgcctccgtggagtccaacaccagcagcaattgtgattatcctgcaggcaacgtgcgcatagattgcgaggacggtcgagtgttccatgcagcccatgtgatatgcaccataccgctaggcgtactgaaaaacacccatcgcactctcttcgatcctgtgctgccgcagtacaaacaggagtccatcgagaatctcatgttcggcaccgtggacaagatcttcttggagtacgagcgaccattcctcagtgccgatatatcagagattatgctattgtgggacgacgataagcgggatatgaacagctccgaggaggagctggccagcgaagcgtatctcagcaagaattggttcaagaagatatattcgtttgccaaggtgacggacacgctgctcttgggctgggtctcgggccgggaggcggagtacatggagaagctcgaccatgaggcagtggctgaaaagtgtacggaaatacttaggaactttctgcaggatccttacgtgcccaagccaaagcgatgtgtttggtaaggcaaagaaacattatttggttaagaatgttgtatattaaagaaaaatctatttgtagtaccagttggaagtcgcaggacttcaccggtggcgcatacacctcaataccggtgggcgcaactcaggaggacatcgagaacctcgcccagcccctctatgccacgccccaagccatgaaggtcagttctacaagcttgcttccccggcaattgttcacattttaatatatttccccagcccgccatagtctttgccggagagcacacccattccagtttctactctaccgtacacggcgcctatttgagcggacggacggcagcgcagcatttgctggcgagcgatgagccagacgaaatcatcatggagtcggacggcagtgatctgagcgcctggatacagggcattgccctggactgagtctaagctaatcaacgaccactcatcgattttgtattataatttattaacgttattttgtacactctttaaacgctttttagctagtgatatttaatttgttcgattgtaatttattttgctagcgtcgtaaaacgatttaactcatttttgtacatcccttgtgagcatttgttttattttgttgatgcaattattttgtaatttatttggaacccgcttgtacattactataaataaaagttacgaattagctgagctgatcaatgtgctgccaactcgaacagaccgtgcacccgcagcagctttcactgtacttggacgaaaaagtgtgcacaaagacataatgttgtttagacctaattaccgattagcaaccataagtgtatgaatacaaatatattgcctatttttataaattcgtatttaacgtagaaaaggttgcaccaaaaggttgacactaagacgatcgaacaatgagtgcaactaatgtatatttgaaagtaactattgttaacgttaactattttgctaactaaattatgcattggttgactctttaaggcggaaaaggaaaagttggtattcataagtccgttctaacacttggatctgcatatttatttgtatttgtgacaaaaatatcgacttgtacgcataaataaataaattaaataaataaattattgaatgaaaatgtataattttaaatagtaaaacacaagtcgaagaaagttttgattttttaacgatggggagagatctgtattataaaaatcaagttgtgcttttggttttaggccaacaaaagtctataattcaaaacatatgtagatatcctaaattatttgaaagtctttcgcattgcactcgtaaattttttgtggatacatttactcgaacttagctaaggtgtggtaaaaaagctaataaggataaggtaggtggaaatgaaaaggattgactaagctgaattcaagaatgcattaaaaatggcttg

SEQ ID NO: 17741 - DNA, 1872 bp, DROSOPHILA
ccaagcgaaaaaacctgcagaaaaattgaaatgcggcgtgaaagatactagaaaaataacaaataaacaccgggtatccgcaattaaaacgcttatgtacatagaagccaaagtgtagcaatgggcgacaaggaggagcccgtaacacccgctccctcgcccacggaggagggtatggccaatattgggtctgctggagccggggatcagccgcaaacttcagggaataataccaacgttaagatcgtgatcattggagctggaatggctggcctatcggctgcaaatcaccttttgcaaaacggctgtgacgatttccttattctggaggcacggggccgggtgggcggacgcattgtgtccataccgctcagcaataatcagaagatagaacttggcgccaactggatacacggcgttctgggcaatcccatctttgagctggccgtacaacatggtctagtcagcgtggtcaacgtaccgaaaccgcacaaggtggtggccaccacggaggacgggcaccaggtgccttttaacatacttcaggagatctacgaggcgtacgtctgctttctgaggcggtgcgatgagtatttcctgtgtcagtacagcccgccgccggatatacacagcgtgggagagcacattaactatgagatcgaaatctatctgagcggggtccaggatcccaaggaaaaacgcctcaagcaatccatatttaactgcctgctcaagcgagagacctgcattaccggctgcaacaacatggacgaggtggatctcctcgaacttggcagctacactgagctacaaggaggcaatatagtgttgccaactggttatagctctattctgcgaccgctgggtgctcagatagccaagcagtccatactgaccaaatgcccggtgaagaaaatccactggaagcggaaaaagaccttcactgggctggagacagtcgacgagaactcggaggacgagcattcagacgactctgaacgaacggtgacggaagtgccgacgggggaaattcgtggcgcctccgtggagtccaacaccagcagcaattgtgattatcctgcaggcaacgtgcgcatagattgcgaggacggtcgagtgttccatgcagcccatgtgatatgcaccataccgctaggcgtactgaaaaacacccatcgcactctcttcgatcctgtgctgccgcagtacaaacaggagtccatcgagaatctcatgttcggcaccgtggacaagatcttcttggagtacgagcgaccattcctcagtgccgatatatcagagattatgctattgtgggacgacgataagcgggatatgaacagctccgaggaggagctggccagcgaagcgtatctcagcaagaattggttcaagaagatatattcgtttgccaaggtgacggacacgctgctcttgggctgggtctcgggccgggaggcggagtacatggagaagctcgaccatgaggcagtggctgaaaagtgtacggaaatacttaggaactttctgcaggatccttacgtgcccaagccaaagcgatgtgtttgtaccagttggaagtcgcaggacttcaccggtggcgcatacacctcaataccggtgggcgcaactcaggaggacatcgagaacctcgcccagcccctctatgccacgccccaagccatgaagcccgccatagtctttgccggagagcacacccattccagtttctactctaccgtacacggcgcctatttgagcggacggacggcagcgcagcatttgctggcgagcgatgagccagacgaaatcatcatggagtcggacggcagtgatctgagcgcctggatacagggcattgccctggactga

SEQ ID NO: 17742 - protein, 583 aa, DROSOPHILA
MGDKEEPVTPAPSPTEEGMANIGSAGAGDQPQTSGNNTNVKIVIIGAGMAGLSAANHLLQNGCDDFLILEARGRVGGRIVSIPLSNNQKIELGANWIHGVLGNPIFELAVQHGLVSVVNVPKPHKVVATTEDGHQVPFNILQEIYEAYVCFLRRCDEYFLCQYSPPPDIHSVGEHINYEIEIYLSGVQDPKEKRLKQSIFNCLLKRETCITGCNNMDEVDLLELGSYTELQGGNIVLPTGYSSILRPLGAQIAKQSILTKCPVKKIHWKRKKTFTGLETVDENSEDEHSDDSERTVTEVPTGEIRGASVESNTSSNCDYPAGNVRIDCEDGRVFHAAHVICTIPLGVLKNTHRTLFDPVLPQYKQESIENLMFGTVDKIFLEYERPFLSADISEIMLLWDDDKRDMNSSEEELASEAYLSKNWFKKIYSFAKVTDTLLLGWVSGREAEYMEKLDHEAVAEKCTEILRNFLQDPYVPKPKRCVCTSWKSQDFTGGAYTSIPVGATQEDIENLAQPLYATPQAMKPAIVFAGEHTHSSFYSTVHGAYLSGRTAAQHLLASDEPDEIIMESDGSDLSAWIQGIALD

SEQ ID NO: 17743 - DNA, 4054 bp, DROSOPHILA
tcgtagctgaatccaaagaccctggacgcaatgataaggctgcccgtccagttgaattgcacaaccgataaggttggaaccaccaccatcgggggaccatcatcatctcaagtgcatcgatacgggcgttgtagtgctgactttgggtttcctcttgaccacttggccgcgccaaagggttctgctgtgaaaagcgataaggggtatttttgcgatacgactatccgtgtgatgacgtatcttcctgccccccacatgccaccattccatcaatccaccaatccgccaagattgccaagtcgcttgcttattatcagacggttatggttatggttatggctcatagccatcctcactccctacacgctcttctgctattctatgctggccctctgcccccggagccgataaatcacgcggcctctgaacgacagattagctagcacaaattggcccacataaaaatacaaatagaataaaagtaatgccaagatcgcgaatcgagtgtataatttatggtgagcaaatcgaagaactgcaatgaaagctcgtcgataatctgatggatggatgtatgacgtaaaagccttgaaaaacattgacgagtgcaaacaaacttcagtgaacaagtccccgatatctctatcaaaaaatcaagctcaacaaataaatcaatattttagtttttaatatcaccaacttatgaagttgaaacctattctcaaacgttacgtgaataatttgatgaatactttaatgctcgatatcaattattcttttttgtgttagctatagaacattttttcgatcaccataacgaaagaaaacaaattgattaaagtcttctccaattataaggaaaatttggccttgcacattaattttaataacagttcacgatgagatgagcctcatcatttaatgtgtgcccgatattagtgtcgcaaagtgaggggaatattccagttaaccacttgatactcatccgaatgctttaccccttcttatagctggccacccgctccatcgaaccatcgtttggactgctctttggcgacactctgaaggagctgaatgtgggcacgacgggagcagcggttatcatcagtgcactggatgtgtgcatgaacttctctggactatttgtgggaccgctgctgaaggagttttcataccgcaaggtggccatcgccggatctctgctgtgcggcctgggcctggcgctcacatcgccggcgacgagcatggcccacatcctgagcacgtactcggtgatcaacggcatcggtgtgggcctctccacatcggccgctttcgtggctctgaatcactactttaagcacaagcgcggacaggcggtgggtctatcgatggctggcaccgccatgggcatgctgataatgccgcagctggtgcggatcctgctggaagcgtacgacttccggggagcggtgctgctgctggctggtgtggccctcaatgccacggtcggatcggtgctgctgcagccggtgaagtggcacatgaaggaggagttcgacgacgaggagctcatgtgcatctcggccctgcccaccccgcagccacagctgacggtgggcggtgctggtggcgcggcatcagctggagcgcccgtctttaaggtgatcaaggaggatggcaacgaggaggacgcattgcccgagatgaacacgctgctgttccataagcctcatccccaccagcactcgatgcgcaagaattattccgaaatggccatgaacacgatgaacggctctcggctgggtattccgaagaggccaacatttccgcgaatcatgtccctggccggagttcagtccgccgcccatggagcgggcggagattcgggcggctatacatcgcaggcggaggtcaacgctacgcagctgcgctgccgcaaggcctcggtcacctcgaacctctcctacatggacttcaccggctccattctccaggtgcatctcaacaccggcgacgatgagttcgagcagaacgatcgcgaactgcgacgtgttggcaccgccacgggcagcattgtcctcggcggtcatcgcgatagcttcatcaaaatgaagcccaccgagctggacaagcaggccgaggcagccgccgccctcgacgaggaggccaagaagaaggccaagaagccgggcttctggcgccggtttgccgatctgctggacattgatatgcttaaggataagatgtttctcaatctgctcttcggtctctccatcttctatgtggccgagatgaacttcaagatggtcacgccgttcttctttgccaatctgggctaccagaagacggacgtcgccttttgcctctcgattacggccattacggatatcgccgctcgtattgtcctgccgccgatattcgatcgtaccacaatcaagaagcgcaccattttcctcgtgtccatcatctttgttgccctgacccgttcaagtgagtagttgcgtcatccgggagtagaaatattcaagtggcacgcaccattcaaagctacttgagtatttgaaaaaaatgttcaatttcattcagataacagctgcttaatgcttgatgatgattttgattggaatttctaacacacgattgtgctttgcagttatggctgagcaaacggagtggacccagttgatgatttggctttcgatctgcggtttcttccgtggatccgcactgagcaacttcaccctaaccgtatccgaatattgctcactggagaagctgccctcggcattcggctggcatctggtgggcaaagccctatttgtgatcacattcggaccgctcattggtatggaaatcgaacgatctttggcccagaatacccagttaacatagacaattttgcccatttcaggtctcattcgggatgtgaccgacagctatccgatttgcatacacacccagagcgtttgcataatgatttgtgccactgcctggggcatcgagtatctggttgagtacattcagtcgcgacgtcgcaccgccgatgccgcccagttgccaacccaagatgtgggagccacgacgacagcgacgtcggaccagaacgatgtgaagctgtaagctgtaagccggtggcaggaggcaatggacacgagatgagatggaccagagagatctactttaaggaagacagtacagcgagtacgagtgcccaactataaatatacttaagaggttcctgcacaatggaaggataagactacgtttgatcctcgagtgtggaggcctaataccccaaaatgtattaaaactcaacatagttaagacatttttttcgtttgcgctctttttttttttttttcttgcaatatgcttagtgagacttaagatcttggagagacataatcacacacacacacacacactccatacccaacgtgtaaccataactattaactatatgattaagatgaatttttgtcagttttagttgtatgaacacatctcttaagtgtaaccaacccagtgggggtgtgtggcccacgcagaaggcccacaaaaaccacaacaaagtgcgtttacattttaatgttagaatcaaggtaacccaaattgattcagttaagttcccaactttctaattattatcattattattattcgagccgttccctttcgcaagcgtttcgccttgaattgttctccgatttgcttcttagtgaacttgtatgtgatagttcaaagatagttcttaatttagaagttaatcactacttatagaaatactgatatctgcatctgaagatacatcgatgtgacaggaagatgaggaaggagtgttgaaaattgatcggctttaaaatgtacctaaggagcgaagttaagcagcgacaaaacaattaaactatacaaataataaataaaacactatatatcatttatcctacgttcaatatgaaaactactttggcatgttaaatgaattgacgaaatatggaagaacagtccgccagagaagcttttcctcaattttaaaggcgatgagactctgtttctattctattcaacgaaa

SEQ ID NO: 17744 - DNA, 1873 bp, DROSOPHILA
cttcttatagctggccacccgctccatcgaaccatcgtttggactgctctttggcgacactctgaaggagctgaatgtgggcacgacgggagcagcggttatcatcagtgcactggatgtgtgcatgaacttctctggactatttgtgggaccgctgctgaaggagttttcataccgcaaggtggccatcgccggatctctgctgtgcggcctgggcctggcgctcacatcgccggcgacgagcatggcccacatcctgagcacgtactcggtgatcaacggcatcggtgtgggcctctccacatcggccgctttcgtggctctgaatcactactttaagcacaagcgcggacaggcggtgggtctatcgatggctggcaccgccatgggcatgctgataatgccgcagctggtgcggatcctgctggaagcgtacgacttccggggagcggtgctgctgctggctggtgtggccctcaatgccacggtcggatcggtgctgctgcagccggtgaagtggcacatgaaggaggagttcgacgacgaggagctcatgtgcatctcggccctgcccaccccgcagccacagctgacggtgggcggtgctggtggcgcggcatcagctggagcgcccgtctttaaggtgatcaaggaggatggcaacgaggaggacgcattgcccgagatgaacacgctgctgttccataagcctcatccccaccagcactcgatgcgcaagaattattccgaaatggccatgaacacgatgaacggctctcggctgggtattccgaagaggccaacatttccgcgaatcatgtccctggccggagttcagtccgccgcccatggagcgggcggagattcgggcggctatacatcgcaggcggaggtcaacgctacgcagctgcgctgccgcaaggcctcggtcacctcgaacctctcctacatggacttcaccggctccattctccaggtgcatctcaacaccggcgacgatgagttcgagcagaacgatcgcgaactgcgacgtgttggcaccgccacgggcagcattgtcctcggcggtcatcgcgatagcttcatcaaaatgaagcccaccgagctggacaagcaggccgaggcagccgccgccctcgacgaggaggccaagaagaaggccaagaagccgggcttctggcgccggtttgccgatctgctggacattgatatgcttaaggataagatgtttctcaatctgctcttcggtctctccatcttctatgtggccgagatgaacttcaagatggtcacgccgttcttctttgccaatctgggctaccagaagacggacgtcgccttttgcctctcgattacggccattacggatatcgccgctcgtattgtcctgccgccgatattcgatcgtaccacaatcaagaagcgcaccattttcctcgtgtccatcatctttgttgccctgacccgttcaattatggctgagcaaacggagtggacccagttgatgatttggctttcgatctgcggtttcttccgtggatccgcactgagcaacttcaccctaaccgtatccgaatattgctcactggagaagctgccctcggcattcggctggcatctggtgggcaaagccctatttgtgatcacattcggaccgctcattggtctcattcgggatgtgaccgacagctatccgatttgcatacacacccagagcgtttgcataatgatttgtgccactgcctggggcatcgagtatctggttgagtacattcagtcgcgacgtcgcaccgccgatgccgcccagttgccaacccaagatgtgggagccacgacgacagcgacgtcggaccagaacgatgtgaagctgtaa

SEQ ID NO: 17745 - protein, 582 aa, DROSOPHILA
MNFSGLFVGPLLKEFSYRKVAIAGSLLCGLGLALTSPATSMAHILSTYSVINGIGVGLSTSAAFVALNHYFKHKRGQAVGLSMAGTAMGMLIMPQLVRILLEAYDFRGAVLLLAGVALNATVGSVLLQPVKWHMKEEFDDEELMCISALPTPQPQLTVGGAGGAASAGAPVFKVIKEDGNEEDALPEMNTLLFHKPHPHQHSMRKNYSEMAMNTMNGSRLGIPKRPTFPRIMSLAGVQSAAHGAGGDSGGYTSQAEVNATQLRCRKASVTSNLSYMDFTGSILQVHLNTGDDEFEQNDRELRRVGTATGSIVLGGHRDSFIKMKPTELDKQAEAAAALDEEAKKKAKKPGFWRRFADLLDIDMLKDKMFLNLLFGLSIFYVAEMNFKMVTPFFFANLGYQKTDVAFCLSITAITDIAARIVLPPIFDRTTIKKRTIFLVSIIFVALTRSIMAEQTEWTQLMIWLSICGFFRGSALSNFTLTVSEYCSLEKLPSAFGWHLVGKALFVITFGPLIGLIRDVTDSYPICIHTQSVCIMICATAWGIEYLVEYIQSRRRTADAAQLPTQDVGATTTATSDQNDVKL

SEQ ID NO: 17746 - DNA, 11129 bp, DROSOPHILA
acacacacattcctacactcctacacacacaaggacaatcaaggatgccatatggaaatggaaattttcggtgctccgcagagcaaaatgccgttggccacaggagtcaaaagcatcggattgaacgcgcacacaatgtcgaaactaaagaggcgttaattcgttaattgtttcagttctctaatcgaattaaaatcatatcctggatatcctgcagccactgccagcctgtcaggctgagcgggggcggggcaaatcaaaatggggagaagccgccatggcggctgcctttttggggtgtttaattagaaaatgaaatgcagccacgcaggggtccaagggcgagattccatcccccgatatccttcccatacaaatggggatgcagcatatccttcaaaggcgccaaactttgctctcaaggtgcgagctcctgtgtctgtctgtctgcctgtctgtctctatgtctgtgtgtgcgtaaagtcctttatcccggggatcttgtgtttgctttaattatgccaacttcacactgacacttcaaagcagatttcatttcccattgtctgcgccggcgtgtgtgtgagtgtgtgtgtgtggtgatggggggtggcattcgggggccatggcgcctgtctggaaattcgcaagacagcacataacgcgcttcaacgactccttgagaatgagccaagtctcggggcacgataacgactttggcagattgttttcaaggctgacaatctgacacttcaaagtggttttaagcacagaagactgagaattaattagcatacaaccaatgttaagttgaagggatacatcaagttactataatttcctttattaagtttgattaaatgctaatctctagtttttccaagtgcctccattttggacagcgctttagtgactcactcgccactaatggtgccgccacttcttctccacagagttcatgcaaccgcagcatatatggccttatctgcagcaaaacttcatgcagcagcactcgcatcaatatcagcaacaccatcagcagcagcagccgcattcccacccgcaacaccagccgctggcagtgccaggacatcagcactcgcatccgcattcgcatcaccatcatcatcaccatccgggggcggggcacgcccactttccgcatcccgcatttctaacgcatcaactgccgccgcatcagcatcaccagcagcagcagcatgtacagcagcaacatcccggcaatagttgtcaaccgcaaaccgcatcctcgtcgtcgtcacctggcagcacaattagtgatagcgacaacaatcacggcgcatcgactgccaatggcaatggcagtggcactggcaattctggccaggatgctcgaccgcacgagctggcgaattcaaatcccgacgaggatagcagcgccagtcgaagattaacgcaagacaagcaacagcagcagcagttgctgggcgccggaggaacaggaggaggaggtggtggtggccatggccatggacacccgacgccgccgccaccgcctcctccgccggtgattgccaagcccatgcccagccgccccacgcccttcctgccgcacaccctcaaccacccgcaccttcactcgttgctggcgcactgtcgcaatccctacatgagtggtaagatattccaaaaggattgctattaaaattattttatacatataaaatggatttcttcaaaaatatagtaaatatatccttagaataatctaatagattcaatttctcaaattcaagagttaatttccaagtgtaatgcccctaatggtcgaatatatcaaatgtcacatccccaaccagagtccacagccacccgctgtgcccattaacaagtgttttggtctaatgcatttcctctttcctcttcccctccctccatcggcaacaattgcagttggcgcccaagtgttccccctgcctcctggccagggattcccctgggcccattcgacgcgtggcaagcctcgccgtggaatgatgcggcgtgccgtcttctcaggtgcgtagttggggcatccattcccgaaggggttcatctaatggtcgccctcattgcagattcccagaggaaggggctggagaagcggttccagcagcagaagtacatcagcaagccggaccgcaagaaactggccgagagactgggattgaaggattctcaggtgagacgagttatatgttcataatggctgatattacacagctatggagcaatgaatcatgtggttaatcacgccgaatttcgtttatataacccaagtgattggggattatacaactgggggcatagctcaggggtagagcgttcgactgcagatcgacaggtccctggttcaaatccgggtgccccctactcacatttttggttttcatttattttgttgatataagctacaataataaggctataaagtaattattttaaattatcttttgtttatacaagtctcagtatttgcttaaattcatttccagcatttgttattcctccattcgtatgattattgcatcattcttttaagatatttgcaaaacgatgtttccccatttcactcaaaggtatagtttaacattattgcaccgatgaaagtgcctaaaagagtgcaaggttttaaattacttattcattttgtatagattctcaaaatcgcacaatatatgtacccaatttccatgaaagaacatagaagtaaatcctttcgctgcattttataagctctttgttctgaagttatataattactagcttgttgaccaaattaatttattgcgtctagtttgccgacgtttttgctccacacatgtgctctaatttccctaaactttcccgcccaacaacactgaattagcatttcaaaacccatttggccaggcaaaaactttacccactaaactcagtaaatttcttgtaagccattcattcataagcaaaacaaaaatcaatgagcgtaatgagcgcagaattatgccattataaattatatttaaccgcttacgaaaatttcgtgttgccaacttttcgaatcagctttaataagcagacaacaaaggcagttcgcatagtataaagtggccaaaaccacttcgcttcacttcgaacaaaaagcgaacagagtggggaaaactccgccctggaagttcggcggcaatggctgcgcacgggaaaatggcagaaaagcggaagagcggaaaatgagagggggtcagtgctccttgaaatgcgcagtcgccttcttatgtatatatatatatatatatatatatatatatactataatatacagccgatatatagccgaggtcgaggtggcagtataatgaaattataacgagctgtaagaaattcatgtcgcctgagacgtcggccagttttcattgattgcgctgcgcactttttttcccagcccggcggcatgcaataattaaattaatttttgtaagcccaaaggtgcccttttcgctttcacagcgctgccaacaatttgcgtggccaattcggtcgtgtcacaatgtaatcgatcacaactcaatcacggccagaagtcatcccctgaaatgctgctgctgctgctgatgatgatgatgatgatgaggaggaggctgctgatgactgacaatgtcacgccaaattagtgcagctctttttgcagcatttcgctggcaaatgattcataaaaatttcataattgcacaataagcgtgtccagttgctggcagctcaggaattcatcaactcatcatcggccaggtcacgcccctttcggagaaacatttgcctcatcgatcacttacgccctaatgatcgtataatgtccgcgtctggaaaaagatcatccagtatttcatttgtgaaaatgtaactgtgagatggaaattgcgaaatcttctccaccagctacggcgttgaataatggtgattgttaaatgattgattttagctaaatgggttgctttaaatttatgaagtttacttagtttacttcatgtggatcaggcaacccgcctgcattgtaaatttccttgtaatgaaccacttttatgtgcagtctattataagttttcagtctcagctgtttttgctaatatacttggctatgttaaacttagacttatattttcggttcaaacttattctcgtgaaagtttcaactattatttgatgatcattgcctagacttcagctataaatcttcggcttgaacacttgaaactgcagtttgtcaaaagtgtgaaaatggagagcaagcaaaatggtaaaacaaaaggcaggaaaaatcccagcgatgaaaaaagctgaaagaaaactcggtggctacggcaaaaatgtgcaaaaatgtcagaaaaattcgcaatcaaatcgcagcgggtgtccagcttgcggtggccgaggcccgggcagctggacacaggactctggattctggatcctggaatctgtatcctgtgtgtggaattgtgacggggacacaggacaaaggacacacacaaagtgttggccagccggcggcgatgggagctccattaacgatggctttctaacgagtggtttgggtccggatctggggttccattttcccatgtggaatgggtgatgaacgagtgcggatattcacactcgagtgacacaggttgagagcgtgtgggtgggtgtgtggatgtgtgggtgagtccttgtggccggctgcttgagtgtgggtgcattgcactgcgcctagttgtatgcaacatgatttaagggcctccatccttgcttttgctgcactttttgcggccgcttgttgttcactttgctgcacagtgcgcgccataaatatcagcacacattgcactgccctgcaattggtggtccggttggactgggctcaggacttcgactcgacgccattgtccagtgtcgcgtgccctgcggtttggcaaacgctgcattgatgaggatgcccaggtgattcatcatttcgagtgttgttcattgcaacgtttattgcgatttttacaaacgcactcgaaaaatcgctggcgcccgaaaaccgaagcgtttattgcgaccaacgcgatttatgggcggtttttggtttcacttttttgaatgcaggtcacgttccgagtgttatcaactaatggattgatctgtgtgtagaatgcattattagctggcaggtctggtgccaaatatctgggaactatctacttttcgtgagcagtgccgtcgaaaatagatagttatttgcatttgaatagttattactcagtcatgctggctatatttaatgtctaaaaagagaaatatgaaagctttgaaaaccgcatatgcatattatctcaacccttcgcattcagcagatacatacatacatgtatctgcattgaacaatataactgaggattcatgaactcaatataatcccatggcgcacacttcttcaatcagtcacgcccccttcgaaggcgaactgcaagtgacagttaccagcctcataatccgctggctataaatttaattgccattaatggcactcgaagacagaaaggcgctgggaaatgggaaaagggaaaatgggaaaggggaaagctgaaagttggccgcaggcggctgccaaaatcacgcggcggaaatgaaaacatcttgaggccaaatgcgatttgcatttttaaatcaataaggactcaaagactcgggacttggagtatatatattcatatgtgtgtgtgtgtgtgtgtgtgtggagacttcaacccccgcacacacgtgtctggcctgctgccctctctttcgcacagagcaactttttaagtgtcgtgtccaaaacaaattcgtctgtttttgatttgtcgaaaaatgggggagcgaaaaaaaaggaagcgcgcagctcgaataaaggaaattcccgccaacgcccggcaatcaactgtggaatttccacccatttcccccctccaatatctctctttcactcccctggcattttcacgttataaatatttttattttccatttcgtctggattgtcttttgtgtactttgcccggattcacggggggaattcccacagcattcgcttgtctgcctctatttggcttgcaatttcgatttctttcgcggtggcgacagaagccagcggctttaaatcaaattgcacaataaataatccccgaattcgaatcgagggtatttaacaaccgatatgcgttggtcttttacgctgtttgcctcggttttatggtccttgtaatccttgaatttagtttagtggtttatgatcaaaagaattagatgagatttgagataaaaagttgaacaaactttaatttgattagcattggaaaaaataatagcatatccatttttgctgcttcgacttttcgaattaaagaacacttaagcgctcataactcgcatttcatttcaattcgccaatttgcaaccctcgtcgaacattaaaaaccatcattcgcagctttggttacaaaataaattgttgacaaattgctaaataaacggtcgtggtccacaggccaaagtatttggcaagcacttggccagctcctcctgaaacaataaccacaaaaaggggaggaaatgggcaatggaaatggaccgtggtcagtaacccaaaacgcactgccaactgccgccggaatgactttcgcaaatagtagcagactatttaatacgctattacgcagcatatcgaatgacatcctcggtggccaaatgggttgacagcctgctcctggctggaatatatattctatatatatatatatgtatatggaccatccccgtcatccagcctcattagttaacatatgttgccgaagtcaggattcgggattcgggatacgggactcgagactcccccacaaaaacaacagcttgtgctcattgcccaaagtcaattttcggcacaaaaaaaaaaaaagaagtgtagcgaggggaggtaggaaagttcggcggaagggagcaatttgtagccctcttaccgcccgactcctttgggtggtttataaaaacttcaaacgaattccatgcgcgttatgctggcagcgtgtcagaaaaatatgttacttatcgttttggcttactgtcaatggaatgggcccaacttccttggggagagaattgtattgagaggtcgggtcttaacaaagtggcaaaacgtttagcaggacttcgaaatgagatgggtgcttaagaactttatttgggatgaagtccagaagttactccagggagtatgaatccggagtctccaggattttgagaacacaaataatacaacatatataattttaactgcattctaatttgcaacattccattcaacttctgattcacaaaattgttttaaatttatactgctaacacgctaaatcaaccagctattaaaatgatgacatgacaataatatcctatcttattccaaaacaatttaatacaatatactacatacaacaaaccagcgaatctatgcgaatccgctaattgctattcacaacaattgaattttagtatttgtcgcctggcacagatatttgcataaatttaattattatatgagcggcgaaaaatgaagcgaatatttttgtgttagacagtaattgcgggcttaaagttagtggatgtggtaaggggggggggaggggaactcgttacatggccaatatttgttaacaagccggactaacatcgcaaaactaaacgcggctcatttgggggtctatcgagtgcagttgataattctataatatccgaaacggattctttatcagggattttctgcaatgcaaacctggagcgctaccagctcatcgaggaacaacaactgaacaaggagcggaaatgtccagacgcctctccttggcacactaaactgcacgctttataattaatttccatcagaaacagacgatgacaagatgatgacggtggtccagggtggtcccaaagttctattcctccctcattaaactactgactttcggccggagccataatcattaatcttatcgccgcctgagcttattatttcaattgctgccggggtggtggaaaatgggaaaatctggctttccaccgcacagacgttgaaaaactcgatgaccggaagtaagcgaaacagcaaaccgagaagccaacagagcgcccaaaatcaggcacgtgccactgggagttgggtgtttccaaggaatctctgcggttaatcggttgttcaacatgtcagcggcttttcatggccgttgtttacttatttatttataaatgccagagctttagtctaattgagggggctcccacccattttacgcatcaatttgctttaaaattcacatcaagtcacaatctaattaccgccgtggagtgggtctcccataaattgttgcaaattgttgtgcctggctacaaagtgcgaatgtcctgctgtgtcgcagactcacaaggaggcgggtgacggagtggggggggggggggccggactgcacaataactcaaatacagctcatggaggagcggtgggccaaggactctgcccggcgagtcctgcaatctgcttcaagtgtcccagctagcctgtcaaatgcaggaagctaagccctccaccgaaggatagcaggaagtgagttaccaggacttacagcatttttgctggaccaactttgcagcctgcactgtggatggagtatacataaataaataaatatcaaatgtagattatgttagggcacttcaagtattgggatttcaaaagggtgatgtatatgatgtgatataaaagtatgcataaaattatttatttctcatcaagatagtttaaatatatttaagagaagaacggattgttgactgaaaccaactgattttgcaccactgtgcggcctctaatcaatttgtagccgctttgggtaaatgtctcttatttgcatttattatggatatgcccgtcgtctggcgatggcagtgcagttcaaacttctggccggtccatggccacgcccccacacacgacccgccccaatggggtggtgacggacagatatctatgggttctctgcgagattcaatttgccacagaaaagttttcgtcggatagccgacagaagtttgttttcccaaaagcggaattcgatacccacaccactcatacgactcgacggccatgaaaagttccagatctatagtcatcccagctctgctgctccagacagctttccatccaccggacagtcgcaatttacccatttcaatgcaactccagcgtgtttttctcaaacccatttatgcccttcatttgcaggtgaaaatttggtttcaaaaccggcgcatgaagtggcggaactccaaggagcgggagctcctcgccagcggcggttcccgcgaccaaacgctgcccaacaagaataacccaaatcctgatttgagcgatgccaaatgcgatcgtccgctgacgccactctcgccatccctgctctcgcccaatgggagtgccacgcccccaccgccgggagcggtggccaaggatgaaccgccaacggcagctgtcacgcccaagtcaccgcaatccgtcagcagccggagctccccctccgtgggctatggcctccagattagctcgccgcctccgctcctcactagcctcaaaatgggcgatcaatcggcgtcggccacgcccactccgctgccgggcacaacggtgtcatccgccgccgcctcgccgcccggtgtaactgcctccgagtttcaggccaagatcaatgccgagatgcagaagcagctggtggccgccgatctgaaattcaagctggagaacagtatccaagaggccaagcagcgccggttcgagcaactgcagcagcagctgcatcactccccacacttcagtgccatgcgggaggtagagctggccgccgcagccgcggctgcgcaactgcatcatcatcaccagcagcagcagcaacagcaacagcagcagcacgcacagcagcagcatgcgcagcagcagcaccaaggtggctccgagttcatgaaactctactacgatgactacgacgactccaactcggacagtgacgaggagatcagcgtgacgtgatttgcgactggaggcgaagatggagctgcaacggtccgtgtacatatatgttttaattgtaaatttattgatgcattcaacttattgtatttaatatgtgtatgatattttttcgaatttaaattccaaaacgaaataaactcctttgaaaatcataatgccaatactaatgcaaagatcacttgacatttcagcaatcaacgctgattaggaatatatatgtatatataggttttattaggtgtcttaaaacgaactaaacataaaatcatttcgtagtaacattagtaagtgtgtgtacagaatactgagccaacaacctcggctgggacttaagaactagaaatcactctttcgactaaactaggacagttaacagattgcgactggtctttgtacatggaggttacatggaggttacacaaggaattggccggtggggagcgtcgatccccgccagagttcgagttttggcttcgagttctattcgtcgtcaatgcgaatggcatggttcacatggccctcgtcacttgtgagctctcgcggatcgccaatcaccgtcgtggtggtgtactgcacctgggagtcgctcttgaagatctcctccgacacggcgggattgtcgatgtccttgccggtgatcttcagcacattgcgtcgctggataaagtcaatgatcagcgaaatgaaccagcccaggaaaacggtgagtaggcagccgatcatgctgtaccacatgtagctcagccggaaaatgggccaagatctgtaatttctgggttaagtaaaatatatatatctagtacctaagatgttatcttacgtgaatcccccctcctcaatgacttccaaaggttctgttagcaagctgccaatgatgttcgtcatgttcacatggcagtcgcatttgtcgatggatgtgggcaatgcgggctgctccacgctcacaatttgggcaaccacgcccacaaatatgaccagggccagggacaagagtcct

SEQ ID NO: 17747 - DNA, 1662 bp, DROSOPHILA
atgcagcagcactcgcatcaatatcagcaacaccatcagcagcagcagccgcattcccacccgcaacaccagccgctggcagtgccaggacatcagcactcgcatccgcattcgcatcaccatcatcatcaccatccgggggcggggcacgcccactttccgcatcccgcatttctaacgcatcaactgccgccgcatcagcatcaccagcagcagcagcatgtacagcagcaacatcccggcaatagttgtcaaccgcaaaccgcatcctcgtcgtcgtcacctggcagcacaattagtgatagcgacaacaatcacggcgcatcgactgccaatggcaatggcagtggcactggcaattctggccaggatgctcgaccgcacgagctggcgaattcaaatcccgacgaggatagcagcgccagtcgaagattaacgcaagacaagcaacagcagcagcagttgctgggcgccggaggaacaggaggaggaggtggtggtggccatggccatggacacccgacgccgccgccaccgcctcctccgccggtgattgccaagcccatgcccagccgccccacgcccttcctgccgcacaccctcaaccacccgcaccttcactcgttgctggcgcactgtcgcaatccctacatgagtgttggcgcccaagtgttccccctgcctcctggccagggattcccctgggcccattcgacgcgtggcaagcctcgccgtggaatgatgcggcgtgccgtcttctcagattcccagaggaaggggctggagaagcggttccagcagcagaagtacatcagcaagccggaccgcaagaaactggccgagagactgggattgaaggattctcaggtgaaaatttggtttcaaaaccggcgcatgaagtggcggaactccaaggagcgggagctcctcgccagcggcggttcccgcgaccaaacgctgcccaacaagaataacccaaatcctgatttgagcgatgccaaatgcgatcgtccgctgacgccactctcgccatccctgctctcgcccaatgggagtgccacgcccccaccgccgggagcggtggccaaggatgaaccgccaacggcagctgtcacgcccaagtcaccgcaatccgtcagcagccggagctccccctccgtgggctatggcctccagattagctcgccgcctccgctcctcactagcctcaaaatgggcgatcaatcggcgtcggccacgcccactccgctgccgggcacaacggtgtcatccgccgccgcctcgccgcccggtgtaactgcctccgagtttcaggccaagatcaatgccgagatgcagaagcagctggtggccgccgatctgaaattcaagctggagaacagtatccaagaggccaagcagcgccggttcgagcaactgcagcagcagctgcatcactccccacacttcagtgccatgcgggaggtagagctggccgccgcagccgcggctgcgcaactgcatcatcatcaccagcagcagcagcaacagcaacagcagcagcacgcacagcagcagcatgcgcagcagcagcaccaaggtggctccgagttcatgaaactctactacgatgactacgacgactccaactcggacagtgacgaggagatcagcgtgacgtga

SEQ ID NO: 17748 - protein, 553 aa, DROSOPHILA
MQQHSHQYQQHHQQQQPHSHPQHQPLAVPGHQHSHPHSHHHHHHHPGAGHAHFPHPAFLTHQLPPHQHHQQQQHVQQQHPGNSCQPQTASSSSSPGSTISDSDNNHGASTANGNGSGTGNSGQDARPHELANSNPDEDSSASRRLTQDKQQQQQLLGAGGTGGGGGGGHGHGHPTPPPPPPPPVIAKPMPSRPTPFLPHTLNHPHLHSLLAHCRNPYMSVGAQVFPLPPGQGFPWAHSTRGKPRRGMMRRAVFSDSQRKGLEKRFQQQKYISKPDRKKLAERLGLKDSQVKIWFQNRRMKWRNSKERELLASGGSRDQTLPNKNNPNPDLSDAKCDRPLTPLSPSLLSPNGSATPPPPGAVAKDEPPTAAVTPKSPQSVSSRSSPSVGYGLQISSPPPLLTSLKMGDQSASATPTPLPGTTVSSAAASPPGVTASEFQAKINAEMQKQLVAADLKFKLENSIQEAKQRRFEQLQQQLHHSPHFSAMREVELAAAAAAAQLHHHHQQQQQQQQQQHAQQQHAQQQHQGGSEFMKLYYDDYDDSNSDSDEEISVT

SEQ ID NO: 17749 - DNA, 6100 bp, DROSOPHILA
ccagcgacctatggatttctattgcataattttccaactacagtccaccgctctaccaactgagctatcgaaggttgagttcaaacttggccgttgttcgttttatgcatgcgcacaaacgaaatgcaccgtatttggttatttatttttgatttttacttatttaggtcaaacaaaattgatcaactttctctattcagtccattgcagtaagcctatagtttccaagcctaatagcctaggcgcttttcacaaactatatcaatttagttacggtttatttcttccaaataaaatccttcttatattatttagtttaaacagctcagttatattctgaatgtctgtagatgaattaaattgatttaaattgtgcactacaaaatatataaaaaaaaaggtatgtgcactacaaaatatataaaaaaaaggtatttatatcttttcgatccttcgagccggatttgaaccagcgacctatggatttctattgcatgtttttccaactacagtccaccgctctaccaactgagctatcgaaggttaaattcgcttgcggctaattcaccttttgttcaggagcgaggtggggaaagtgacaaaaagagagggcacttctcttaaacaccgctgctctttaatactcgcggccagaaaaataggaccttaaattcttgtaaacttatattaaatactaaagcattgtaaatcttaatgagaaaatattcaggtacaactgttcatggcttaattttagaccaaaattgtgcatgaatttagaaaggcagcaatgcactatttgaaactaactagttacccacccacagctgtgcaccgataaaggggtggtgtgcgagcaaagatgccatatttatacatatatccatctcgttccagcgccgacgatagacgataccgatactttgcgagtccgctcccaagattgagcccccacagcgtaaaagcgaccgaagtgccggcgacgagagcagttcgttcccagaagccggcagcagtggtccgttgataactccgactcgagctacttatccaccacgtcgatactcttgtctgtctattgcaaacatagaggagtcaccctttggctaacgaatccgaaactcccgagttttgttgtgcaacatatcaaaaaccgcatttgttcggatccaatttacattcgcatttcaaagatgtcgtaccacaagcccgaagctaagaccgtccaggatctgaaagatctggcccagaaactgcgaattcactctatcaacgccacccaggcctccaaatcggggtaagtttatcaataactgaaagtccataggcatattaaagtgtgcgtatttagatttgtttgtgtagatgtgaattttaaaagttgtgcaccttgcacttgttgcttcaaaggtgaccccctccatttccagggtgggtgcgaaaaagtttttgagggggctgctaaatacatacatacatatgtatgtgttttgaaacattacaaaagaaaataaaacaaaaatagttacgcatatacatagttatgcatctatgtttgtatgaatgtgagaagtaaaatatgggaagaccggttcctttagtgacccctcctgggattcagttgccaacccacgtgttgtccagtagctttagtgaatttgcgaatttgttgccctgcctgcgtgctcagtgataagccgcgttcacctaccttaaattgtgagctaatattttttgaccttagacaaccttgaaacgttaggtttttcttactgccttttaatttcttttgcttttgttttgtgcgtggcgttcaaaacgccgaaagcacatacatatgtacatggggtaaaaacaaacatacttacatatcaaacagaggcatttaatatacgtatgtacatatgtacatacaagtgttggaaagcacagcttgtgacgggagtggaattggaaagagagggatgagaatagtaatggaatgatcccctacacttgagatttacgactgtatggcttttaatgtaattatatctcggatagacgcgatcaaattattactgcaacagtaaataaaaaagttactatgctgataaggaaaacacttttatcgcctccattagtttttccattctgtttcgtttttttttttttttgtgacggttcaagataagatctgctctgtttgctctaaatgtgacctctgccgacgagataagcccggtttggttactcattgaccacgatatgaccgattagaggtgaccagctcaagtgtgttccccgcatgataatcgaaaatcactgaaaactgataaaaaaaaaaaaagcgcgccgggtcactgctaacactccgtatcaccttcaatagttcttgatatggctgcaggaaacggggacgcacttcggaactatctagaagcacgtgcgttcacaaagatcgccatgcaacacaatcgtggaagccaagaatttggtttttaaggctattatttaggttttttggtgatcagaaaagttcaaggtcccagaaaccggtgaggaattgcgatggactcacgtcgcgacaaacacacatatcacaccatataacgccaataaatacatatgcatgtactcgttatagtttatttatatgtctggggtaagacgagccccccattttgtctggggttgcgtgttttctttgcggttggagttgtgccagatctgcgattcaaagcaattttttttggaacacgatcgcatgggaacattgaattccaagaatggatcttatcttatttatatgtacattgcaattggatactcgagaaatcttcatttgaaatatgaacagaggggggggggggggtttaaataaaagcttcaatagacaaatggatttcttttattaaacaacgtttttaacaagtatgcacagtgttcagttccacttttcctttgttgatcggccttcacttacccaccgtgaggtcgacttctataattcattaggcacttaccttaacctagaactacatgcaaacgaaatgccttgtcacaatctaatattttgcctacttttccctctttatagccatcccacatcatgtgcctcgatcgctgagatcatgtccgtgctgttcttccagcagctgcgcctgaacctgaagcacccacgcgatccctccagcgatcgcttcatcctgtccaaaggacacgctgctcccattctgtatgccgcctgggctgaggctggtctcttccccatcgcggatctgaacaacctgcgcaagatcgacagcgatctggagggtcacccgacgcctcgtctgaacttcatcgatgtgggcactggatccctgggacagggtgtcgccgtcggcgctggcatggcctatgtgggcaagaacttcgacaaggccgactaccgcacctacgtggtggtgggtgatggtgagtccgccgagggttccatctgggagtcgctgcactttgccggccactataaactggacaacctttgcgtgatctttgatgtgaaccgcttgggccagtcggaggccacctccctgcagcataagctggatgtttaccgtgatcgtctggaggccttcggctttaatgccgtcgttgtcgatggtcatgatgtcgaggaattgagcaaggctttccattgtgctgcaatcaccaagaacaagcccaccgccatcattgcaaagacgttcaagggcagggacttccccaacatcgaggatttggacaactggcacggcaagccactgggcgacaaggccgccgaagtggtgaagcatctggagggactgattgtcaacaagaacgtcaagctgacccctaagccggtgcccaagactggtgctgctcccgacgtggacatcaacaacattaagttgagctcgccacccgcctacaagctgggtgattccattgccacccgtttggcctatggaacagctctggccaagattggccagaacaacctgcgtgttgttgccctagacggagacaccaagaactcaactttctccgacaagctgaagaacctcgacccgcagcgctacattgagtgcttcatcgctgagcagaatcttgtgggagtggccgttggagccgcctgccgtcgccgcactgtggcctttgtgtccacctttgccaccttcttcacccgtgccttcgatcagatccgtatgggcgccatctcgcagacgaacgttaactttgtgggctcccactgcggctgcagtatcggtgaggatggtccttcgcagatgggtctggaggacattgccatgttccgcaccattccgggcagcaccatcttctatccctccgatgcagtgagcacggagcgtgccgtcgaactggccgccaacaccaagggtgtctgcttcatccgtacgtcccgtcccaacacctgtgtgatctacgacaacgaggaacccttcaccattggccgcggcaaggtggtgcgccaaaagagctccgacgaggtgcttctgatcggagctggaatcactttgtacgagtgcctggctgccgccgatcagctggagaagaactgcatcaccgtccgtgtgatcgatccgttcaccgtgaagccattggacgccgagctgatcatcgagcacggcaagcagtgcggaggacgcgtagtcgtcgtggaggatcactaccagtaagtgttctttgtagtctttttatttgcctcctttgctaacttgaaatttacttaatttcttataggcaaggaggcctgggtgaagctgtgctgagtgccctggctggcgagcgcaacttcgttgtcaagcacttgtacgtgcccaccgtgccacgttcgggtcctccgtcggtactcatcgatatgttcggcatctccgcacgtcacgtcgtcaacgccgttaacgagatcctcaaggattaggggaccagtcgtgatctggctacattcatttaccgcctacaggaattcccccagttactacttacttccaatattaccattccctctaagattgttaattgcttcattgatttgaaccttacatcatggaaataaaatatctttaataaaaatagttaagccgaactatataccttatttacatattatattacttatttactatattacttattacatgttaagcatgcctttaaaatggctggacgatttcattgcgtttgcctttggtttgctttagacttgctttggtttgtttttagtttgctgtggttttgctttggtttatctctggatttgctatgcgcttgatgttgatttgacatagatactgaaataaagataagatgagaaaatgaataaaattataaattttttaaatttaagcatactgcatacttttttaatttacaaatttttaatatttttctaaaaaaaatcggagcttaaaactaacaagttggcagtacccttccaattataaagggttatcgataactctgctgtagctatcggtgctgccagctgattatagtgcggcatgattatctaaacatcaatttgtttcagccgatcccgaaaactattcaaaatgaacttaagcacaagagttatgctgaataggttgacacagcagtgtgtctacaagcggattggtaaggagagacgttttatcttgtgccacacattcaggaaacgtattttcagtgaccttctccaccaaaactgcggaacatgtaattgaaaatcaggaggaacagaagaaagaggctccgccaaccacgccgacttcaccggtgaaccggaagacaatcattccggccaattatcggtttgtttacccagaattcctgcccgatccgaaggtggagtggcgcaacctcgtgcgcgagaagctggagcgactggacatgctggatcgccgcaaacagatcgacctgcccgagttctacgttggatctgtgcttgcggtgacaagttcggatccccatgccgctggcaaaaccagtcgatttgtgggtatctgtatcaatagggatcgctgtggactgcgcgcccgtttcattcttcgcaacgtgattgatcaccagggaatggaggtggtctacgagctgtatgatcctaccatcctaaaga

SEQ ID NO: 17750 - DNA, 2250 bp, DROSOPHILA
cagaagccggcagcagtggtccgttgataactccgactcgagctacttatccaccacgtcgatactcttgtctgtctattgcaaacatagaggagtcaccctttggctaacgaatccgaaactcccgagttttgttgtgcaacatatcaaaaaccgcatttgttcggatccaatttacattcgcatttcaaagatgtcgtaccacaagcccgaagctaagaccgtccaggatctgaaagatctggcccagaaactgcgaattcactctatcaacgccacccaggcctccaaatcgggccatcccacatcatgtgcctcgatcgctgagatcatgtccgtgctgttcttccagcagctgcgcctgaacctgaagcacccacgcgatccctccagcgatcgcttcatcctgtccaaaggacacgctgctcccattctgtatgccgcctgggctgaggctggtctcttccccatcgcggatctgaacaacctgcgcaagatcgacagcgatctggagggtcacccgacgcctcgtctgaacttcatcgatgtgggcactggatccctgggacagggtgtcgccgtcggcgctggcatggcctatgtgggcaagaacttcgacaaggccgactaccgcacctacgtggtggtgggtgatggtgagtccgccgagggttccatctgggagtcgctgcactttgccggccactataaactggacaacctttgcgtgatctttgatgtgaaccgcttgggccagtcggaggccacctccctgcagcataagctggatgtttaccgtgatcgtctggaggccttcggctttaatgccgtcgttgtcgatggtcatgatgtcgaggaattgagcaaggctttccattgtgctgcaatcaccaagaacaagcccaccgccatcattgcaaagacgttcaagggcagggacttccccaacatcgaggatttggacaactggcacggcaagccactgggcgacaaggccgccgaagtggtgaagcatctggagggactgattgtcaacaagaacgtcaagctgacccctaagccggtgcccaagactggtgctgctcccgacgtggacatcaacaacattaagttgagctcgccacccgcctacaagctgggtgattccattgccacccgtttggcctatggaacagctctggccaagattggccagaacaacctgcgtgttgttgccctagacggagacaccaagaactcaactttctccgacaagctgaagaacctcgacccgcagcgctacattgagtgcttcatcgctgagcagaatcttgtgggagtggccgttggagccgcctgccgtcgccgcactgtggcctttgtgtccacctttgccaccttcttcacccgtgccttcgatcagatccgtatgggcgccatctcgcagacgaacgttaactttgtgggctcccactgcggctgcagtatcggtgaggatggtccttcgcagatgggtctggaggacattgccatgttccgcaccattccgggcagcaccatcttctatccctccgatgcagtgagcacggagcgtgccgtcgaactggccgccaacaccaagggtgtctgcttcatccgtacgtcccgtcccaacacctgtgtgatctacgacaacgaggaacccttcaccattggccgcggcaaggtggtgcgccaaaagagctccgacgaggtgcttctgatcggagctggaatcactttgtacgagtgcctggctgccgccgatcagctggagaagaactgcatcaccgtccgtgtgatcgatccgttcaccgtgaagccattggacgccgagctgatcatcgagcacggcaagcagtgcggaggacgcgtagtcgtcgtggaggatcactaccagcaaggaggcctgggtgaagctgtgctgagtgccctggctggcgagcgcaacttcgttgtcaagcacttgtacgtgcccaccgtgccacgttcgggtcctccgtcggtactcatcgatatgttcggcatctccgcacgtcacgtcgtcaacgccgttaacgagatcctcaaggattaggggaccagtcgtgatctggctacattcatttaccgcctacaggaattcccccagttactacttacttccaatattaccattccctctaagattgttaattgcttcattgatttgaaccttacatcatggaaataaaatatctttaataaaaatagttaagccgaactatatacctt

SEQ ID NO: 17751 - protein, 626 aa, DROSOPHILA
MSYHKPEAKTVQDLKDLAQKLRIHSINATQASKSGHPTSCASIAEIMSVLFFQQLRLNLKHPRDPSSDRFILSKGHAAPILYAAWAEAGLFPIADLNNLRKIDSDLEGHPTPRLNFIDVGTGSLGQGVAVGAGMAYVGKNFDKADYRTYVVVGDGESAEGSIWESLHFAGHYKLDNLCVIFDVNRLGQSEATSLQHKLDVYRDRLEAFGFNAVVVDGHDVEELSKAFHCAAITKNKPTAIIAKTFKGRDFPNIEDLDNWHGKPLGDKAAEVVKHLEGLIVNKNVKLTPKPVPKTGAAPDVDINNIKLSSPPAYKLGDSIATRLAYGTALAKIGQNNLRVVALDGDTKNSTFSDKLKNLDPQRYIECFIAEQNLVGVAVGAACRRRTVAFVSTFATFFTRAFDQIRMGAISQTNVNFVGSHCGCSIGEDGPSQMGLEDIAMFRTIPGSTIFYPSDAVSTERAVELAANTKGVCFIRTSRPNTCVIYDNEEPFTIGRGKVVRQKSSDEVLLIGAGITLYECLAAADQLEKNCITVRVIDPFTVKPLDAELIIEHGKQCGGRVVVVEDHYQQGGLGEAVLSALAGERNFVVKHLYVPTVPRSGPPSVLIDMFGISARHVVNAVNEILKD

SEQ ID NO: 17752 - DNA, 12276 bp, DROSOPHILA
gtgctggaattatatcctgttccatattttcgtgatattcaaaacattcatctcatatctctgccgaaagtttgacttgaaaagaaggagcattatgtatgtacatacataagtaacgagtgggatgagcttaggaaatttttattaatttggcctagagctaaatgtttttttttttttcgaaaccaaggctagaaaacatatgtagtagcagtagttcaagatcgtaatcgtattaaaaacgccattctaattggcctagaaaccgtattcatagaccaacgccaaacgtttcaggttttagggaattccaccatcgtttgctcgctttaaattaaaatggctagttcggcggctgatactcgtgaatattgtgttttccaattaatcaaatcacactttgccccacggtggcgttgtcggtcgatggcaaaatcaaattctaatcgtcgacgctatcataatgtatttatgagttgtgttatttgtttttggttttcgcgtaccgtgcgtatacgtaatgcgctcagtacggagttatctgtgtgtgcgccgatgtccgtgggtgtgtgtggtgcatatgtatgtatatacatacatatgcccatatttgccgctgataatcgggtctgcgacgacaaaactaattacaacaacagtaaagcaaatacagtggtaacacggaataatgcccttatcaaaaaacgcggcaaggcggcgcaacaacaaatgcaaacacaggcgaaaaagaaagaaaaacaaaaaaaaaaaaattgggaagatgaggcggagcgagcaggagcaacggtaaaggtgaagctacagccgaagctaaagaccaaaataacacgcacacaacgacaaacgggagaagtggaaacaaacggcgagcgggccattgcattgatgtgtgccagtgtgtgcgttgtgtttggctgtttaatactataattcacaaaattgttcagttcagttcgcgctggtgaacgtaacggaaaagtcgtcgcctgttgaatatttacattagttctatatatgtttttatacaaatatatatattctatttacttgaattgtttttgtcgccgccgccgctcgtttcgttttgaattcttcatcttcttcttttaattttttttttttggtgcttttgtttttgttattgttttgtatctcaactttactgcagcataacaaccacaacaacaacagacgacgaaggagaggggaaatcatttacaaaaataaaacgtacggcccaaatacataaatatatgtacatatatttatatgtatatatatatagtgtgtgtgtgagcgttagcatttgtatttaagtttagtagcaattagcactagagcagcaaactaaatgatatatttttttttacccgaagcgcgcgcttttcgcgagacacgtgcgccatactgaataatatgtggggcgtatgtaacgcaagtatctgaaagatactttctcgaaatggatgtgaacttcaaaagacgtttttcgaacaccttcgccatgtgattacaactcaccaaaatcacttctaatggtgaaattaccggtaaaaacaatttgatatcagatagtcaaatattcttggaattcccagtgtacatattttacgtgtgtcttatcaaagtttgcgagtttcaagtttatgattaacaaaaaatcagatacctatggtgcaatacatcatttgtaatgaaggtcttttggaaatctagttattgcaagcaatttcaccacttcattattatatattcagatatattttataaaaatagtcggtttattgtgaaatgtcgacgacgacatgggatgaaataattttgagcgttacgtatcatttcgatagcggtgcatacgtgctgtgctattctcccgccaatcaatcaatcaatcgaatatcaatcaaagtggctactcctctcaaacggagcgatttcgcctcatagatacaaatgtatgtacgtatgtatgtagagccacaaaccgtggcaaacagtggctaccaaaaggcagtctaccggccgtaaatgtttttacggcatcatctccattcccgacatctttgttaggccaatgcaaatactcctttatggtgtgtgaatataatcatcataccccttgcctgatgggtcggaacggaaagtgaatggtgggaggggggggggagggggggtagtcatataatgcggaaagctctaattatacaaatgtttgtgtttggctttagacggctcttgatcgccttaaacgacgcgtgttaatcaagcacttgaggcacctggagtacttagatggcttttccgaaacgctaatcttaaatcttgaattttgatactaatgaatgtacatacatacatatgtgcgaataaaccaagtaaaaaacaaacatttaggaatgttaattatcctcaagtttctttgtggaaagtgataaaatcaggaaacgacagttaatcagcggtcaaagtttacacatcgaatcgattcacaattagctgattataaaaattgtatgatttcattacgcaaaagcactacagtggtttaaagtattattatttgattatttattgtttgaaaaacaatgagtagcagctgttcattcgattatatttgatgtgtgtcaactaaatatgtatatctgtttcatctctgtagcctttccagtcattgtgcaacaaatgtaattattcacatgaagatagacttaattgaattacgtgggtacaacaaaaaagatacaattgaaataatctgattggttaatctgataaacgaatttcactggatttccaaacaaatctcgcaacaagaactagtttcgaatcatgataattcaattatcccattcagttatgcatgctcataactcacaccacaagatggcaattaaatatgcatcttaaagtgcgttcttttctctgcgtactttttccttcttaggtgcaaaaccttatcacttatcacgtgtgtcttgtcttgccgttatgaccaatttctgccatgtgcctgctgatggatggatggatgattggcattgaaatattccacagttgtggtcataatcatatccactcttgcttcgataacgcaacgagctgatttacttggactgaaaaaactgaaagctgaggtcaattaggcctattatatgcggttatatcgagtaccgaaacacacttcgattgataagcactcgtcgcagagtcaaaagtctgatcctacccactgtgtgtttgtttggcatgcatagaaatgtgtatgttgctgattgcctggcaattaaaaagcactgtaaaattgctatatgaacagcgttttactggccaactaacttgttccgtgtggcgcgacctttagtacaagccgcataccgctttcttagtgtatccgcctacgagtataaggcgaactttgccagcgagtcttatcacttgcccccatatatttttgcagtggtcattcgcggatcgggttcgtttgggttcggttcggctgggttcggttcggttcagctgctggagcagctgtcgccagaccactggtggccattcggagtgcgatagagcagtgagtaagtgggacagtgggtgctacgagaaaaactcgaacacaattccataaacattgtttgttgcaatgatgtgcggagtggaattaaatatatagtttagtttaaaaggagcaatgaagcgacattgcagttgtagtacagtgattccggcaattgattgtggttgtgtaaacccttgtgtggcggatataaccgaggtgctacaatctaattagacgatatcggcgcgggcaaaggagtgcgccttatcacatggtacccccacccccaccgccaccgccatatgatctcatttaaagccccacatgccgacaggccctgatacatgtcatacattcatacatatacatatgtatctcgatgattcggtgcctttgtcgcccaagttggctcaagtatttacgatggacacttctgacttctggtcagcaaactctcggatacgggttccgaattcgagaaaaaagcaaataaagttcgtaacttttgctctccgaaatgaaatcgctggcggtcgcgataaggcggcgctctcccgaccaaccaaccaaccaaacaaactgactaactaaccaaccaaacgatcatcatcataatcatcgcaaacgacaatcgaacccattgacgttttgatgagacgttgttggttggtgttaccgtttttatataatgggtgctaaatcgatactatttacatacctgtcgcttttaggcagtcacgtttccaggcctccaaaaatttcacccgcccgccctcgaaaaaactcaaaaatatcaaatcgtttagcacacgatgagtgagagttgccaaaaatattacgcagcccgattgatcagtcagtcgaggttgtggctttcgtcccgccgcctcgcaacatcttgttccgatctaaacaaaaaaaagaaaaaaaaaattaataaaagtccaatcaattgaggctgtaaacggctgtctggctgcctgtgtaaaaagttcaattattgcttagttttatttcctttattctctagttaatataaaattacatttgaaatattttcatgagagcgaacactttaaatgaataagcaatgaatgtgcaaaatgaaactgaactcagcatgccgaaataaataaagtgatgtttaatacaaaactaatttagattctaacgattccactaacgaagtttgcaatcttcccgcttttcaatgcacagaattgcaatcactggttccagcatttgatcgcacccatcaatccgattcgagcagtaatgcaacaaccggtcaagagcccgcagcgctaaaccaatccaagccccacgctccaagttccaagcccacctaatcctagtccaggacgcctagccgtatacacagttccaagatgaccgataatgggaacaatcataacaacaacaacaacaacaacaacgatgaggcactcagactgaggctaccggaagagcaggcagagcagctgctgcccaagaatggatcagccggccagaccaagatagcgccacctacgcatactcattccatagccgccgcttcggtgccacagaaggtaccagcgaaaaaaaagcgagacaagagcgatctgggtgaagattttgtggcgcccgacggcggatggggctggctggtgtccgtcgccagtggcgttaacattgtgagtgaccatcgcatttactcgcctgtctgcacatagatattcactcatgcctctttttcttcattcccattcccatatccattctccacgccagctagtgacgttcgcattggcccagcagtttggcatccttttccgcgatcgcatggctggtctaggaatctccagctccgaactgaccaccattatcaacacacagattgctgtatccgcatttacaggtgagacgatgaaaaccatatatacgagattatagagtgatagatacagagagatattcaaagccatgagcagccgtaactcacatttgtatgtagtccacgtagtgacgaatcgcaacgagggtgtgactataagatttataatatcgcactatatcacaatttttttacgattctctgatgaaaaaaatcgatagtattttaaattgagtaagttttgaatattaaatataaatagttcacattatgaagccaaaatactacttcttcacaaatttaaactacgtgacaacaattaaatattaatttcttaatcaaaggtctgctgaacggtccgcttttccgacgctacacatatcgagtggtggccctggtgggatccgtgctgacctttctgggtctcttctggatggtgttcgccgacaccttcgccgtctacataatgagcttctcgatcttgtacggattcggacgaggactgacggtatccgcatcctcgctggcggtcaatacatacttcaaggtgaagcgacgcactgccacagcttttcagttcggagtagccggcctgggaccaattgtgtgtccctactttgccacctacatgctgtacgagtttggtgtccaggggacgacactactctttgccggcgcctcactgcacaccatcgcctgctcgctgatctaccagccagtcaaatggcacgtggtgaagcgagatcgcgatgcggaggcactgcagcaggtccagccactggcagagcgtgaggatcaggacgaggatattatcaagaatgttgtagagccggaaaccccggtgctgccacgtgccaatgacggttggtttggctcgcgggcctcgttgaacagcgtgggcactcggaatcgactgaacacctgggagaaatcggacagcaatggccacgtggagctgaagaggctaagcagtaaggactcaaatccgggacgccagctgcgcagcatatccgtgagtcacagcattaaggaggaggaggccactggctacaattctgaccacgaagtgcaacacaccgagctaacggagaaggagaagcaagagctggaggatgagaaggagcgccagcgccgcaagaagctgccattctacatgaaagtggtgatattctttgatatggatctgctgagggatatcacgtatgtcaacctggctgtgggcatcacactgatcaactttgtggagatcaactttgccatcctgacacccttcatcctaagcgatttgggtttcaataaggatcagattgccctggccatgtccacgctgggattcttcgatctggttgttcgattccttatacccctgatcacggccaaaatcaatctaagcaaccgtaccttcttcgttgtgggcattttgggcatgtgcattggccgcatgttcctctcgatgacctccaatttctacgtcatgatggccatcttcctgtggctgggccttaacaaggccttccgcacggtcttctggtccctgatcatacccagttatgtgcccctgaagagattgccggcggcagctgggctgcagctgctgatgtccggcaccttttcgatgatcttcggaccgctgattggtgagcaatagatatacatagaccaatataattgcaatttctaatcttctaattgtgtaacccaacgatcatccaggcttaatccgggatcacaccagctatgcggtgaccctcaacctgctgaatgccctttgcgtgatggcctttgccggctggtatctggaagatttcatccgcgcgcgcagccggaaatcgccaccggtcaagtcaatcaactgatcaacatacgatggcgtagttttactcagtgccagcgaattccaggaccaacaccgttcccccatccatcctaactttagcaaaatgttattcttgttatcgcatttgcccagtgcttttttttttatctgtatgtttatgtaaactatattcagcgtgtacattgtgtatatacttttcgagtgtagcaaattgtattagatattgataattgttaaataatatgcgtaagctgccaatacttaaaccttaaaacaagcgtttcattgaatgttatcttcgaatgttatacctaaagttatctaagatctatgcgacaatttatagcgtttgaaatattctaaaccatcggacaaccacagactgtcaatttttcttgtggtgcgattcgttactacgtggccctggtaaacgatcagtctcaacattatatgatccaatctcttgtggcgcagcaataaagtcgaattaaaatctgtttgtccatccgtctgacagcatccaaagttcaacatctaacaaaaatcttatgacacaacggaagaaagtccaactgaattggaaggagcacgtgaatatcacgagtctactcatcataacatccaaatcaatgatcaatgacactgagaattgatgcggaaaaaaaaattgaacaaacactggtggcaagttgacttctgagaatttatatttatacccgttacttgtagagtaaaagggtatactagattagttgtaaagtatgtaacaggcagaaggaagcgtttccgaccatataaagtatatatattcttgatctggatcaaattctagaaggttgagattcaacatactgattctagaaacaaagacgcagcgcaagtttgttgacaaaccgtacaaaactgccgcgcccacacttttgaaaaatgagttgatatcatttcacatttttataagtctcgtaaatttctatcgatttgccaaataaaactttttgccacgcccactctaacgccctaggccgttgaaccgttcacgtccacactttgaaacaatttgtatattttttctcattctatctcattatactgagtaggctgagcacttgactaatgaacatcggaagctcggaaataaataaataaataaatacctagatatagatatccagatataacggcgtgaaaggttaaatcaaacctttaaaacatattagatttgattgaaactgttatcaatgcaaaacacccacactgaatggatttgtaaaattatttgaccaaacaattaaatttgcaaaatttgacgcgtgctaaagaataaaccagttttggtcgatgacaacaaaacatacaacaatgaatgggttaagaaccgggaatcaaaatgatatgtaactccgcgccagcggaaagttacaggctcaaaaaaaagtgtttaaaaacaatctcataacgaggcgatcaggttgaatgcaccgcggtgcttatcaaatagatcgagaggaaacatactgaaaacatatgcaaaaatcgggcaggaaactcgggccaagttcactgtctctaccaagtcaatggcaaataaatttgtcgcagtcggtttttgtaaccacgagtattgctgtcgccatcagcggaactaaatggaaaaaaaatctgagtgaatcaaaccaaatcgaccagcttgggcataccgaacactcttttcatttcaaaaaagaaaaaaaccaattaaatccaaattaacttattatatattgtatgtatctaaacatatagtgtaagtactaacaattttttaaggtgtttcgtgtgggtcagtgatccattgcgcgcatagtgggtggtaatccatctttcgcacaactgaaccttcgccctactaaatcctcttttcatcagagataaacgaaggcacacatataaagccacccacttgtgggcatcccacccacagagagtaggtggcgtaatcaactgagcaacaagtggaaacaggaaacaggactcagcagctgtgctgcccatctagcctttttatagctacaatttcaataccatatatgttggtgtacgatttgttattatttaaaataaaaattttttttttaaatataagctcaataattcattttggtaatgtcaagtttgaccctaaaattgtgcgaaattagattttacacatatttttttgccaattatagaaaacgggcctgttttctagaaacgtttaaaaaaattcgagtttattttgcaagtcctaacaaaataactcactgcacggatgtgtggcgccaggactgcctagtttgttcgagatcgggtcaatagactgttagcaggtgtgtaaccaataggggtggtttagtggcaacatcgtacagcaaatcaacaatctgttgccggcagtttcagcttcaggtactcgcatgcaaatgccacgtggttgtgtgcggtgtcattgccccacttctcaactatccccacaggaactccagcaattatcgattatttgtcaatcttttgggacaccgccgtgaccttagatatacagtttaatatccttaattaaaaataaataccaatgttggataaaaatgtacacatgacatacatgatttgcaaacaaaaagaactaacaaacaaaatccagatacaatatttaaaatctcctgatctcatttacgagggcgcactgttatcactctttaacaaagacgcaacaagttaacagaagagaaaagagtgagcgagagtaaagagcgaagagctgaagagagagctggctcatttgcgcaactgcagcagcgtcaaaaggccaagtgaagaacgtaaagaggagaacgagaggagaggaagagcctgcgaatgcagcgcaacaactgcagacaaagaacgaatgtaaacaaagaaggaaggcgcattgtttgtagattttggcaagcgaagtaagcgacttctctcactccacgttttatttctctttcgatcggcattagaacgcgatcttgaaatactgcaacaccgacacacacacacacacacacacacacacacacacacacacacacacacacatggacatggggactctctctgaatgaaacgacactgtggcacagtgggcccaaatgtaaccactctactccaatttcatttgaaccagttccgattttcattgtttagtaagagatcggcaggctaaatatatctagtatcaaaaaaccgatagtaattcataagttaataataattagtaattcccaccttgcagccttctaatttttcgcgttctttacaaaagtgtgatcaaaagttctagaaatctggatcaccaatacccattgctagctagttaaccaattaatttggcccactgtgcgacgacggtaacggcgactgagacagcggcagcgacgggacggcaaacggcgacggcagtcagtgttcagtattcagtatcgattgaacagccgcgcgtagctcatcgaaatcgaggaaggaagagacgcgacgagagagcgagcaagacggacaggcgaccagacagagacagcgacagcagggaaagggagaccaagacggagaccgagaaggagacattgagcgcctgccgccccctcttttgtaataaatagcgctgtgcgaagcgaccacactaccaaacggcaaaagtccgctgagagcgacgcaacgcaggccacaaaggcccgcccccctcccccctgcgatagacacaacagaacaggaacaactattgcaacaacactatcacacacacacacacacacacacacacccgcagtcaacaacacccccctgaacgaaagggagaacagtgaaacagctggaacaagaaaccagaaaacaaaacaggctgacaaaacaaatgtcaaaattagcgactgaccaaagggaattttaatcaaaagttaatacgaaaaaaccaacaaaccaccacgcgtttctccaccaagtgccttaaaagaaaaaaaaaaaacagaaagaacataacaaacaaacaccgattcaaatgaatttaaataacaaattccaatgtgataaagctgaaataatcgtaaaaacctaacaaacaagagttcacgtctgttcttttttttcgaatttttttcgtaagtgtgttgtctaaaaatcaaagaaatggaaaaatataattagaacatcagaaacaacaaaccccacggagacggcgggcataaattaagaaaatcgaaaaacacaaagccacaacgtaaaaaaagtatccataaatctatatgtgtgctacacctcatatatagagacctaaaataaaaccaaaacaaaaacaaagcaaatccaggaaaagcagacaaccgaggagaactcagcacagcacagcacagcacaacaaagcagaaatggcaagcaaacaacccagaaaagtggcgcccgacggtggatggggatgggtcgcttgctttggcgttagtttggtcaacgtaagttcaaatttccagttcttagttgccagttcactgattaatactaaatagattcacccaacgacacaacattccaatgccaattagctaatacgtattggccaagcttttatcaagcaattcccttcggccatctcacttactttccccatttgcacttaggataggttagttccaaaagcccatggcatttcatagttgtatatttttatatggctcgtggtaaacgtgttttcacatcgacgataagattcaaatgaaatatgacgaaactcaatatgcttctggtcctacccgcattctcacatgtttgtacacggatttatgatggctacctgtaatattcgtatgtttggtgtaggggcggcatttagaccattttcattaataataaatcgtcaaatggacgtgttttggtcagcaaaaaggggaagaggttattggaagggcgatgttggtgtttatcaaatttcaaacgcccttaaaatcactgcatatc

SEQ ID NO: 17753 - DNA, 2704 bp, DROSOPHILA
tcgtcgcctgttgaatatttacattagttctatatatgtttttatacaaatatatatattctatttacttgaattgtttttgtcgccgccgccgctcgtttcgttttgaattcttcatcttcttcttttaattttttttttttggtgcttttgtttttgttattgttttgtatctcaactttactgcagcataacaaccacaacaacaacagacgacgaaggagaggggaaatcatttacaaaaataaaacaattgcaatcactggttccagcatttgatcgcacccatcaatccgattcgagcagtaatgcaacaaccggtcaagagcccgcagcgctaaaccaatccaagccccacgctccaagttccaagcccacctaatcctagtccaggacgcctagccgtatacacagttccaagatgaccgataatgggaacaatcataacaacaacaacaacaacaacaacgatgaggcactcagactgaggctaccggaagagcaggcagagcagctgctgcccaagaatggatcagccggccagaccaagatagcgccacctacgcatactcattccatagccgccgcttcggtgccacagaaggtaccagcgaaaaaaaagcgagacaagagcgatctgggtgaagattttgtggcgcccgacggcggatggggctggctggtgtccgtcgccagtggcgttaacattctagtgacgttcgcattggcccagcagtttggcatccttttccgcgatcgcatggctggtctaggaatctccagctccgaactgaccaccattatcaacacacagattgctgtatccgcatttacaggtctgctgaacggtccgcttttccgacgctacacatatcgagtggtggccctggtgggatccgtgctgacctttctgggtctcttctggatggtgttcgccgacaccttcgccgtctacataatgagcttctcgatcttgtacggattcggacgaggactgacggtatccgcatcctcgctggcggtcaatacatacttcaaggtgaagcgacgcactgccacagcttttcagttcggagtagccggcctgggaccaattgtgtgtccctactttgccacctacatgctgtacgagtttggtgtccaggggacgacactactctttgccggcgcctcactgcacaccatcgcctgctcgctgatctaccagccagtcaaatggcacgtggtgaagcgagatcgcgatgcggaggcactgcagcaggtccagccactggcagagcgtgaggatcaggacgaggatattatcaagaatgttgtagagccggaaaccccggtgctgccacgtgccaatgacggttggtttggctcgcgggcctcgttgaacagcgtgggcactcggaatcgactgaacacctgggagaaatcggacagcaatggccacgtggagctgaagaggctaagcagtaaggactcaaatccgggacgccagctgcgcagcatatccgtgagtcacagcattaaggaggaggaggccactggctacaattctgaccacgaagtgcaacacaccgagctaacggagaaggagaagcaagagctggaggatgagaaggagcgccagcgccgcaagaagctgccattctacatgaaagtggtgatattctttgatatggatctgctgagggatatcacgtatgtcaacctggctgtgggcatcacactgatcaactttgtggagatcaactttgccatcctgacacccttcatcctaagcgatttgggtttcaataaggatcagattgccctggccatgtccacgctgggattcttcgatctggttgttcgattccttatacccctgatcacggccaaaatcaatctaagcaaccgtaccttcttcgttgtgggcattttgggcatgtgcattggccgcatgttcctctcgatgacctccaatttctacgtcatgatggccatcttcctgtggctgggccttaacaaggccttccgcacggtcttctggtccctgatcatacccagttatgtgcccctgaagagattgccggcggcagctgggctgcagctgctgatgtccggcaccttttcgatgatcttcggaccgctgattgcggcagcgacgggacggcaaacggcgacggcagtcagtgttcagtattcagtatcgattgaacagccgcgcgtagctcatcgaaatcgaggaaggaagagacgcgacgagagagcgagcaagacggacaggcgaccagacagagacagcgacagcagggaaagggagaccaagacggagaccgagaaggagacattgagcgcctgccgccccctcttttgtaataaatagcgctgtgcgaagcgaccacactaccaaacggcaaaagtccgctgagagcgacgcaacgcaggccacaaaggcccgcccccctcccccctgcgatagacacaacagaacaggaacaactattgcaacaacactatcacacacacacacacacacacacacacccgcagtcaacaacacccccctgaacgaaagggagaacagtgaaacagctggaacaagaaaccagaaaacaaaacaggctgacaaaacaaatgtcaaaattagcgactgaccaaagggaattttaatcaaaagttaatacgaaaaaaccaacaaaccaccacgcgtttctccaccaagtgcctt

SEQ ID NO: 17754 - protein, 645 aa, DROSOPHILA
MTDNGNNHNNNNNNNNDEALRLRLPEEQAEQLLPKNGSAGQTKIAPPTHTHSIAAASVPQKVPAKKKRDKSDLGEDFVAPDGGWGWLVSVASGVNILVTFALAQQFGILFRDRMAGLGISSSELTTIINTQIAVSAFTGLLNGPLFRRYTYRVVALVGSVLTFLGLFWMVFADTFAVYIMSFSILYGFGRGLTVSASSLAVNTYFKVKRRTATAFQFGVAGLGPIVCPYFATYMLYEFGVQGTTLLFAGASLHTIACSLIYQPVKWHVVKRDRDAEALQQVQPLAEREDQDEDIIKNVVEPETPVLPRANDGWFGSRASLNSVGTRNRLNTWEKSDSNGHVELKRLSSKDSNPGRQLRSISVSHSIKEEEATGYNSDHEVQHTELTEKEKQELEDEKERQRRKKLPFYMKVVIFFDMDLLRDITYVNLAVGITLINFVEINFAILTPFILSDLGFNKDQIALAMSTLGFFDLVVRFLIPLITAKINLSNRTFFVVGILGMCIGRMFLSMTSNFYVMMAIFLWLGLNKAFRTVFWSLIIPSYVPLKRLPAAAGLQLLMSGTFSMIFGPLIAAATGRQTATAVSVQYSVSIEQPRVAHRNRGRKRRDERASKTDRRPDRDSDSRERETKTETEKETLSACRPLFCNK

SEQ ID NO: 17755 - DNA, 2673 bp, DROSOPHILA
ttttttgtgtttaactcttccgcctttgtgggagcgagatggaagtaaaacgcgccgggggtaatattcgtgcgtgtgtgtgtgagagagagtgaactagcgggcgagacggaaacaattttgtaattttgtttaattattattgtaaataacgcgagatgaattttttgttgtttggcgtgttactactactaacgcgacggctgctcacacacacgcgcatacacaatcgcacgcacgtttaaactatgtacatgtatatgcagagccagacaaacaaacaaaattttgcctgggtcacgtttcttggctctctcacagctttttttctacggttgccctttattgcattatctttgttatcacacgggccgcggggcgtggctaaaaggggggcgggcggatgttggtcgtcggttggcgtttgattacctcgcagcttcccaacgaatgagcctaacttggattttcgatcacacgcggcgacgtttgtttcaacgataattccgaattcgtgcgctcgacgttccgctccgttcgaaagttgagagagacttgaaacatatgttcggcgttgctagaggtggtcggccaccgatagaaacatcgataggtccgatgttttccactcgtatattaattcaaggtttggctatcgatgtttttagagtgcccgcactatatctatttccatctctatttcgttggtattttttgtattttatgacatttcaaatgcaaaagcaggatggcaacgccagattgccccgaatgtacgttatttttaaattgcagcgttgaatatgaaaaattgcaggtacatacagtttctaataattaatagcaataattattatttagcttgtattatacgaagtgcacatgcagctatgcatctgaaaaaataatattaatatatcgccttttcttccatcgatagagttccgcgcctatcgatatattgttgatcaccaaataaataaaactaaataacaacgcaatggaacacgcgacaagtgaattgagggaatttatctcagatctggtgattccgcaccagcgttgcaatgttaacatcaatccggatcacatcacaatgctggagggcaccaagatcaagaagcagcactcccgaaaacgtcgcgcccacaaatccagtacgctgagtcgccgggaatatgcggcacttggtttgaacactcttcccaccaagcagatgaagtacgaggaggcactgccactgcaccacctgtggaagggctatgtacgcgagcatctggagctgagggaaggtgacgaggtgccccaggtgcacgatgctcgctacgacgagttcagccgcaagttggtgaaactggacttgcacggtgccaagatgaaggtgctgcagtccaagtgctccaccctggaaaatttggctggcatctgcgtcatggacaccaagaacgtgctgaaactgctcggcaaggaccatcggctgcgcacaatacccaagagcgagtgcgtctttggtatgaaagtgggcaacatggagttcaccatattcgggcagcacctcaacattcgacccgccgagcgaagcgttaagaagatcaagaactttgtgaagcccttcatgtaggaactacaggaccaatcattagccatagaaattgaatcctattgtaatttaaggaaaaaagtttattggaaagttagcatcgcttttcaatagaaatttaataattgccctcaaagatcctctaaaactttacttgtatttgagattgttgtgtttaatatatatataaaaccgtacattaattgtttttcttgttttttttttttttttttgggggggggggggtatatttcgcgccgcgtttttttcgtatttaggttctagtttatgggagagattacccggattcaaatatatccagtttgtaggaaagatttatgcgggcgtcttggtcatggtgatgacagcggatggaaccaagccgagcacttccagcggcttctcgtagtcgtcctcggcgaacagcttgcgcggaaaggtggtcatcagagagaagggcgactcgatgccggtcttcatctggatgaacacacgtacggcggacagctgctccttgacgttgaaggtttcctgtagtgttgagccatcctgcaggcgcacctggatgcgggtttcggtgtagtctcgcggcggagatttcacaccggccggtggtgacgaaactgtggtggagctcacggatggagctggctctgcgttgcccaattccttttgttctctgcataccatgaattataatgaattatgaagtggaaggatagggctaatccttacctagccttgcgtgctgccttgtccgcctcaatttgagcctttacccgatcgcgggccgccttctcctcgtccttttcgcgcttgcgctgctcaacgatcttcttcatctccaactcctccatgcgccgcttggcctcggtcatgtccttgccggacttgatgcgattcttttcccgctgcagggcttcgattttctcgcgctcctcgcgttcgatgcgtttctgcttgagcttctcctcgatgagggccagctgggccttcttctcctcctcggtgagcgccttcttttcctcctccgattcggagaatttggtgtgaccggttttggcggcatggta

SEQ ID NO: 17756 - DNA, 673 bp, DROSOPHILA
atggaacacgcgacaagtgaattgagggaatttatctcagatctggtgattccgcaccagcgttgcaatgttaacatcaatccggatcacatcacaatgctggagggcaccaagatcaagaagcagcactcccgaaaacgtcgcgcccacaaatccagtacgctgagtcgccgggaatatgcggcacttggtttgaacactcttcccaccaagcagatgaagtacgaggaggcactgccactgcaccacctgtggaagggctatgtacgcgagcatctggagctgagggaaggtgacgaggtgccccaggtgcacgatgctcgctacgacgagttcagccgcaagttggtgaaactggacttgcacggtgccaagatgaaggtgctgcagtccaagtgctccaccctggaaaatttggctggcatctgcgtcatggacaccaagaacgtgctgaaactgctcggcaaggaccatcggctgcgcacaatacccaagagcgagtgcgtctttggtatgaaagtgggcaacatggagttcaccatattcgggcagcacctcaacattcgacccgccgagcgaagcgttaagaagatcaagaactttgtgaagcccttcatgtaggaactacaggaccaatcattagccatagaaattgaatcctattgtaatttaa

SEQ ID NO: 17757 - protein, 206 aa, DROSOPHILA
MEHATSELREFISDLVIPHQRCNVNINPDHITMLEGTKIKKQHSRKRRAHKSSTLSRREYAALGLNTLPTKQMKYEEALPLHHLWKGYVREHLELREGDEVPQVHDARYDEFSRKLVKLDLHGAKMKVLQSKCSTLENLAGICVMDTKNVLKLLGKDHRLRTIPKSECVFGMKVGNMEFTIFGQHLNIRPAERSVKKIKNFVKPFM

SEQ ID NO: 17758 - DNA, 31034 bp, DROSOPHILA
atctgtagataaatgtccaacggtcacgtgtgaagcagtaactgctgtccactggataatgacgaaaatggttaatatccgttcgcttggaaaaatgcgagacgcacataaaaacgaaataaatatacatatacaagaccatcgcaaggagagtgtcgttcgtttattgcgcgaaagtattcttgtgtcatcggaaaagtattttaatgaaattttaaatgccaatcaatacgagccataagaaaggaagtcggaacttccgcgttgctttcaatacttcgacgagtacaaatacttttaattcgcaatccgaaacgcatattaaccgattgccgatttgcttacacagcttttaataaactttccgggatcttggcaacttttacgcggcttgtggctttgaaattttaagggagaattgtaaatgagcaagaaaatcaacattaaaagaagttttaagcaatcggttggaggagtttacagtataacttttcaattttcgaataagcttaaaacggttacatatattccatatatatatggcacgaagcaagaaaacgttcacgtttaatatccaacccataaatgcgctgcaaggaccacctgatccttttacctacctcaggatacacacgacccggcacacatatcgacattgccatcgcctttcctcggctatttatgataattcaaagtaatatcctggagcaatttcatcaacaaagacacacggctgggagcgagttgagctcttgtggatatgcaaatatccttttgccagcccaggatgcccccaaatccccccatttcatttcagcattgtggcgaaggaggccttcgaaatggctagaacgtgtcaaatgtgtgaaaattgggtaaatttgtttgtctaattgggaggaaggatgatagccattattcgtccttgaggtctttaatttggccaaaggcaggtgtaccttatagaatttaatcgaaagtaatgaattgaatttgtattgcatttttaaaacctctatatattttacatctcacaagaaatttgacaactttggacacaggcatcatcttaacaaaacattctgacattggactcttttacacaaaaaaattatctgctgcgcacttcttagcaattcggctttaaatccgatcggattacaccgactgcattttcaatgctagttcacttttggttggcgggacaggccatttggtagagaaactgcgccagagtgcgagttggcctgcctgtcatgtactttgcggtgagatagggtaccagtccatacttggttagcagtccagtgccccgggtgtccagatgagcccaatccacacagggtaccaattcgtggagtaccgctgccgccaaacaggaattcgccagtcctcgaccatcattgcttaaatcatatcccatttcatcggtgatttgtttcctataataattccacaatggcaaacgccaaactcgatcgccagtcaaagctcctgcggactggaactgcttccagatgtaatgggaattggagaatataccggtggctccgccgccgaaagccttcttcacacctgaacccaaggtggccacatcgactaccaagcgaggcttgtatgtgctctgtccgtagagcaagggatctgccattacgacgactccggccttgtccagatttcgtacagccatcgatttgtgattcattagggtgaccacatcgcctggcttacaggccattcccgatggcatgttctcgcacagcgggatgatgcagcagacattgatgggcagggccagtgccgcaacgcaacgcatcatggccacacaggatgcagctcccgacatgcaagccctgtactcctccattcccctgcatttcctcagattcatggcgcccgagttgaaggtaatgcccttgcccaggaacaaaatgggtttgtcctcgggattggtgccgcaataggtgatctccatcagaaccggtggctcacagctgcccttggcaatcatgaggaacgaatgaagacgctgctgttcaatccactccatggtgcggatttcgacggtaatgccacaggggcacagcgcatctaccgtggcctgggcaaaaagcgttggtgtcatgcaacaggcaggtgtatcacacatcctgcgagctaaattctgagcctccgccttgaagacaccccgggtccaaccttcatagtccggagattcgtacagctccagtttggggatgtgtggtggcttcctcttggagttcatgtcacaatatcgccaaacggccagaacggcgccctcggccgcctgttcggcatagtccatgccatctacaaagacttccgaaacgccaatctcttgcaaggatcgggctccaattccagccgccacacgtacattctccatgccctcatcgagcatttccagttcgttgaagccgatgccctcgaggccgacaccaaccactgccatactgcgaaactctggatctatgttgttgaatatcttgcccctgcccaagtggccagtgattttgctctggcaaatcatctcctgcaacttgccatgcagccgatcattgaccttttcgccagctggcgttagctttgggtcattatcgttctccttctgataaacaccgaccacaagacccttggaggacttggattcaccaccgcaggcggtacgtatttggatcaaatgggaaacgggcagacgacgctggactactgacttcagaacattacgtagtttgttcattttgaattcttaatttcttatcaacttgtatgtgtgcgcgatccaaattttgttactactataaatttcgtatttactttcgttatgcggcgtatttgcgattcagccgtttaaattgcaagcaaaaaacttttttttcacgaaacatgaaacacaagacacgaaatacgacaaaaaattttgatgaaaactttagtgatttttttctatgttttccaaaacgggactaggtacacgacactttcgaagtatgagttcaactgaggcttttattccaaatacatcgggctaaaatattatcaggccgaagttgatttcaagggctgctttgcaagggtatttcaaaaaaaaactttttacacatatattttagttgttaaacccgtttaatcttcagatttcatttgtgtaaaagtatacataacccaaactgaatattcatttcattccctatatgataatagtctacttgtgccattcaagtgataagattgattccaaccaacagctgtttcctcaattattcactgtataattcaaggtaaaactaatggggttcaaatgatttaagcggctaattgaacgcaaaacttaaccaactcgttaattcatgcaaatgagctgcattgattatctggatgattaacggaatgaaatggaattcgtttgatttaaatcagcacaacggctgccaaattaataaactccaactagtaatgcgtttagtggtaacacatacgcacattatttacgtaattggtttacgcagttaaccacctaactaactaactaactaataggtttagtttgaaagtgcaattgaatatcttctttttttttgttcatattacacgtttgaatgggtgtaatgttttgcaaaaaaaagttttgcttgttaaaaagttttgttttaatattgctagaatatattgtttcatttgtttttataataaaacaaacattgggtattgatttcattgcgcttggaaccatattattttactgcacaactttgaatttatgttgatttatattgatttgacttgactaatgatttagtgatatttttataagcccattaaagaaaatgcttttatagttcctctaatataccattaaaacttttcctataatcgaattgaaaatcacatttccaaagcacttttgacgcttccttggaatcttaagtgagacacatactgtgtaagccaaaaacaagaaacaacagcaaagtgtatctgtaactctaagcccaaagcagttttcacttaaagttgctgctggaatatttgttgtttcagttgggttagcattttgcggaacttttcggctttggtgaatctgcaggatgccgctccaccggaaccatgtcataaaatggtgttgatgatgtctgtctgagtgtgggtccttatgtgcagcccgtatgtgtctacatacaaatatatatatatagtatggtggtatttaggtattagtgttgacaacatttgctgccaacaatttcattaccgccacatttaaagttttgccaagcacacattgaaaatgagacagcagaagatacatggcctcctaaatggtggcactgcaaaaaattacgtgccaattgggaagtttaatctagagcaccatatatgtgagtaatttggagatagcatagattgtccatctttttgtggttaaaatattcactaaaaaatggaaagccgccaattatttagctgaaaaagtatttttttagtttgtttttgtctgggtaaatattctcgcagtgcacatgtatgtatgtccttgcaaaaactcgcgttcaactctcgcttatgactaagccagccggtcggtgctgtttctatttgtacagcagtcaggccatccatccagcctttggccccctgaactctgccctctgaagtccactggagagctccaccagagctcgttataaatggaaaactttggctgctttctcaagtggttttgctctactatttttttccccctcacctatttttccgcactgtttttggctgttgctttcagttttgcagttcacatttgattcgaaaaagttttttgcgcttgtttattttactttttaatgagagagacatgtcggggaatcgagatcgcatgtccatggtatttgacgattagccatgtgaaatggttggtcaagttccttggttccgtggcggcgaaaacttttctgttcttatatatttgggttattttccagcaggaccaagttcccggaaaagtttcatgatggtacgaagaggtgcaagggacgtggaaatttgtcaagtggcaatttcaaccggtggaaagtgtctgtgcaacagttgaactcacattccactcatcgcatgaggcagtagaatgatatctacttgtctgtcagtctgcataatattgatttccccagctgggtgacgtttttttttttttcatgatttccaacaggacttatgcacttatccttggtccgattccggtcctttggcaatcttcaatctcgttctctagtggctgactggataacacacagtttgagtgtttttaatttcaacttccctttagtaggtatccgcatgagtgcgatactgaggatatcgaaagtcactgaaggacgcatcatttgccatttgagcactggtattttctacttttctactttttgtttttagttttttttgctgcccttctggccatttgcattcatttgtttgccattgaatgtggagcaagtcttgtttgccattttattgaaagttgcaatcaaatgattgcagaatatgtcagtgccatcgacccgtattttatttatttcttgtttagtttttgtgtcccaattttgctgcttttttggcatctctattttggtgtgtttttttcacaaaagttggtggttttttaagcagctgacaaaaacaggtcacagttttttcacttggttttcatacataaagcttgcctacaattgcttgttatataatgtcatgtgaattgaatttctgtgtttttttttttatcaatgttaaatttattattattaattttggtatgtttttaatattcttggccagttatacgcttaactaaaaaaacaaactaaataaggaatgacttttaagttgaaaccattaattaccaaattttgtagccaaaaagaactgtaaatatgtagtctcattcatttcctttcaattcctttcaattcccttctaattgcttaataaatcggttaaacaaactttctgttgagctgcttagtccgagtttgctgaagccctctctcttttttatctcgcttgactaaagttcggcaaattccgagcaaatatataaataattgagttatttgaggaaggacggggatgaaattggctgaaacgagatgtgctcatcacttaaattgaaggcaaatatgtagttggatttcccccattccgatttgccatcagaggcaaattgaaaagttgctagcttcgaacgaaaattttgcaagaggtttgcgggggaaaaaaaaatgaacgagaaaatggcaggagaagccaaggcaaaatcctggctaaaacatgggtgtgtgttagtcacagaaagttgcagcttagtttggccaaaagggataatttaccaaccatcccctcattggctggcaatcaaaaagtcatcctgccctgggtgtatgtgcatttatttgattttttaattgaagattaaagttaattgaaattgatcattattgtgattgattgagccgacgaccgtactatattttcctttcatttccctggaatttaagccgattatggcgaaggcccaaatgaaagcatgcaatatgcctgaggaattccattcggtcacgatagcccccaagaaaaatggcccatgacgaaaatctacttgtcagccacttttcaaacaggaagattctgtgaaagagacggcaagattgagtgagataaagaattacactaattaatttaagaagctttgacaatcagcatctgtttgttctagcacttgggaaaaattattacatttggaactagaaaccatacgaaataggcataagatattgaaatataaacaattagtcaaaatgttatatttttaatcacaactaattataggttctgataatgtaatttaaatttaagtatagaacaaataaattaaagtaataaattgactcaatttatttttcaaaaataatccccaataaatccttattaaagtccaaaagtgtgtattatgtaaaatgtaatccagatgaggcagtctaagtttttgacagtgcagcggaaaaagcgctgacatttattaatgttaacgcatcaacaacaatcgctccgcccaatggcgtgggcgtggcataagctacacaagtggaattaaatacgcatttgcgttgtcagcttcacagtgagcaaaagtgactttgaagagcgcgtcataaaagtttgtaaaaagtctcgggtgggtggataaagagatttacccaggccactctgaacataataaaaaatgtgaaggtgccggatcgtattatgaaaatgacattaaaatggcaaaaggatcatcaggagtaagataatataaaaaacgctagagagagtctcaaatcattaaagtggattcaagaggcaatcacagcgatttacctactgctcttaactctcactgaaagggcgcaatttcaaccaaatggtaattatttccgagcttaaaactgcatagaactgaaacaatttgctggttaagcaaaagtaaatactttgggtagatatttttgttcttgggggtggaaggcatcttaagggtggtaatggataaaatcacgagaaccatgtcatctttgaaatttatcatatttctctaattttggttttaaacttatacatcttatagtagttcgtaacctctgcttaagagttctttatataactcagatagtttaatctgtaagttagttttacgtttctttattttttcacacaaaaaattacaaaagttgaatttttcacaccgaaccaatgcctaatcccctgcatgttgatccagcgaacataactcatacgtacaatattatttgtggtttttgcgctgcattttcaacatttggcgccattggcgatttgacgcgcaaatacctaaatcaaaaaaaaaaggaaaaaaaaattgaacaaaatttatttttactgtgtcctgtggccacacaagttatgaaaacaaaaggaagtaaagaaaatgcagaaaagcagtccaatagcgcccaaaagtctgcaactgttaaactgttatacggccaactaaggtccaagacagcatcaccaaaaactgtgctacgagcaaggtcaaagtgcgcatgatcgaagagagccaaagagatgtaagatgaaagggcggatgcaatgggcaatggcagtggcaaaaacaatttaactacatgcgaagcaacaagaacaacgagcaaaaggccatggggtttaggccaaaaaacgtaacaacggcctgaccttcaccatcaccgcagttcttttttttcagtaaaaatatcttatacatggtgtatgccactttgaggcgcttgtgtgggtgcgtttgagatctgcttttgttggcttaaatgttttcacgctaaatggagcagcagcataagcagcagcagctacagcgtcattgtggcggcattgatacgcggaagtggaaccacacggcgcatacttaatgggtgcgtatctatgcactcgacaaaataaatccaaaaaatatgttattcaatggttggtaaaattaaaaattcgataatttaacaaatatagcaatcgatctatagtgtatcataccaattaaacagaatgtttaaaaatcctaacattttaaaattatattacaaatcgatagcttcatcttataaggttttctttcttttgtttttcataatacaataaattactattttctggttttagttaactaactaactacttttttttgtatctactatctgccctagtgagcctgtatctctgcttgcataatgatgccaagagatctaatgagtttgttaaccccaatttcgagcaaaatgaaaagcaattcatctctcgtggaaatcgtattcaacccaatgattgaaattttgcggatttttcacatcgatttgccgattttctctgtgcaatttgaatgcgacatttacgatgtgctggttaaaaaatatttgttgtcattcgtttcggcatcgctggaaatatgctgggcatgattgatgatatatctgattgaatggggctttcgacgaactgcctgatagatagatggttcaaaatggaaggactagcagcaggtggcagctgccaggatgtaagtatccttcgctaagcggatttcaaccaggccatcatcatcagaaaaggagtttatttcttttctgtttttggcttttttttttccatgtggtctgcgtgtgcggaaagtttactgtttttcagaaggaaagaacttaagtaggatttttccatttccacttttcgtatgctaatgcaagggggaaagtggaaaagagaagcatttaatcaagtttatgtggaataaattatatttatacgcttttctttgaaataatggttacagcgttgccattaggcttattagaaaagggaaaagaagaaaaatgagaggaaaaaccacccaaagaagtcaaagcgattaagatggatgatgcccgaaagtggggagcataataagacaaattatttgcaaggatatgaaaaggggttacaaaatggaaggaataaaatacttttcatttcaaataataattaaataaatcaatattcaataatataagtatatactgcttggcaatttcatttaaaaaggctagtttcaaaatgagttgagtaataaaaaaaaggaaagcattagatctctgcatactgcaatgcacatttttgtacatataaactgtgacagaaatacccacaaattacatgctcatagaatctcggaaacatatcgtgcacataaattcctactctattttattgaaattctgtgaggaacgtatgtgcaatctcttctcattttttttctgttgaataagcatgaaaaatatcatgttgcatattgtccgaaatatagtttagaagtcttgtgcaaaaatgcgatgtcgcaagtaagcataaaaaaaaatatcaggcacagcacccatctgccacccaaaaatgtggatctgctcatgtaaataactgcaaatggagctgtggaaaaatattgtagttgacaatagagtttttcattggttggctaaacaagtcaaggttcggagttttttaagtaattgctgcttatacaaatttacggtgcaagttttccctttgttagacgagataaatgggggtggcatatttacgccccatgatttatggcgctcatttttcgaggacattataaaaaaataaaaactttttggtgggtcaaagtgaagagaagtcaaacaaagataagcgaaccaaactttgattttgtgtgccatttgtttattgttctcaattgttgttacattttgactgcgacacaggtggtatatttgatcgttttcatgtccttatattttcaaaagggccattttgagctacttttgtagcgttgataaatgagagccatcttcacatgtcacgaaagttttaagttttttaaaactttttagtattaaaatcccctatttttctaagcccgatatatacaataggtatccttttttgcgaaccaacgttgatattttcaaagacatccttgttgcataaacaggaccgtggaccgtgaagtatttagcatacaaccaaaatgtggagtctcatttttcgctcgcatattttcgcccacagcttttatcctgcagatgacggaagtctcaaagtgacagacaattttagccttaacaagaataacagcagcacgctgaagtgatggaaactctagccacatgtgcgcaaatattttttcctgcttctggcttctaccgtcagtgccttccagcctcagtcagcataataatgaattacatacggtggagattcttgtgccgggaatccggcaatcctagccgtcatcaacatcgggcaacaactacctatggaaacagtctgagccactcgcttagcttccttgccacgctttgttggctgcagcaattttacaattgactgtttctgctgtttctaaatgggggaaactccccgttttgcagtggaaaccccctttgtttaacggggaaacgggatggcgaaatgggtgagtttgtaaaacgcttgacttgttttacgcattatttacttagttgggatgctagctacctcttgctccacatgtacatgcacgtgtttgtataagctcacgcaggaaaaactgttgtcacaacttcgattttgttatttaaagtaaagtttaaagttatttaaagtaaaggctcaaagtcactaaaaagaagtcttaaattaagcaatagaaaatataagcatacattttggcttaaaaactataactatcgatgcagaacccatttctctcagtgttgctgtgcgtgtatacccttttagttgtctttgtgcgtccattccgtgggggataggggcgtggcaaatgaactagtataaaagtaagtttgcggcaagcagcaaaacgtttggttacaattaatttcgtactctgcgctgggtaataaggggatatatgcacagatacagggtatgtgagtgccataaaaggggggagattgtgatgcccggtgggggggggggtggccccttaatgtgagcaatttgaaatgaaaatcggccccggagtcctgttgctgtaaaagtatttttgcgggcatttctaccattatttgcatctccagctgaaaataaatgaagggtaaacgcaaatcgaaattccctgccagaccatcaacaatggaagtcgggcaaataacaaatggaaaaattacacgaatatcaaatcaaaattatctttacgtagcgggagatgttttaatgcgggacataaagcaaaaatgggcaataaaaatgttttaaatgcgtttgggaaatgggcaaattctcaagatatctcagcggaagactagtccaataaaagctgttcaaatgggtaacttaatgtgctaaatgggatacatttttatttctgtgatatttaatagctaaggcttacttgatcgacgtgctcttgtgaatcgtgaaaaaagaatccgtttgctgtccgaattacttgtggtaaacacacgaaacaaacacacgtttttgtgttttctttttttttttgcttttggcactagatgctaaatgacaggcggcttatgcaacatttatttgatattgtattaaatatttaacgcacgacacgacaaaacacttttgcctcattaatctaacgcacacaagagcagcgggcagaatgaggaaaagctgctaattgaagccggcagcacaacgaaatacacagtgcacacacaaaaagcacacacaatcacaaagggacactaagcctttagtcgttgattgatacggatagcccaaggaatttgaggtttttcccactgcgggtaatgggacttggggtggttttgaaaaatttgtgacgtttttcctgttaacacgagaattttacgcgacttgccaatgcgcgaggcgaaagcgatgagcaaaatgttttccgtcctcacgtgagcacttgcaatgggagactgaaattttgcgcaaaagagcctgtaagtatgcagcagcctttgccgtataacactacagtcagtataacagtttgatgcttacttgagggatgagaaaaatgtatatttttggtgaaagagctctttaatgccacctgataaaaggtaacattaaatttggtttaatgcacaacgacctacggcatcatcagcataaacttggccaactatttaaccacaaaaaataagcagaaaaacagaataaatcttataaacatatgtgttcaaggcagaaaaccatttccgccaaattgcccaagcctagtcgcacaatttatttttatttgaaccccgagaagtttatggtttcttctttcccccgccaaaatgctgattattatgattatttactcagcctatttgtgtgtgggcgtttggttacataattaggccattaagtataagtgcccaagtctctgatttccacatttccacggcccagcatcacaaatcgatcaggctggcaaacaaattccgttcgacaaagagaggcaattttaaatggaaacagaaggctataaggaaaacgtattttcagcagcaacttttctttggcggaaaacgtaattgaatttttattgacattctagcggaagtggaggtgaggacagctgtcacttgagcgacgaagttgcctggaaataaagcgcaactattttgtagaaaatgaccaggacagtaaagtggaaggacgaaaatcgggaacgaagaacgaaagcaaaaccaaaaatctaaagaaatcaaaagaaaaatataaatttcggaaaattaattccgttttttaaggccgctttaaaaggggattgagcaagggattgccaagaataacctaattagggttgacttaaggcaaccgatggaaaattttccgcagattaagctcgaagaaaaagcccaacgaaaatatttaaaaataacaatttaaaattcagcaggagagaaagagaaaatggaaaagggttgatttacatgaaaattgtattgagtactttttaagactttttttttgtagtcatttttgtaaatttgtttacttatactttgtagatattatggctttacaaatggcattcaaacattgtaatccattcttaatggcaaatagataagtttataattacagatataattgcttttctatatggcgatccagtccaagtccgcttaccaattaaagttcgacgtagccatttgtcatgactatctgcatcataatatgccactattatcatttacagccacccgtttttgtccaatcgcttttctcattaccaggagacaccctcgtctctggccggtcattaaattattttatatggcacattaaaagtgagcataaacacacaaactctcactggcccttactttctctactatacgagtgtgtgtgtgtgtgtagagtaagtgaaatgcatttgcagtgggggggtgtggtcataagccaaaggcttatgtggaaaagtaagagaaaggggagcggcgtctgtccgagtggcatttccatctgcggcaggttctatttgctattattatcatagtcggagtgcttgggcggttattattgttaccactgagtctgctcgtcggcttctaagcaattatttaaagcaccgcaaggacgggagaaatgcagggacaactctccctttctctgtccgcggggaaatgaaggcaatgtccagtgttggctgcagagatttcaatttaaaaacgaggccaaactgctgggcgaaaagccaaggggggggggggcttcgcacacgtgtgaccatacttttttatgccagcacagcaggttcttcaagcactgttttaaattacataaataaattctatttttaaactagctgtatgctatatttatgtacaatatttaggtaataaacggagaaaatattttagcataaatttatttataagttgtaacttcaaaatacatacgaaaatagtcacattttaaggggaaacctattccagttttcaaattaattgctttctattgcatcaacggtcggttctgtaaaaaataaacatcttttttagctcttaaaaattaatgcaatttatagttagtataaaaaacttgttttttttttcgctgtgtaccaatcacctttgctgtacagtttcgtgtgaggcttgttgattgcgtgctattgtggcgagagatgctcacatatttatttacaatttaaattcagtcagtaacgccgaccttctgaacaattttcgcacctgtcacccttttgtgccttcttaattgtcgcaatcaattgggccaacaagaggttaaaagcttaatttattacctgtatttcgtatggattttgccagcaggcaacggatctcttttaaaaccattttataatcggttctcagttcgatttttgaaaccgcattttccggtgctgattcagaaatctctggctttatggcatcatcgtaatcgaaaagtgtagactccgtatcgtccataacattataccattccagttttctgcgtatggcttgcattatttgtcgtctgtattggcaatctttaccggataaatcactaggtatttctaaaatgtcatcaatttttttaaaaggtgattgtttatattcctgttcgttagaaatttgatttaaaatttgttgaaattgatccatctttatcataatatccaatagagttgcatttaaattatagtttgcaacaagacattgaaaaacaatggcaaaatttggctcgtcttttgcagtcatagcctcgcattctgaataggtttggttattcttctcactgccataagtaaaacttataaattgcaacacgacaagaactagcaacatcgtctgtcaatgatgaaaatcaaactgatatcaatacgaactagtcgaacttgtggctccatttcttgttaattgattttgtacagttaggcatattaagtgtgtgtgtacgagctgaaacattgtcgatgctctgccaactttcaaaatagagccataaattttatgtggcacttgtgaggttgcaaactttcggaaaacttgcagctcatccgggttttcccgcgtactagagttttgccagcttcacttcctttgtggcctcatttgctgccagcggccaccataaataatccatacaaattaacgcagccgtgcacacttagccgcacctaaaaataagacttaaataaaataaaacccaaaaaccactgagctctcttaacaagagcactaaaatatacaacagtttaatcgacaccaactcgctgggtggtttaaaaaagaaaacgaactgctaaaatatatatatttttcggtataaaaaatagcgcttaagcttttcgcatcctccaaaccatttcagggtaagcaaaatttattgttagcggaagttgtctttaatggcgaacgagcagccacacccacaagcccattgaaccatggatccccaacttcaggcagtttttacccccccaaactccccccagccatttattcagtccgcattaagttgaccttcagagctgcaaataatttcaactcattgagtttaatgtcctgcgccgtatgggcgtggcacagccatttataaggtctctgtgccacttaaatacagtccgtttcgaaactaaagttctcagaaaatgtgttattataataataaattattgaatggcagattatacttcattatatttcacatacttcaatggaactaaattaattcaatatgataaatcctttcaatgaactgtctttaaaaatatttttatccaaccttatagttgcgaaccactctgtatattatgtttatctggccacgtgttttcgcccaataatcgcatgatttatggctaacaatggtcagggcagttcttatccttcttggctcataaatattttgccagtctgaatttgttttctacctttttcgttcatatttttgtttccaattttgctgtcccacagcttgaaaattgtattttaatgtgggaaatgggacacacactaaaatacacaatatttggccatattcaagatgttggaaggacgctaatgcgtttataaagtgttaacatggcgtatgcgtaatatttaatggcagctgtgcagatggctgactttcttatacctcctttagtttatgcatatattttgatttaagcttatgaaaaagtgtgctacgccctattttatggcttcgtgatgggctgtgcttttggattagaaatggggtaaaacaatttacgagatttcatgagcgttttgtccgtctgcgaaaatggtcgtaaatttaattgccgcgattattgctgcgaaattagcgcagatcagagataatcgcgaagcttaagttaacgacaggaatttacgactttggcattgccgtgtcacattaatttcaactactaaagctgaaatctaaaataataatagtattaaattacttaaaatacattgaaataacttctgtgtaatttaaaactttaaaaacttacgaaaacgaccattcatttcaataaatttctgttaatttaaatagacttccgtacatatattttaaagtcctttgacaatgttaaatttacttttgggcctcaaagcgaggaaaattccccaacggcaagggcaataatttatgctaattcgcttgactgccatgcagacgcaaaaaaaaaccaaaatgacaatgacttcctgtggccgagagttttgcacacacacaaataagagagagtatcaagccggcaaaaattaaattgagccgcttgtaatttagccaattgcaccaaagtgaccgactaattgcctggggacgaagtacaggaaatgtatttgcatttcggttaacgcactagaatatgcaattcaaatgtgtgtcgcataaagaagagtggctttccatagtaagccgactcgttaacatgatgaagttaaataaagctcgtagtcaggcataatttatttaaaacaaacagacggctggcgaaaagtaaaagttggacgaggataaactgaggaagcagacacatacatgcgatttctttaacacagtacaggatatacataagtataagtaatgggttaaaaaggtattaagaagatatatatatattaacacactttaatgcaatctattttatgaaaaggttaattcagaatccgctcaaaaaatgttacaaggaccaaggacattgtgaaaaaaaagatctcaaagtgtattttttgatttatgttgtattttactagccgcgtctgttgatgcgtctgttttccatttgccattctcattattatgctcaacacttagttggcaattttttctagcagctcgacatcaccacgcccacgaccttcacacagtggtgaaagcaaacaagatatgggcggtggcacgcccctgctctgcaattttccagagaattgagtagactaagcgttttgtctagtttcagccggcatctatatctgttagccgctttatattgttgttcattttatttatctctttttcagcatttttcttacttttttttattttgggttcatagtcacttaaggattcatgcagcagctgaagccgcaagcaaaaacaggcagcaccttgttcatgtagtcagtcagtcagtcagtcagtgggtggctgtgggtggttgtgggaggttgtgggtggctcagtgtggttgagtgggcctgtcagacgccggcggacatgccctgaattttaaaactgtcgtcgttgcaaaaaaaaaaacagaaaaaatcagccttgagacaaaaagcaaagcctgcggtttccacccatccatcctgagcctatttattcgtactgattttattttaatttcattaaaatgatgtgacagaacttaattggtttccattgtgaacgagatatcggagccaggagaagtcgagcagattaaatcgctttaaattatggtaacaataaactgccaggcagagatagcgacaatctgtgtgcgtgtgcgggcgataaatacaataatttctgtttaaaagttttccctgagataaatgacattcagcaattggttttcatttgacaaaaagtttatggctaataattaatgaatacaactgcattggcgtatttcgattgtacgattgtcaacagaaagagagttaaagtaggagtaaacaaaatgaattttccattagcatatttaatttttcaattatgcggcgtctccacttttgtttttcatttttttttccacacgtaattagcatagactctcgctggcagtgcattataagcagttagcccgtaatctagaatgtggcacactatgtgatttcacccacaaatctgtcccccaccatccaccattttggccaaggactcgccaccactcgacgtgcaacattcaaattgagttgcataacttgcattgaggtgagtagagtcattcaaatgtaaattccatttgcgtttgacactggaaaatgtcaggcacagtcgtcttttgcatcgaggtggagtgagttgaccctgcgaattaggttcgcccagggttcttcctttgtactgccgaataattaacaataatagccactaatcataaatttcagacaggaagctgcaaatctgtctgcgggattatgattatgattatgcaaaacgatttcggaattctgtctgttcaggaatgttgcaaaactgatgaaatattgtaggttcgagtattgagaaaataaacaaaatgcttgaaatttcttgcaaaattataaattacataaaataatgtagtttagcaaatatttaaatgcctaattttacttacatttattttaatgtttagctaaacatatttaatttttaccagctatttaaatgtcaaaacaagattactgtttaaatccttactttgagatatttaaagctgggaaatgggaattttagattaggaagtgtttaagtgattaataattaaaaatattaaaatgctttcaattgtgtgttgcttaacagaaataaaaccaatctaatttcaacggtgtcttaaagtatgcagtacatttagagagaaatctttgcgaccaacgaaccttaaacttgttgcagcataattttagacaccttatacattattttcccctttatgtagatatatctcttcattagaagttctttttaaacaagttgcacaatattttttgcagtacccttttataagccacattgtcccagctccatccgtagttttcgtttccggttccgactggttttgcatcttgcagtgtgctcgtctgagccttctgcctgtctgacttttggccgcagattcagctccatagagatcgttttattcggtacgtgctgtgcatcgcagtgtaatgccattgccatgccatttcgtacataaattaatgcagtcgtgatacaatgcccactgaaactccactcaaatgcacacacacacacacacacacacacaaatatttatacgcgcagatacccaaaaaaaggagaaagccaacacagatactcacagtcacatccgtctcgacaccgaagtgctgcagtgtaatttctcttttggcgttattaaatagaaatttcagttccatgactccgtgtgtgagcgaatgtctctgccaaagtttcctttcattcttttttttttttggcaaatgtatgcactgcagatttttggcttatcttgcgggacttttgtgtgtctttaagttgatggccaacatttgcgaaacttattcaaatgaaaacttcggttgcaaaactcaccaatgattacagtttattcgcacagataatggctaaatgttttggcttcacaaaaggaaactggaagctgcataataatgcttagatagggtccattatgcttattaaagcacacatttaagacagtttattcacattgttgtacacattactgaagaatgccatagatggcattagctaattgttactaatctgtaagggtgagtgacttcattgttaaacgctttaacacatacactctgtgaaggacacaaagcttgattgctttagcaaataacccctaaaatgtaaacccaatctcacaatcctatccattcaaccgtgtaaaatcaattttaattttcctttggcatttctttgcacagaaaaaataaaaaaataaaataattattttggcaagtcacttggcaggttcgtaaaagcccaaaaatgaccataaaattttacgcaagtaacactggaaaaggaggctgactataatggcccaaatgtgttcaatccgtataacagtttgccagaagtggaaaatcggtaagagagaaaaaggttgcaaaagtttgaatgaaaacgatgaaaatactgtttgacccaatattgagctgaactttcggattgaaaattcattaagcaagaactctttggtctcgcctaattaaactgatttattgataaagttaaggcatggaaatattgaatatttaacgacgatataggaaatgaaatatgttgaaaaaagagagaaaaaacctggatttacctgcttcaattggctgacagccttcggaccggctcacaattcttggcaacataattcaattggattgccagaaaacttggcatattttgatagccaatgtgtgggtttagaagcttttttttttcgcttttttccctttttctttttggggatatttttctcgggtaaatgggatcaagttgtcggtgcttttgatttgggttttccgggggataagaaaccggcttatcaacgtgataagccttgtgttgtttgttacaccgaaaaggcttttgaagcgtgtatatttattgttgtttatttattgccttagagagcctcattatgggctttatcaaaaccaattatgtcacagactgacaaatattgcctatttccccaatcgccatgtcaaaatatcaagttgctgtgcaaaatattttaatatcacaacgaattttccaaatgagccagactccaaaaccggtgtccatgaaaacaaatgggaatttgcgggtgccacgtcaaataaatcaagcaaaaataataaaaataatacgaaaattctgcatgccatagaaattcaatattaaatgcaatcagtgtttggcacagaattacataatccattgcgcataattgaaaatttaatttctgccaaccaaaagcttgattttaatgcatgtattgtaatgtggcgggaaattgtgcgaaaatatttatgcgtgtaacataaacctatttctatttatatggaaaaccaatgtgcactagaaatatttcaatgattttgttgtttgttgcactcaaaattataatatatatatttcattgttaagaatttaatgtgcattgcaacattacatgtgcattgcaacgattagatttatgtaagtggactgataatgaatttaagtttctgaccaatgcgatttgttaaatcacataattccatttaaatatataatggtgatgtaaatatttattcccgtatatatatttttgatagctagtaattttataaaattatacgaataagaaacaacagaaatataattacattaactccttaagctcttaggcactaatacaaataaaaacacaagttcaaggagttactctgctgtttctttttttattccccctcttggctacttattacccttggcccaaatgcatttaagctggctttccattgcgctttgattaccaaggctgcagtgttgttgccttgacttttggccaacgtcgccttcgttctgtttttcatttacgtctgtgaattgaatcaagtttgcctcgcttccggtgaacgcgaataatttctctttttgtaatttccttttttttttcaaaagtttccttgccatggatgcagccaagttttttccgccggaaaacacaacatccgctttttataaattctcaattgtgcgcgaaaattcagcacaaaggcaaaagcagcacaaaaatacaaaaaaaaaaaaaaatgaagagagaaatgctagaagtggtcgaggaaaaaatcagaaaaaaaaaggaagtgacaattgcgttctatctcagcacgattgttgctccattttcacggttttctcggatcgctggctacgccattttgcccgcgaggctcgaacaggtgacactttgacagctggcagtcactttaagtggattttcagtgacagctaagcgagtttttttttttttgagtgtaagtcagtggtgaaaagtgcgccatgaattcgaatttgctcgtgagtgagacggaatgtaatatggttaccaaatggcagctcatcttgttattctgcgatttacaaatatttttcttgtgctcttcaaaacaaatttaattttcaattatttgctttaccattccacatttctctttacctcattactacagtgtattttaattaaatcacctgcaaaatatttacactcattttagtggcatacaacaatatgtatggcatgaatgtaattaaatacaaacaagtggatcaagggcaattaaattaaaagagcattttgctaaaaactcctagttagtagaactaaacttttcaagggtcgactgattgaggcaaatttcatttaatgcattaaactgctcataaatagcggccaaaacggcgaccgaatattgaatagaaaaagggggggaacatttcattttagaccctcactggttggccatatggtccggtggcaaacgtttttggatggtaaacgcaaaattatgcaccctgaatatgctctggtattaattaaaagcgacttcattccgtcgctcgactattctgtggtttttctaggtgaaagtggggtcggaaatgtgggtgtagttacactgaccacaacatttatgggcattacgcatgctgcagcatcggaacgcaaacaactggaggaaaaaccacacataacacacagtacaaccggtgtgcttaatatgccctttaaatgtacttgtaatggtagcttacttttgactgacctttcggacagtcacctatcacaacgggccaactgcatccatcaaaatgtgggtggcacttcgattggtgagtgggctgcagacatggtcgaaacgatttgtctgccggccaactcactcgtccggccaaatggcattgcatgccaatgcattcgggccactaggatatcctcagctgactgtgacacgttgacgtccgagcacgcatatccgtttcctgccaatggccgtcataaataacaatccacagaggcagtcggatgggggaaattaagatagacgtaaatcatatatccgtaacattcaaatggcgacatactgactgaagtagttgtttttaatcaggaaatactcacaagaataataaagaaatacttacaagtttaaaagacacttattcatactttgatttgaaatgaaatacgctttctacagatcacattgaagtgacagcctgtcctcttaccttaattagatgagctccaaaaattaatcccagcaaatgtgaggcaactatgttactttgacactttaatagtttcaagcctggaaaagtggaagcttacttggcaggccaccaacttgctgacaacactgccaaaaaaggacgaacgaagtgcggaattaagccataaaagtttttacacctctccaaccgaacaggttggctgcctcgccttctactcttccccatttctgcagttccccaaccttttgcactttgctgtcagcagtttgcacgatttccatacaagcgggttgccaggctcataatgaaacactttatcattacgaaagttgacagggcggggaatgagctacactgctgtaaagcaaccttatggaataattattcaaaacgctgagtttgtgcaaggacggtaataaagaacatttccgaatgaaacataaatgcgttagaaaataaatcaaattctaaaatatttccttactacttaaaaactgcttatatgtacataagtcataacttaatttgtagctcatttatgttaggctctttgatattctttcccaattcctttgtgtggtacaatcaattttggttatttcagtgcatggccacatattttcccaggtccatggaaaatatttgcaaaatatttttttaagccaaacatggggcatacataatattgacattgatagattagctgcctcatgcactcacacacttaatatgaaccaactcaattagtactttcaacgaaaaaatcgaaatcgagacctcaattaaaactactgatggagataaatgactgctaatgtcggctgcagcaacttcctgagaaatggttttaaaatgcatgcgagtctagttttcccgcttttttcttttgcaatattatcgagtatttttctaaagaattttacatcgaccaattgaattagtctacaaataaattacaacgatggagcctttcaattgttccgagccaaaaaagcacgacgtcttgtgtgccgggaaagtttgaaatttaagccaagctgagccggacatcaataacgtgcggaaaagtttgccataaactcttcgatatcctgtcactccagtcagtccagactttccaatcatcctcatccttttctcggtcgcctcattgatatgccaaaagtagacgtggtctgcaaattgggtggaattcagctatttgtgttcgcctgacattgacgatggcccgtctgaggaccttcgacggcagtttagtgggtatactttccacccaaaaatgcataaaattggtcaaagctgtggctaatagttcatcgttaaagacacaaagctagattaaagtgcttatttgggcttaaaagatttaaatcatcacctctactttggattaatttttaaaactcgttatcgttatcgttcctttaagatgaccctacaatttattacatttgattgtctgccgaacgtttataattgattgatacaatgattttcctgtgtgaatttgaattttttttggacgctagacaatctctgccagccaactcagccccgggatgcggccgagtcataaacataaaatacaaacattgaacgagctctggtcccttgtcctgggactttggtcaacagattaaaacgttgggtgaacatcgtcaacccacatcataaatatacacagttggagccgaacatccatttttcgagagcctttaagagtcgccagtcaaagaaccaatcaaaacgtaatcgaagtcatccgcagaacatcaattatttaggctgttcggggcaggcgatttggtagaggaactgcaccaatgtcctggtcggtctgccagtcatcctgccagctgtcaagtagggtatcaatccatatgtgctcaatagtccagtaccataggtatccaaatgggcccaatcgctgcagggcacgagttcgtggagaacagcagctgccaggcaagacgaggcatatccctcgccatcgttcagtaggtcgaagctcaggtgctctgccacacgatccttgtagtagcgccataaggggaatcgccacaagcgatcaccggtcaaggaaccggcacgctggaattgtttccatatatagtgagaattcgaccaaataccagtggctccaccgccaactgccttctttacgcccttgcacatggagcccacatccacgacgagtctgggcttgtatgttatctgaccataaagcatgggatccgagatgaccaccactcctgttcgacttatattacgcaccgccagagatttggaattgagtaaggtcaccacatcgccaggcttgcaggacattccagacggcagattctcgcacagtggtatcacagcagttatattgatgggcaaagatagagcagctgctgcgcgcatggcggccaaaatgcatgccgctccagtgagatctccgcggaattcatccatgcccttgcaaggacgcagattgatgccacctgaattgaaggttatgccttgacccaccagcagaatgggcttatcttccggtgcggtgccgcaataggccacctcaaggagaacgggtggttcgcaactgcctttggcaatcatcaggaaggagttcagatgttgctgttcaatccattccatggtgcgaacctctacggtgatgccgcatgggcatagtgaatccactgcagcctgtgccacaattgtcggtgtcatacaattggctggggcatcacacagtcttctggccaaattctgtgcctctgccttgaagaggccccttgtccaggactcgacatccggtgaaccatgcagctccagtttcggtatagtgctacgatacttcttcgccagattctcctcatatcgccaaatggccagtgcagcaccttcggctgcctgttcggcatagtccatattatccacatgcacttccgagcagccaatactttgtaatgatcgggcaccgattccagcagctatgcgcacattctccataccctcgtccagcatttccagttcattaaaggctatgccttcgagaccaacgcccaccacgcaaatggatctgaactcgctgtccacattgttgaagaccttgccgcgacccaatcgtccagttaatttggtttcgcaaaccaattccgatagcttgccctgcacacgatcgtcaaacttttcgccagcaggcgttaatcgaggtcccttgcccgactccttttcgtagaggcccaagacgattcctttgccgcccttgacggtatcaccagctgcacagccggcggtcacatgacgaacagatccaatttggggcacggcacttacgcggcaccggctcaagctcctcgccaatgcgggtcccttcagcaacagttgtccacgcatagtatatagtattattatgtttaccgcactatatacgcgagctattatctgcacaattttgacgactgttgtgtgtttttacaatttacggcaactctcgaagtgtatgtatgttggtctctcgaactgtctctaataattttgaccagccacgttcaaaagttttgtcaggtgtccaaaaaaaaaaaaaaaaagagaaaatgtttcaaaaatgtttcatgtgcgaacgtaaaatgtatatttaaaaaaggaacgaacgaaatgtgttgtctgctttcgttgctaaaatcggtaagactaaaccaaaccgaacaaattttttgataactgtaatgaaacggaatactagatcagattaaattcaaatgatgtgtcaaataaggaaaaacatatatgtacgtataaactatgtacaaactttgtatctatgtatatgtataggtccagaatctaaagctttacttacagttgcgatcagaagaacatttgaaacttgcagatattttactagtagattaaattatgtataggaaatttataagcgaaatttggctccattggttttgtacatatgctttattctaaagactttcttgtttcaacaaggaagagttattatttttaatgcattttcttatatatataaattatatactattactgcaagggtatataagcttcatgtttttttggaaactaagaacaaagaactaagcttattattaatttggctagatcaaaaacttgtatatttataaggtcggaaatgcttttacctctcttatacttttctgctaatctagtataccccttcaatcttacgggtagtatacatattctttgatttaagtccctaagacattgcatttaatttaaaagtagaaagaaaataatattagtttttttttatgctatttgcagtgttatatttcttcaaagacgaaaccactactgcaaatctggtaagttaccaagaaaaactagattcaaaattctaagatccttttaaagagttgatagagaacctatgaaatattctaactggtaccccgaaacgatatattatttcctctcagtctagttgttagttatattacttaccagcaagtcgaaacagtggaccgaaatgggggaatcgagagttgacccgaattgtgttgtttgccaatggagaactcaagaaacgatccttgcaagtgtcgtttttcctcgtttgctgaccgacacagatcctgtcgatatgattcagtgtccaaagcgcgaataactttcggcactaaagcaatttacataaaatgtttatttgggtataattttgaaatgtgctcggagaattctcgtttttaagtgaacttcgatcggttgagtgtcatgtcggtgatgttgagatttctataatacacaaatagatatttaaaaggtcaataatgcaggagtactgctattaagagttttctgactataattccccattcaatgaaaagctcttgaaataatcatataaggatacaaacattttttaaagcaaaaaatagcacttgtgtatttatgtactcctttcacatttattcaccgtgagttttctccactgaataaaagtgagcaagaaaaagtgattgccgcatatttcccacgtggtggaaaagttttttccaacaataaaatgccaagcggtgcataaagttcatagaaaagttttctcttttgttgattgaaaatgtcgcttattgtcgcaggcaaaacaccagaagaaatcaacaatacaaatgttgttgagaaattaaaactaacaataaaccaataacgaattccaatgctcaattaatgctacaataatttaagtttactgatcaaatcaaaatcactttaaaactttagagctaagtcaacaaaatcgatttattttccattattataatttttgcatcaaacataaaataaaaattttaaatatagattgccatgttcagtccaaaagatgtgtttcaatggaaatacaatttccagaaagatgagatgccttctccaaggatactcctccgccgataatttgcgaccaatagggtattaaagtcacggatgtagaacgatgccaaaagaggccttgcagttctccataaagctgaatcgccctccagttagatatgcaaaaatgctgtatgaccatgtaaaatcgaatatagttgatcaatccgctggccacaaaggtcaatatccagggcaaagcaaataacaggaatatattccgcggcagggttccgtttttcaatgcggaattctgttttttgatccaattgtttttcacttgctctgcagctgttgtcgtagttttaaggattcctttcttttccatcgatacctcacttttgccactttgcaagtgtcgtgagtaccaaactccgatcatagatagtagtgaatacattatggccttaaccagcatccagtgattgtatttatagcccaattgaagcgttagattacgattcacggagggatagaccgtttttagattggcattcgcctcgatgaccggctgaagatttgagcccaagtgcagggatgtcagcagcgcaaagtaaccaatgtctcgtattttgggtatgaacatggttctcgaatttggagttcaaaatgaaaaaattttaagtcgttttttaaattttgtatctaattttgtgtgacctcaatgtgctctgacattcccagtctgattgcttaaaaaacgttatattataaacattttttgatttttattttaaattatacgtaattaaaattacgtaattaaacaattaggtaaataataaaagattttatcgttgtttgttataaattaatttattaaattgaaaggcagcgtgctgaaactacttaactgcatcaacttattttagcgacataaattatttgaaattcccgccagctggtacagtttgagagcaactattagctgtgctaaaacccctgcatttaagtgcttgacaatcttgccttattccaacctattggaaatataaatttcatattaaaacaatcaacggtacgatgtacatatttttttattgtaaaacaatatattgttaagatttcaaaaggaattaattttttatttttagttcaattggttggagtgcttggtaaatagttagcacagatagcaaccttggtgtgagccttcgctaatatttcgacataagatttaaatacagaaaataatatttaattctaacaattataccttatttctgtgtgaaattatgaaaaatgtaaacatttctctgaatacaaatgacatttcgttactgtaggttttgttctgtgtaaataggtttaatattcacggataattcgtttgtagtatattttagtatataattattcgcgtatgatggattttttggccggcaataaaaaagtgtaaattgtagcaaggcaaccgaatcgtttcaaaattttgtccaaaaagtggaaatttacgcgaaatggagcgcgaaatagcgcacagtttagctggcggcgaggaacgaagtagcgatgtggcacctggacaggttaagaccttcgaggaactgcgtctataccgaaatctgttgaacggattgaagcgc

SEQ ID NO: 17759 - DNA, 3876 bp, DROSOPHILA
atgttcatacccaaaatacgagacattggttactttgcgctgctgacatccctgcacttgggctcaaatcttcagccggtcatcgaggcgaatgccaatctaaaaacggtctatccctccgtgaatcgtaatctaacgcttcaattgggctataaatacaatcactggatgctggttaaggccataatgtattcactactatctatgatcggagtttggtactcacgacacttgcaaagtggcaaaagtgaggtatcgatggaaaagaaaggaatccttaaaactacgacaacagctgcagagcaagtgaaaaacaattggatcaaaaaacagaattccgcattgaaaaacggaaccctgccgcggaatatattcctgttatttgctttgccctggatattgacctttgtggccagcggattgatcaactatattcgattttacatggtcatacagcatttttgcatatctaactggagggcgattcagctttatggagaactgcaaggcctcttttggcatcgttctacatccgtgactttaataccctattggtcgcaaattatcggcggaggagtatccttggagaaggcatctcatctttctggaaattctcgcgtatatagtgcggtaaacataataatactatatactatgcgtggacaactgttgctgaagggacccgcattggcgaggagcttgagccggtgccgcgtaagtgccgtgccccaaattggatctgttcgtcatgtgaccgccggctgtgcagctggtgataccgtcaagggcggcaaaggaatcgtcttgggcctctacgaaaaggagtcgggcaagggacctcgattaacgcctgctggcgaaaagtttgacgatcgtgtgcagggcaagctatcggaattggtttgcgaaaccaaattaactggacgattgggtcgcggcaaggtcttcaacaatgtggacagcgagttcagatccatttgcgtggtgggcgttggtctcgaaggcatagcctttaatgaactggaaatgctggacgagggtatggagaatgtgcgcatagctgctggaatcggtgcccgatcattacaaagtattggctgctcggaagtgcatgtggataatatggactatgccgaacaggcagccgaaggtgctgcactggccatttggcgatatgaggagaatctggcgaagaagtatcgtagcactataccgaaactggagctgcatggttcaccggatgtcgagtcctggacaaggggcctcttcaaggcagaggcacagaatttggccagaagactgtgtgatgccccagccaattgtatgacaccgacaattgtggcacaggctgcagtggattcactatgcccatgcggcatcaccgtagaggttcgcaccatggaatggattgaacagcaacatctgaactccttcctgatgattgccaaaggcagttgcgaaccacccgttctccttgaggtggcctattgcggcaccgcaccggaagataagcccattctgctggtgggtcaaggcataaccttcaattcaggtggcatcaatctgcgtccttgcaagggcatggatgaattccgcggagatctcactggagcggcatgcattttggccgccatgcgcgcagcagctgctctatctttgcccatcaatataactgctgtgataccactgtgcgagaatctgccgtctggaatgtcctgcaagcctggcgatgtggtgaccttactcaattccaaatctctggcggtgcgtaatataagtcgaacaggagtggtggtcatctcggatcccatgctttatggtcagataacatacaagcccagactcgtcgtggatgtgggctccatgtgcaagggcgtaaagaaggcagttggcggtggagccactggtatttggtcgaattctcactatatatggaaacaattccagcgtgccggttccttgaccggtgatcgcttgtggcgattccccttatggcgctactacaaggatcgtgtggcagagcacctgagcttcgacctactgaacgatggcgagggatatgcctcgtcttgcctggcagctgctgttctccacgaactcgtgccctgcagcgattgggcccatttggatacctatggtactggactattgagcacatatggattgataccctacttgacagctggcaggatgactggcagaccgaccaggacattggtgcagggtcttgtggtcggtgtttatcagaaggagaacgataatgacccaaagctaacgccagctggcgaaaaggtcaatgatcggctgcatggcaagttgcaggagatgatttgccagagcaaaatcactggccacttgggcaggggcaagatattcaacaacatagatccagagtttcgcagtatggcagtggttggtgtcggcctcgagggcatcggcttcaacgaactggaaatgctcgatgagggcatggagaatgtacgtgtggcggctggaattggagcccgatccttgcaagagattggcgtttcggaagtctttgtagatggcatggactatgccgaacaggcggccgagggcgccgttctggccgtttggcgatattgtgacatgaactccaagaggaagccaccacacatccccaaactggagctgtacgaatctccggactatgaaggttggacccggggtgtcttcaaggcggaggctcagaatttagctcgcaggatgtgtgatacacctgcctgttgcatgacaccaacgctttttgcccaggccacggtagatgcgctgtgcccctgtggcattaccgtcgaaatccgcaccatggagtggattgaacagcagcgtcttcattcgttcctcatgattgccaagggcagctgtgagccaccggttctgatggagatcacctattgcggcaccaatcccgaggacaaacccattttgttcctgggcaagggcattaccttcaactcgggcgccatgaatctgaggaaatgcaggggaatggaggagtacagggcttgcatgtcgggagctgcatcctgtgtggccatgatgcgttgcgttgcggcactggccctgcccatcaatgtctgctgcatcatcccgctgtgcgagaacatgccatcgggaatggcctgtaagccaggcgatgtggtcaccctaatgaatcacaaatcgatggctgtacgaaatctggacaaggccggagtcgtcgtaatggcagatcccttgctctacggacagagcacatacaagcctcgcttggtagtcgatgtggccaccttgggttcaggtgtgaagaaggctttcggcggcggagccaccggtatattctccaattcccattacatctggaagcagttccagtccgcaggagctttgactggcgatcgagtttggcgtttgccattgtggaattattataggaaacaaatcaccgatgaaatgggatatgatttaagcaatgatggtcgaggactggcgaattcctgtttggcggcagcggtactccacgaattggtaccctgtgtggattgggctcatctggacacccggggcactggactgctaaccaagtatggactggtaccctatctcaccgcaaagtacatgacaggcaggccaactcgcactctggcgcagtttctctaccaaatggcctgtcccgccaaccaaaagtgaactagcattgaaaatgcagtcggtgtaatccgatcggatttaaagccgaattgctaagaagtgcgcagcagataatttttttgtgtaaaagagtccaatgtcagaatgttttgttaagatgatgcctgtgtccaaagttgtcaaatttcttgtgagatgtaaaatatatagaggttttaaaaatgc

SEQ ID NO: 17760 - protein, 1229 aa, DROSOPHILA
MFIPKIRDIGYFALLTSLHLGSNLQPVIEANANLKTVYPSVNRNLTLQLGYKYNHWMLVKAIMYSLLSMIGVWYSRHLQSGKSEVSMEKKGILKTTTTAAEQVKNNWIKKQNSALKNGTLPRNIFLLFALPWILTFVASGLINYIRFYMVIQHFCISNWRAIQLYGELQGLFWHRSTSVTLIPYWSQIIGGGVSLEKASHLSGNSRVYSAVNIIILYTMRGQLLLKGPALARSLSRCRVSAVPQIGSVRHVTAGCAAGDTVKGGKGIVLGLYEKESGKGPRLTPAGEKFDDRVQGKLSELVCETKLTGRLGRGKVFNNVDSEFRSICVVGVGLEGIAFNELEMLDEGMENVRIAAGIGARSLQSIGCSEVHVDNMDYAEQAAEGAALAIWRYEENLAKKYRSTIPKLELHGSPDVESWTRGLFKAEAQNLARRLCDAPANCMTPTIVAQAAVDSLCPCGITVEVRTMEWIEQQHLNSFLMIAKGSCEPPVLLEVAYCGTAPEDKPILLVGQGITFNSGGINLRPCKGMDEFRGDLTGAACILAAMRAAAALSLPINITAVIPLCENLPSGMSCKPGDVVTLLNSKSLAVRNISRTGVVVISDPMLYGQITYKPRLVVDVGSMCKGVKKAVGGGATGIWSNSHYIWKQFQRAGSLTGDRLWRFPLWRYYKDRVAEHLSFDLLNDGEGYASSCLAAAVLHELVPCSDWAHLDTYGTGLLSTYGLIPYLTAGRMTGRPTRTLVQGLVVGVYQKENDNDPKLTPAGEKVNDRLHGKLQEMICQSKITGHLGRGKIFNNIDPEFRSMAVVGVGLEGIGFNELEMLDEGMENVRVAAGIGARSLQEIGVSEVFVDGMDYAEQAAEGAVLAVWRYCDMNSKRKPPHIPKLELYESPDYEGWTRGVFKAEAQNLARRMCDTPACCMTPTLFAQATVDALCPCGITVEIRTMEWIEQQRLHSFLMIAKGSCEPPVLMEITYCGTNPEDKPILFLGKGITFNSGAMNLRKCRGMEEYRACMSGAASCVAMMRCVAALALPINVCCIIPLCENMPSGMACKPGDVVTLMNHKSMAVRNLDKAGVVVMADPLLYGQSTYKPRLVVDVATLGSGVKKAFGGGATGIFSNSHYIWKQFQSAGALTGDRVWRLPLWNYYRKQITDEMGYDLSNDGRGLANSCLAAAVLHELVPCVDWAHLDTRGTGLLTKYGLVPYLTAKYMTGRPTRTLAQFLYQMACPANQK

SEQ ID NO: 17761 - DNA, 3015 bp, DROSOPHILA
aatcactttgtacgagtgcctggctgccgccgatcagctggagaagaactgcatcaccgtccgtgtgatcgatccgttcaccgtgaagccattggacgccgagctgatcatcgagcacggcaagcagtgcggaggacgcgtagtcgtcgtggaggatcactaccagtaagtgttctttgtagtctttttatttgcctcctttgctaacttgaaatttacttaatttcttataggcaaggaggcctgggtgaagctgtgctgagtgccctggctggcgagcgcaacttcgttgtcaagcacttgtacgtgcccaccgtgccacgttcgggtcctccgtcggtactcatcgatatgttcggcatctccgcacgtcacgtcgtcaacgccgttaacgagatcctcaaggattaggggaccagtcgtgatctggctacattcatttaccgcctacaggaattcccccagttactacttacttccaatattaccattccctctaagattgttaattgcttcattgatttgaaccttacatcatggaaataaaatatctttaataaaaatagttaagccgaactatataccttatttacatattatattacttatttactatattacttattacatgttaagcatgcctttaaaatggctggacgatttcattgcgtttgcctttggtttgctttagacttgctttggtttgtttttagtttgctgtggttttgctttggtttatctctggatttgctatgcgcttgatgttgatttgacatagatactgaaataaagataagatgagaaaatgaataaaattataaattttttaaatttaagcatactgcatacttttttaatttacaaatttttaatatttttctaaaaaaaatcggagcttaaaactaacaagttggcagtacccttccaattataaagggttatcgataactctgctgtagctatcggtgctgccagctgattatagtgcggcatgattatctaaacatcaatttgtttcagccgatcccgaaaactattcaaaatgaacttaagcacaagagttatgctgaataggttgacacagcagtgtgtctacaagcggattggtaaggagagacgttttatcttgtgccacacattcaggaaacgtattttcagtgaccttctccaccaaaactgcggaacatgtaattgaaaatcaggaggaacagaagaaagaggctccgccaaccacgccgacttcaccggtgaaccggaagacaatcattccggccaattatcggtttgtttacccagaattcctgcccgatccgaaggtggagtggcgcaacctcgtgcgcgagaagctggagcgactggacatgctggatcgccgcaaacagatcgacctgcccgagttctacgttggatctgtgcttgcggtgacaagttcggatccccatgccgctggcaaaaccagtcgatttgtgggtatctgtatcaatagggatcgctgtggactgcgcgcccgtttcattcttcgcaacgtgattgatcaccagggaatggaggtggtctacgagctgtatgatcctaccatcctaaagatcgaggtgttgcggctagagaagcgactggatgacagtcttttctacctgcgggacgctcttccggagtacagtacttttgatgagaacatggaggccgagccgctcgaggagggtgctccggtgccggtgaacgacattaaggtggtgctccgtccgcgtccatggctggagcgctgggaacgacagaatctgcgtggtgtggccaacatcgatgagtatctaaaagacaagcatcgcctgtcggcggccaaggtgcagaaaccatgggagaagtacgacatgatgaaggactaccgcagctcgattcccgaggaggagcagacggagatcttcgccgaggtgcacacggaactgcacgccctggagctgcagcgaaaacgcaacaagcgcaagcgcactttcattaagcccaagcagctggcgtaattgcatttgttgttcattttttagaataaaaatatcgaaaaaatgttgttttatagttttccacgattttactttataaagatggttttatcatcgaaaaaatgactgaggctgcaataatatggtttggataacgctaaattaattagtttattagtcataattgtagtatagtggcttagcaactaaacgcagaataatttacaacgcacattgcattactaatatacgcgatacttgtagaaattgacaaaggatatcgttgcgttccaaccaataattgtgacgaccagaaacagtagaaagatgatgggcagggcgatgagaatgatgcgggtgtttttcagatggggaatgcctgcaggaggaaagctttttaattcgagaacttgatgatgcatttaataacttacaattgtatcccagaaatgtgatgtacacataatagcccatgcccatcaaccaaaaggtgttgcccagaaatcgcgagatgaaccacgtttggctgatcagccagttgtagaagaacagctggatgaagtgcagcagcatcagtggcggaaagaaggcatttagatggacatcgaaggcatagccccactcgatatccggctccaggctatttgtgcgcagataccgattcgtcaccgcccagaagaacgaggctattatgatgcccacgaaaatacagtccacgaataccacatagaatatgaacgagatgctctgccagaaagacagtcccagcacatacgcaaagcccagggaggtgactgttgaaagatacatacattattagacggcctttttttgattagttctaacaggttgtttctatataaggctggagtacaatagtaatcttattggacactgatgaaattcgttaactttaagcttttaactagatataagcagaagagaagttattagtgcccaactgtagatatggtacaagatgacaacagatgcagatgggatctccctcctcccttttgga

SEQ ID NO: 17762 - DNA, 963 bp, DROSOPHILA
taaacatcaatttgtttcagccgatcccgaaaactattcaaaatgaacttaagcacaagagttatgctgaataggttgacacagcagtgtgtctacaagcggattgtgaccttctccaccaaaactgcggaacatgtaattgaaaatcaggaggaacagaagaaagaggctccgccaaccacgccgacttcaccggtgaaccggaagacaatcattccggccaattatcggtttgtttacccagaattcctgcccgatccgaaggtggagtggcgcaacctcgtgcgcgagaagctggagcgactggacatgctggatcgccgcaaacagatcgacctgcccgagttctacgttggatctgtgcttgcggtgacaagttcggatccccatgccgctggcaaaaccagtcgatttgtgggtatctgtatcaatagggatcgctgtggactgcgcgcccgtttcattcttcgcaacgtgattgatcaccagggaatggaggtggtctacgagctgtatgatcctaccatcctaaagatcgaggtgttgcggctagagaagcgactggatgacagtcttttctacctgcgggacgctcttccggagtacagtacttttgatgagaacatggaggccgagccgctcgaggagggtgctccggtgccggtgaacgacattaaggtggtgctccgtccgcgtccatggctggagcgctgggaacgacagaatctgcgtggtgtggccaacatcgatgagtatctaaaagacaagcatcgcctgtcggcggccaaggtgcagaaaccatgggagaagtacgacatgatgaaggactaccgcagctcgattcccgaggaggagcagacggagatcttcgccgaggtgcacacggaactgcacgccctggagctgcagcgaaaacgcaacaagcgcaagcgcactttcattaagcccaagcagctggcgtaa

SEQ ID NO: 17763 - protein, 306 aa, DROSOPHILA
MNLSTRVMLNRLTQQCVYKRIVTFSTKTAEHVIENQEEQKKEAPPTTPTSPVNRKTIIPANYRFVYPEFLPDPKVEWRNLVREKLERLDMLDRRKQIDLPEFYVGSVLAVTSSDPHAAGKTSRFVGICINRDRCGLRARFILRNVIDHQGMEVVYELYDPTILKIEVLRLEKRLDDSLFYLRDALPEYSTFDENMEAEPLEEGAPVPVNDIKVVLRPRPWLERWERQNLRGVANIDEYLKDKHRLSAAKVQKPWEKYDMMKDYRSSIPEEEQTEIFAEVHTELHALELQRKRNKRKRTFIKPKQLA

SEQ ID NO: 17764 - DNA, 4224 bp, DROSOPHILA
gccttcatcaactgaaccttttggcaacagagacaattccttcttcaattcccgaacagattgtatgtttatggcccatagctcgtggagtttcttctcatccgcatcataaaagtcgatcaaggagcatatgttgttcttacggagtaaatttaattggtattcggatagcaatcttcccgtgcatgtttgcaaaatcataggcctgaggtccattttgggcgcctttatttatttatattcttttcaacaacgtatcgatatcgaactatcgtcgatgatagtttgtccacattataaataatcgataacagtgcggctaaatttaaatttcaccaatcaggaaaataaattgaaatgcatttcaaaaattacgaaaatatgtttaatgttttaaatcttatatttttaaccatatgtacttgccaaagaaactacataaaggtaaagaaatttcaaattagagtagttttgtgtactaattaaagagtcgatcatttattaactaaactaagttggcactcgattcacaacatgcatattaatgagtgtttatctattgttttgcagccacaactcagctcttacattagatacggcacgttgtgccaataaaaaaaagtccctaagaggaaatgctcagtacgaaactgactcacgtgtggggatcacaaaaaaactacagtgttccctcgatatcaacaatttaaattggtcatgcaatataaacgaaagtttctgaataacaccagttggtacgctaaggataaaataggaaattgtaataaataaaaagttaataatttattacggaactacttttgctcttttacgataagaggcttcacaataggagagcatacttcatactgcatgtacatatgccttctgagtgagagctcccacacatacataagtgtatcccgtctctttatctgaaatcttgtcgcctctcgttaaaggcaatgaatccatttcaagactcagttgagttacagagatgaacgaagaacctcacgcccacgaaaatttggttgccaaagctcagagatccggcgatgcggatccggaagttgccagcacagctagcgagaagcagcgcagttccggtgcgtcagctattgcagttggtacagaatttccaggcaatcctcaggcttcaagaccccaatcactgggcatgtatctactcgaaccatttattttaatcctgctgtttgcctacaacttttcatgtaagtccagtgaaatgatcttagggcattcgtatcactaaggctatgtgtaatcgcctggattttagcaaccgttctaaagaatgaagtcatctaccaaagctgcaccgcgggtttcggatatccggatagcgtttgccagctgctgggcactaaaaatatcacgaatgaaacaaaggtggggataataactctggaagggaatatagcaattgatttaatatcctgttttccagagaattgaggagcaggtacagccatacgctgcacaggtcacactggcgatgcgattggtggagtgctttattcccgctttttgtgggctctttgctggctcctgggcggaccactatggacgcaagccccttctcatgtgctcttttctaggtgggtgtaaactaccgctggtcagaagatgcccatgtgcttaacctgttatgcaggctacggccttcagtatctcatttcagctgcgattgcctactgtgccatgtacacccaaggtctggtcagtccctggtggtatgtgctatccatcgtaccgctctcttgcttgggaagcagtgtgacctattccgtggctgccgtctgttttattgccgatgtctccggcggaaaagttcgatcttacaggtagttagccaaggaatcgagtggatttactattacttatggacttatgcaccctaggatgattgcctatgaactggccatatatgtgggcctactccttggtagccttggttctggttatgcatacgaggccacggacgcctacattgtgttcagcatatctgcagtttgcattttcacggctctatttctgatggcactcctactaccggagagtttgcccgccagaaataggacactatcaacaccgacgactgacaccagtgtggtttccatgctgaagagtttgtggagcacctgctcgaagcctcgtgagcaccagaatcgcttcatgctcactaccatcatggtagtactcctcctcaccgcctttgtatcgggtaagttccaaaaatcataatttagcatgcaagcgtcgtttaaaatcgaggtgatcatacgggaaagccctgaaaacgtttatgaacctaaatcgttttggcacttcaagatttcataaatcgattgaaattctgaaatgggtttgttattaattgacacgtccttttgtttgtggataagcattgacaaagatcttggtttgatatattcattttggctatcgccagacggcagcaactctgtgttctataagtttatgaggataaagttccattggaccgtaaagcagtttactgagtacgagaccgttggcattcttgtacccgcagtggctggttcaggtggagttctctttatttggtcgctccgcaaggtgagttgtatgtgatagctagctaaattggtgcttgacctatgacccatgacccctttgactgacagtgcaccaattcggcgattctgtggctggcactggtttccctgctgagccactgctccagcagcctgatgaagggcttcgccttggagagctggcagatatacgtggctattgggctgggcgttttcaagtcgcttgtgaaccccatgtgccgcaccatgatcaccaatttgctgccggctgatgagcgcggtaagtacggatggcatgccttatgatcatgttcttaacacacatatttgtggtttcccctttctaggcaaaatctttgccctgcttggtgtcttgcaagcactttcccccctcatatcttccaccttgtacgttgcgatctacacccgtacactgaacactgaaccggggattttcaacgtgtttagcgccttcttatttggcatcggtattattctgctggggtaagtttctatgaacctcgagtgcgataaatttctaatgtgttccataccaaatatttcagcacggtttggcacaaaaagtcaagaaatctggtgtactatgagccggtttttaaatgatttatgggggaatcaaagtttcatggagaatggaagaaagcgccagtcatgtcaagttttggctatcacttacacaggtggactggactggctatggggactccctcgacaaactctttacgcgaaatccactcatccgtatatcaactcgaacctatttacatactcgattgtcgcgtaataacctatacaaatccaagcgtagagtttggggaattgtgctttgccaatatctcgagatctcactctgccttccctggggaaaaatcgtttaattacagaagcaaaatattttctcattaacaaaaatatgggttattattgcagccaagctgtggcgtgtgcgcagtcacttgacaattcttacggaatatctataaaaatgtcaggatgtgcacacttttgtacaccaacgattggtgctaactacggatctgagcgagcgctaattccacttgctaattttaaattagtcgccagattttttacacccttgatcgaaatgggtcttgtggccgcaatctactcgaaacccgaatggaactcaatttacgcacaaatttagtggcccaacggagcagaacgaaatccctggaattctgggtggattcaagccgaccgtatcgcatgaattgtcatcgggccaattaaaatgaatgtaaaaaatgatcaaaatcaaaataccattataattatagcgattttattcttgcataagcttaaatttccattccgcgattttcaatttatttaactgataacaaaaaacagtggacacatacacctgtataaccattacttgtggtacgaaacgtgcacagatacacatttacttcatcagttgttcctctcggtaagtttgcccattggtcagtggaaccactaaccactttttagactcccatggctctggctcgtgctactcatttgcacaattcaaagatgaaatcaaaccaaacatccaaactacgcttctcacgttttccctacccaactttcg

SEQ ID NO: 17765 - DNA, 1560 bp, DROSOPHILA
atgaacgaagaacctcacgcccacgaaaatttggttgccaaagctcagagatccggcgatgcggatccggaagttgccagcacagctagcgagaagcagcgcagttccggtgcgtcagctattgcagttggtacagaatttccaggcaatcctcaggcttcaagaccccaatcactgggcatgtatctactcgaaccatttattttaatcctgctgtttgcctacaacttttcatcaaccgttctaaagaatgaagtcatctaccaaagctgcaccgcgggtttcggatatccggatagcgtttgccagctgctgggcactaaaaatatcacgaatgaaacaaagagaattgaggagcaggtacagccatacgctgcacaggtcacactggcgatgcgattggtggagtgctttattcccgctttttgtgggctctttgctggctcctgggcggaccactatggacgcaagccccttctcatgtgctcttttctaggctacggccttcagtatctcatttcagctgcgattgcctactgtgccatgtacacccaaggtctggtcagtccctggtggtatgtgctatccatcgtaccgctctcttgcttgggaagcagtgtgacctattccgtggctgccgtctgttttattgccgatgtctccggcggaaaagttcgatcttacaggatgattgcctatgaactggccatatatgtgggcctactccttggtagccttggttctggttatgcatacgaggccacggacgcctacattgtgttcagcatatctgcagtttgcattttcacggctctatttctgatggcactcctactaccggagagtttgcccgccagaaataggacactatcaacaccgacgactgacaccagtgtggtttccatgctgaagagtttgtggagcacctgctcgaagcctcgtgagcaccagaatcgcttcatgctcactaccatcatggtagtactcctcctcaccgcctttgtatcggacggcagcaactctgtgttctataagtttatgaggataaagttccattggaccgtaaagcagtttactgagtacgagaccgttggcattcttgtacccgcagtggctggttcaggtggagttctctttatttggtcgctccgcaagtgcaccaattcggcgattctgtggctggcactggtttccctgctgagccactgctccagcagcctgatgaagggcttcgccttggagagctggcagatatacgtggctattgggctgggcgttttcaagtcgcttgtgaaccccatgtgccgcaccatgatcaccaatttgctgccggctgatgagcgcggcaaaatctttgccctgcttggtgtcttgcaagcactttcccccctcatatcttccaccttgtacgttgcgatctacacccgtacactgaacactgaaccggggattttcaacgtgtttagcgccttcttatttggcatcggtattattctgctgggcacggtttggcacaaaaagtcaagaaatctggtgtactatgagccggtttttaaatga

SEQ ID NO: 17766 - protein, 519 aa, DROSOPHILA
MNEEPHAHENLVAKAQRSGDADPEVASTASEKQRSSGASAIAVGTEFPGNPQASRPQSLGMYLLEPFILILLFAYNFSSTVLKNEVIYQSCTAGFGYPDSVCQLLGTKNITNETKRIEEQVQPYAAQVTLAMRLVECFIPAFCGLFAGSWADHYGRKPLLMCSFLGYGLQYLISAAIAYCAMYTQGLVSPWWYVLSIVPLSCLGSSVTYSVAAVCFIADVSGGKVRSYRMIAYELAIYVGLLLGSLGSGYAYEATDAYIVFSISAVCIFTALFLMALLLPESLPARNRTLSTPTTDTSVVSMLKSLWSTCSKPREHQNRFMLTTIMVVLLLTAFVSDGSNSVFYKFMRIKFHWTVKQFTEYETVGILVPAVAGSGGVLFIWSLRKCTNSAILWLALVSLLSHCSSSLMKGFALESWQIYVAIGLGVFKSLVNPMCRTMITNLLPADERGKIFALLGVLQALSPLISSTLYVAIYTRTLNTEPGIFNVFSAFLFGIGIILLGTVWHKKSRNLVYYEPVFK

SEQ ID NO: 17767 - DNA, 3239 bp, DROSOPHILA
cagggaggtgactgttgaaagatacatacattattagacggcctttttttgattagttctaacaggttgtttctatataaggctggagtacaatagtaatcttattggacactgatgaaattcgttaactttaagcttttaactagatataagcagaagagaagttattagtgcccaactgtagatatggtacaagatgacaacagatgcagatgggatctccctcctcccttttggagtgtgaatgcttgggcattagaactcaccacataggcagacgaccaggaggaccagaaaggccggatcgtcgcgggcgaactgtgacttggtctgtttccggtagttgaagttccggtacaccttttggggcgccacaaagaggtagagcatctgccacagggcaaactcgaagtccatttgattgaacttgagcagacgtcgcaggtatttgtagctcttggtggtcgccgagaggcagtccctccggtggttggcgggtggcggtaatggcgaatggagacgcgaggcactcgagtagccggaaaccaccgacggcgtcggcgattgtgtatacttaacgtggctatattgagtcattttgttttgtttaaaacaaatttcttgtgttttcagcagagtggctgcgccctcagcgccaagaaataccgattttccccgtataaagtgctaaaataagccaaagaaaacaagatgatgtggtgtcacgataagaaacagctgattggcgatgggagcgtgagagaatttcgcggctagaaacaatcggcaagtgccattaaaaatataccgtaaaatatattcatttaaatttacagtactttttacattcttagagaaaataaaattgtaagtatacagacatatttcacacgaattttattgcatatgcaagtgtaagatattcagtgatatttaactattccaccacaattcgtgtcacgtaaaaaagaagtccaatcgctcatctccaaacgaactgtcaattccaaatgttatgaaccgggtgccaaaaaatcagttccttgctcgactttgttttgagtaccaaatttaagtttctgctgctagatatatcgaataagtttaatcaaatttccagcacaaggtaagagcgatttccgttggcatttccagtaccaattgcaggcaacagatgcctccattttgcagcatgaatagatgttcgaatccgtggtttctgcgcgccgtgcgccatcacatacgtaatctccacgagatgaggattccatacgcccgtccggtgggcccaaatcagcgcaatttcacgttggagccgctgggaaatcgagaactcatccgtgtccacggggccgaggtggtgccattcctgcagggtcttgcgaccaacgatgtggcccggattcagtcgccggggggtcctgcctcaatgtacgcccattttctcaacaaggcgggcaggctgctgtacgacaccatcttgtaccgcaccaacaacccggaaaccatccttgttgagtgcgatcgggaggcttcctcggacttccgacgccatcttcgcacctaccgcgttcgcaggcgcattgaggtcgacagtgtagacgacgagtataccccttgggttatgtttaacctcaaggacgcttcggaggctgtacccaatccacatccagacttatttgtgtctcccgacccgaggctgcatgtccttggcactcgcatcctggcccccaccgacatggactggtccaagctgtccaaatgttttgctgacttcggtaccgccacagcagcctcctccgacaatagttatcaactgctgcgctacaagcaaggagtgggcgagggctgctcggaactgacaccgggcaaatgttttcccctcgaagcgaatgcggattacctgcatggcgtgagcttccacaagggctgctatgtgggccaggagctaactgcccgcgtccatcattcgggcgtgatccgcaagcgatacatgcccatccggttgacggccccaattgatgtgggttccagccaggacgtaacttctttggctggagcgaaacttggacgcgtctttggctttgcgcacaagcatggtattgcactgctgcgcatcgagaaggttctcaacggccgtcctgagttgatgatcgatggcgagcgctgttatgttgaacgtccagaatggtggccggaggatttgcctggaaagcgtcgcatggctttcgctgagtgacttacgaactgatttgaccaaatattgttatcatactattgttataagtgtagtaaatgtatatagtcctcgtataagttgcacagtctgtgtttttctattggtcttttagaaaatctcagacatggatcccgatgacgacctcgtcctggagaatgaggcagaggaaattgaacggttacagcttcccgaggagcttaaaaagcccattgatcccgaggaagaggatgaacgagtagcacgcatcgaattcaattgttctggctgtgaaatgcacgagatggtccattattttggacggaaaccgccctttgctctaggagtcatatacccagaggacaactacgtgatgcgagatcctttccaaccacctccacctcgttggcagtcaaagccggaatactatatcgcaatggggactaagtgctccatctgctccaagacggtgtgcaaggatcctggctgcagtttctactatacagcctctttttgcttgccttgtggcaaggaagaattaaaaaactggccacctgaggctcaagctcgaataagaaaacaaatgtctgtcagtcaaggcaggcaaacataaattagtctttaaatataaaacagtagtatgtaaaaattatctaaataagcagtgaaagagctattggctagaaaggatacattttaaactttattcaataatggaaactcgcacttattcaagtgcggttgattgtattgtttgtattgtatgctttctaatgcttaaatattattgcaaagtaaaataaaaccaatctgaagtttacaatgttaaatcattcattgccaagaacaattttatttgattattgagacaagtctttacatagttcgtagcgaccaaactgttgtgctttttctgcgtagtttcaaacattgcgcgtcccagttcttttttcaagcgaattagatcgaccctgcacggatttgtctcatgcggaatttgtttctcgaattctgcaattcggtg

SEQ ID NO: 17768 - DNA, 1174 bp, DROSOPHILA
tcaattccaaatgttatgaaccgggtgccaaaaaatcagttccttgctcgactttgttttgagtaccaaatttaagtttctgctgctagatatatcgaataagtttaatcaaatttccagcacaagcatgaatagatgttcgaatccgtggtttctgcgcgccgtgcgccatcacatacgtaatctccacgagatgaggattccatacgcccgtccggtgggcccaaatcagcgcaatttcacgttggagccgctgggaaatcgagaactcatccgtgtccacggggccgaggtggtgccattcctgcagggtcttgcgaccaacgatgtggcccggattcagtcgccggggggtcctgcctcaatgtacgcccattttctcaacaaggcgggcaggctgctgtacgacaccatcttgtaccgcaccaacaacccggaaaccatccttgttgagtgcgatcgggaggcttcctcggacttccgacgccatcttcgcacctaccgcgttcgcaggcgcattgaggtcgacagtgtagacgacgagtataccccttgggttatgtttaacctcaaggacgcttcggaggctgtacccaatccacatccagacttatttgtgtctcccgacccgaggctgcatgtccttggcactcgcatcctggcccccaccgacatggactggtccaagctgtccaaatgttttgctgacttcggtaccgccacagcagcctcctccgacaatagttatcaactgctgcgctacaagcaaggagtgggcgagggctgctcggaactgacaccgggcaaatgttttcccctcgaagcgaatgcggattacctgcatggcgtgagcttccacaagggctgctatgtgggccaggagctaactgcccgcgtccatcattcgggcgtgatccgcaagcgatacatgcccatccggttgacggccccaattgatgtgggttccagccaggacgtaacttctttggctggagcgaaacttggacgcgtctttggctttgcgcacaagcatggtattgcactgctgcgcatcgagaaggttctcaacggccgtcctgagttgatgatcgatggcgagcgctgttatgttgaacgtccagaatggtggccggaggatttgcctggaaagcgtcgcatggctttcgctgagtga

SEQ ID NO: 17769 - protein, 348 aa, DROSOPHILA
MNRCSNPWFLRAVRHHIRNLHEMRIPYARPVGPNQRNFTLEPLGNRELIRVHGAEVVPFLQGLATNDVARIQSPGGPASMYAHFLNKAGRLLYDTILYRTNNPETILVECDREASSDFRRHLRTYRVRRRIEVDSVDDEYTPWVMFNLKDASEAVPNPHPDLFVSPDPRLHVLGTRILAPTDMDWSKLSKCFADFGTATAASSDNSYQLLRYKQGVGEGCSELTPGKCFPLEANADYLHGVSFHKGCYVGQELTARVHHSGVIRKRYMPIRLTAPIDVGSSQDVTSLAGAKLGRVFGFAHKHGIALLRIEKVLNGRPELMIDGERCYVERPEWWPEDLPGKRRMAFAE

SEQ ID NO: 17770 - DNA, 5186 bp, DROSOPHILA
gggcgaacggagcgtggagcgcgaggtggagtaccaggtccgaaagtgtcgcgtgaatctggagcgcatcaagtcgtcgacttctccgaattcccgtccattcccgttaaaaccgaagcccaagagatgcattgtacgtgtagcccgactgccggacgtggagcgcagcgagatttccgtgacaccggccagttccatcatgaattccgacattgacgagagtaggtgccaggtcttctagggaacctacgccacagactactttaaagcattcttcttcatgttatccttacagatagtggcagcgatcaggagtctaatctgacaatctagtcgtctcatactcaaagagcaatcaacgcatccagctgacaaacttctaatcgcacttggagtcattcgaagtacacagagtacatgtccaagataaaccaaatagatgtgcggggctatccttttcctgaatatatatgtataagatccttatctaagactttatgcaaatcaagctcgatttcttaatacaaactcgtgcgcctaaatagaattttctcttgtttttcatatttagctataagttatctagcaaacttgaatccactttattttatataccagataggatttattatgtagaccatttcatatggataatttcatcggcatataattgtatgtgctgtgattttttacaacaacaaatgtttgattaaatttgtaaggaattgttgtatttttttggaatttctagaatattcacaaaatttcaaaaaatgaatttaaaaaatggcggcaataagattttatcgagttgtgttatcgaccattagatatcagcttttcatttaaaactttggtaaaataaatatacaacacttcactctttaaaaacgggaataaaagaacattaaatattttaaaataattatttttatttaaaaacatatatttttagaccacttatcgacagatctatatatcgatacccgggagtcagctgtcggcagaaaaatatttctggaataacaaaaacagacaaaattacccgtatccgaaccgagtcgttattccaacaccaaacatgaactggcacaagggcaacattgcggaggccgtggcggcatcaaaggccaagggcgccgtgtttgtcgtcttcatcgagggtaattagtaaattgccaattttaccacgtcattgcgaaatttcacctgctttttaggccaggacgaaatgacccgaaaactagagcggttcgtggatgacagtcaggtgcgctcccgcctggaaacctccgattttgtcgccatcaaagtccagggaaatagctccgcctacggacagttcatgtcgttatgtgggtaccattctggctagcaatccagatcaatatcaatatctctgatggttctttattgatttccagacaaaatcgtgccaattccctcgctcttctttattggcaaaacgggtacacctctggagatagccactggggttacggccagcgtagatgaactgacggaaaagatcgataaggttctgatcctggcgggaaaacgaaccgagcctgtggcagccagcagctcttcatgtgcgaagacacttgaccccaatgaagtcaggagcttcgccggagcagatggctcaagcagcactggggaatctcaagtagttcaaacaggtagtccaaggtccattttagaagtcgatgtgctttctaactcgcaatagattccacatgggtttgaaatagcctctgattaaacaagatatttacaatgaaattctgaatatttcagcatcagaaaactttagagatcctgaaaccacctcagtttcaaactcaccaactggaggtgtggaggaggccaagacgaatccaccaaattctcctgtagcagccagcttggcatctatacccgctgctgtatcaacctccagtttggaaggaaaatcaggatcagaggcagaggctgcttctcccaccgctttggcggccgaaaagagagcagcagcgagcaaagtggagggttcagctaccacatccggggcagctgctcggaattttgccactaataatcttataccggctgtgccgctaatgacacctgctgtcccagttccaacacaacgaccgctcgaagcccaggacaacaccgaatccgaggaaaggttggccgaagtcaggaacattctggagcaaaagcgaaaggagcgtgtggaggaggagaaacgtatggagaaggagaacgagctgagacgacgcagggacggaagggaggcacagagccaacaggcaagggccaaggagcaggagctcaagaatatgcaggtaaaatactaaaactagatatatagaaaaaattgatggatctacaagtttgtatcaatcctttaggaacagattaagcgtgagcgtcaggaggagctggcggccagggagcgcattcgtgcccaaattgcagccgatcgggcagagcaggcacaacgttttaatacgccggacattagcagcacgaccaattcggtggcggccaccgctgcctccaacgtgatcacaacagacgcctcggtgagttcggtggacgagacgaggctgcagatccgactacccggtggcattcagcgcaccaaatcctttccagccggcgaggtgctggctaccgttcgtgtctacgtgcgaaacgagatgctggcggcgagcgatgtacgcgactttaccctggctaccagttacccacgaagggagttccaaacggaggacgaggtcaagaccctgaacgagctaaatctagtgcccaatgcggtggttctggtgctgaccaaggagcaagtgaatcgtgtggttcaaagcggtggctccctgatgaccatgctgggcaccgtaatttgggctttgctcacaccggcggccaaggctttcgactacataaacaagatgggtcttcgaccgctcacccagaagctgagcgtgttcatggccaacttccggtggccagggcaacgggccggcctggaagtttaccagggcgatgcgtgagtactgcctcttcacttatttttcatattttgataccactctcttgatggttttagtgctgcccgtcgcaacatggatatgttctccctgcgaccgacaccagctccaggctacgaatacgatggtgcttcaacggaacagactggcggatcagcggagcggcccactccacaaaatcaaccgggaccgggaaatactccgccggctcataacaccagccaagcttccgcttcgcagtctcagcaattccaacagcgacccggtggctatcagccgccaaaatatggtgactcgaatattcgaagattgcaggatacgaagaaggatgaaaaggataaggacaaggcaacttataatggaaactccacgcagcagcaatagaataacgcaattcctttacagtaatctgtttgacgacagtctatagctatcgaactatgcaataacctgttatgctaaatttaattatatcaattcaatattccaaaatatcaattcgatgtgttttaatcaaacaaatgtgatcttagtaactagtaagagatacagtatgattggacagcttggtcagttttatgcagctgaaattaaactgaaattcaatagaacaattaggtaatcgtcacagaaatagtatatatgagtttgaaatacaaatatattcacaatgaatgtcttttaaggggggagttcatgcttataagctttaaatagaaacaaaacaaagttaatgtcaacaaaggagagcttacaaactaataagtgtgaaatcaaatacagattggttaacatcgtacgatgtttagaatttagtacaatataatcctatcgaattgtggatggataaccaaacaataaatgtataaattggtagatccttttaagtatatattataaaatatgacatctttttttttataatttactagttttgcagctatataaaaacgagtgttttagttcgtttatgattgttaagctccgaatctccagcacaccaaatcagtggaagtatcaaataaaattggagttaacgatgagtcctcctaaggcgcgcctcaaaatacttcccagcttgggttacacaacgacctgtttacaaggtgaaccacatgaggaattgcagcaacttgtagacgtttacgagcggtaacttccaatggcttttcctttgtagcggtggcaccaggctgggatagtgcacgaggctaccgatgtggcaattagtaatgatagtgccaccaggaacaccaacgggcacagcatcgccctgcttgataccatcgcagtcgatgagctccagggatttgctaaagcaaatgcgaatctccgatagatagctgatgccgtgtttgccatcgtacaggcagtggatggacggattcttccctagtgccttgactatcgcattattgatggccgccaccgtattgttggaatcgggatggatgtccgaggcgtctagaatgcgcgacatgatgtactcctcacgccaagtgagcccctgctcgaagtacttgagttcgttgtccagttcctccaccagcatggcgcatgttccgtgcttctgccactcgtgtttccaaagccactccgtggagtccatgcctttgagatccggccaaaaggtctccagtcgatcctcaatgggattcagtttgcttggatcaaagttggccgagttattgcagaaattcggtcccatttggtgcagtttcgttggccagatgccgtgaatggtccagaactccttcttctggggcagactgcactcctggtcgggattctcctcgcgccaatgatagcaagtggtcaccggccattgttgcgtgaaaatcagcacatcccagttgtgatcctgcacagacatctccctcgacgagtcttgcagagaatcatcatcttcccgaaaggggaaaccatcgaattcactgtcatcgtctggacgtttctgtgtcttctcattcaccgaagtcgattcatccgaatacgatatgtcgctgcaatgggtaatatgaaaccatgagtaattcggttcatttgtccgcctgctttgtttattgttaggcaaaaagtggattactgggtcaaccttgaacttgaatatatatcccggattaccgaaatataaagtttgttggttgg

SEQ ID NO: 17771 - DNA, 2816 bp, DROSOPHILA
tcggcagaaaaatatttctggaataacaaaaacagacaaaattacccgtatccgaaccgagtcgttattccaacaccaaacatgaactggcacaagggcaacattgcggaggccgtggcggcatcaaaggccaagggcgccgtgtttgtcgtcttcatcgagggccaggacgaaatgacccgaaaactagagcggttcgtggatgacagtcaggtgcgctcccgcctggaaacctccgattttgtcgccatcaaagtccagggaaatagctccgcctacggacagttcatgtcgttatacaaaatcgtgccaattccctcgctcttctttattggcaaaacgggtacacctctggagatagccactggggttacggccagcgtagatgaactgacggaaaagatcgataaggttctgatcctggcgggaaaacgaaccgagcctgtggcagccagcagctcttcatgtgcgaagacacttgaccccaatgaagtcaggagcttcgccggagcagatggctcaagcagcactggggaatctcaagtagttcaaacagcatcagaaaactttagagatcctgaaaccacctcagtttcaaactcaccaactggaggtgtggaggaggccaagacgaatccaccaaattctcctgtagcagccagcttggcatctatacccgctgctgtatcaacctccagtttggaaggaaaatcaggatcagaggcagaggctgcttctcccaccgctttggcggccgaaaagagagcagcagcgagcaaagtggagggttcagctaccacatccggggcagctgctcggaattttgccactaataatcttataccggctgtgccgctaatgacacctgctgtcccagttccaacacaacgaccgctcgaagcccaggacaacaccgaatccgaggaaaggttggccgaagtcaggaacattctggagcaaaagcgaaaggagcgtgtggaggaggagaaacgtatggagaaggagaacgagctgagacgacgcagggacggaagggaggcacagagccaacaggcaagggccaaggagcaggagctcaagaatatgcaggaacagattaagcgtgagcgtcaggaggagctggcggccagggagcgcattcgtgcccaaattgcagccgatcgggcagagcaggcacaacgttttaatacgccggacattagcagcacgaccaattcggtggcggccaccgctgcctccaacgtgatcacaacagacgcctcggtgagttcggtggacgagacgaggctgcagatccgactacccggtggcattcagcgcaccaaatcctttccagccggcgaggtgctggctaccgttcgtgtctacgtgcgaaacgagatgctggcggcgagcgatgtacgcgactttaccctggctaccagttacccacgaagggagttccaaacggaggacgaggtcaagaccctgaacgagctaaatctagtgcccaatgcggtggttctggtgctgaccaaggagcaagtgaatcgtgtggttcaaagcggtggctccctgatgaccatgctgggcaccgtaatttgggctttgctcacaccggcggccaaggctttcgactacataaacaagatgggtcttcgaccgctcacccagaagctgagcgtgttcatggccaacttccggtggccagggcaacgggccggcctggaagtttaccagggcgatgctgctgcccgtcgcaacatggatatgttctccctgcgaccgacaccagctccaggctacgaatacgatggtgcttcaacggaacagactggcggatcagcggagcggcccactccacaaaatcaaccgggaccgggaaatactccgccggctcataacaccagccaagcttccgcttcgcagtctcagcaattccaacagcgacccggtggctatcagccgccaaaatatggtgactcgaatattcgaagattgcaggatacgaagaaggatgaaaaggataaggacaaggcaacttataatggaaactccacgcagcagcaatagaataacgcaattcctttacagtaatctgtttgacgacagtctatagctatcgaactatgcaataacctgttatgctaaatttaattatatcaattcaatattccaaaatatcaattcgatgtgttttaatcaaacaaatgtgatcttagtaactagtaagagatacagtatgattggacagcttggtcagttttatgcagctgaaattaaactgaaattcaatagaacaattaggtaatcgtcacagaaatagtatatatgagtttgaaatacaaatatattcacaatgaatgtcttttaaggggggagttcatgcttataagctttaaatagaaacaaaacaaagttaatgtcaacaaaggagagcttacaaactaataagtgtgaaatcaaatacagattggttaacatcgtacgatgtttagaatttagtacaatataatcctatcgaattgtggatggataaccaaacaataaatgtataaattggtagatccttttaagtatatattataaaatatgacatctttttttttataatttactagttttgcagctatataaaaacgagtgttttagttcgtttatgattgttaagctccgaatctccagcacaccaaatcagtggaagtatcaaataaaattggagttaacgatgagtcctcctaaggcgcgcctcaaaatacttcccagcttgggttacacaacgacctgtttacaaggtgaaccacatgaggaattgcagcaacttgtagacgtttacg

SEQ ID NO: 17772 - protein, 656 aa, DROSOPHILA
MNWHKGNIAEAVAASKAKGAVFVVFIEGQDEMTRKLERFVDDSQVRSRLETSDFVAIKVQGNSSAYGQFMSLYKIVPIPSLFFIGKTGTPLEIATGVTASVDELTEKIDKVLILAGKRTEPVAASSSSCAKTLDPNEVRSFAGADGSSSTGESQVVQTASENFRDPETTSVSNSPTGGVEEAKTNPPNSPVAASLASIPAAVSTSSLEGKSGSEAEAASPTALAAEKRAAASKVEGSATTSGAAARNFATNNLIPAVPLMTPAVPVPTQRPLEAQDNTESEERLAEVRNILEQKRKERVEEEKRMEKENELRRRRDGREAQSQQARAKEQELKNMQEQIKRERQEELAARERIRAQIAADRAEQAQRFNTPDISSTTNSVAATAASNVITTDASVSSVDETRLQIRLPGGIQRTKSFPAGEVLATVRVYVRNEMLAASDVRDFTLATSYPRREFQTEDEVKTLNELNLVPNAVVLVLTKEQVNRVVQSGGSLMTMLGTVIWALLTPAAKAFDYINKMGLRPLTQKLSVFMANFRWPGQRAGLEVYQGDAAARRNMDMFSLRPTPAPGYEYDGASTEQTGGSAERPTPQNQPGPGNTPPAHNTSQASASQSQQFQQRPGGYQPPKYGDSNIRRLQDTKKDEKDKDKATYNGNSTQQQ

SEQ ID NO: 17773 - DNA, 20155 bp, DROSOPHILA
agcaagcaagttataaaaaaattatttaagcgtgaaattagatttatattatattttttgtataaaatatcatccacttagaatgtttccttaagtcgccggacgagaaaaaccgcaacgctcctcaaagctggctgtgatatgaatattgttgacaacatgtcactgccactttgaagacagttgaagtttttagttattttgatttgcacgaaactccccaactatgcataaaacatcagagaagagctgcagtattttcggttcttttattagcaatatcacgttgatgatttttggttttgtttttatatttctggggttgggttttcatggcaatagacgtatttcgtatttatatgtttatcgtatgtatttatatatagctctatatgcataggcgcaagaaatcaactaagccgcgtattataagttagtagtgtaattttttgtagattgcatatgtagaccgcagtctggatagtggctactgcaaggattttgcagatgggcaggcggatactctccaatctccaatctgccactccgctcagcaaaaggaatcatcatcacgtatagacatgatcagttttgtggagcgactaatgctacatatgtatagtcgtacgaaggacgcttactagctaccacattcatataaacatagacaaacctttgcggtttctgtgtatagttcgtatctcgtatcaaaatgctgtatcaaaaagttttacaaaatgcgcttttggtttgcgtttgttgttggtgtttcggcttgttttgttgcttggtttgcattcggtttggtgttggcttgtatcttgtatagtcactggctataagtctatgtgagttgcttctattttggttctgttctcattgctttgaattcttctcggctgaacttggctcgcaaacattttggtgtgaaaccgagttctgtgcttgcagtctccaaaatttcgcgaatgaataccaaaataagagggtaaatgataaataaatgtttatcgtacattttatttgattttctgttttttcttttctcttttgcatttctggttgcttaatcaaatgataaaattaattaagtaaaacgttcataaaaatagggtaaaatatgtgtatagatatatagatttatatcgcatagacattgcaaaaaaacgaaagaattcagttaaaatataaagcataacgtataaatttctcgtaattataccgtacttgattcatactgtgagcgtgggtgatgccatcgcaagatcaaaattaaataaaaataaaaatcgtctgcaagaattaaacaataaatcacaaaacttaaactacgcacgtacaaatctagtctaaaaatcgtttatgtttcttggcgaactcttttcttatcatccttcggttccttcatcctttatcagttgtgcaaacatttcgctttcgacttgaggcttacatttaatatttaatgcataatcagttttcttgtttgtttgtttctatcattctttagagataatcatattttacttagcacagtggctcgctatttaaaaaagcacatttaaatatcgtatcatatgcatgtatcgttataatttttttatatcgctttcggtatgtgaaatgtatcaaaaatttgactattaactacagttctctatactttaatgcatttccgttttctcatttaatatagttactatatgtgactgtcagttgttgcgcttcgtatctcattgtctaacagttaacgcgttcataaacataatgatatcatttgctcagctctagctctatcatataatccaaatataccataatcatatggggcttgtgccgtaatgtaaactggctcgcgcttaactaaatcttatgcttcatatacatatatgtataaatctaaatatatctttctttcgccgcttttgtaaccttaaatgtaatgcctttaacgttcttcaatatcttaagatgcttcagtgtgttcagtgcgtgttaatttcaggcgatgggtgccgcaatctggtccgctccttagtcggttagcgtttgggccacaagagccagctgatccatgagcacacggaaagcgggacgctcctcgggtccatgtgaccagcacaacttcatgacctaaggacaaagatgaacaattagaaatttctttagggatctatatggactatgcactcacatcataaatctccttggcacacgactttggtttttctaggataattccgcgctgcacacgctccacaacctcggtattctttaggcgaccgtatggcatcttgccgcaagtgaagatctcccacatcagcacacctaaaacaacaaaataatagatattaattgaagaattaattgagttagtgcttccgttgcgcgggacaagtactcaccgtatgcccacacatcgctcttagaggagaagcgcgtgtagttgagcacttcgggcggggcccacttgatggggaacttggttccgccagagctggtatactgatcgtcgagaacgtatcgggccaatccaaagtcggccactttaacgacattctcggaacccacgagacagttgcgggcagccagatcccggtgaatgtagttatggcgctccaggtaggtcattcccttgctaacctgtatgcacatgtcaaggagtagacccatattaccaatcagggtcttctcatgccgtcgcaagtaattcaacaaggatccgtgcttcatgtactcggtcacaatgtagatgggccggtgcttggagcagacgccatatagctgcacaagatttggatgctgcagcttggtcatcaccttggcctcctcaatgaaatcgtcctcggacatggttccttccttcatcatcttgaccgctgtgtcgatagacccacgccacttgccgcgccgcacaacaccaaactgtcccgatccaagctcctccatcagcatcagttccatcggatggatctcccatttgtcgtgggacaatcccgccgtcggtggaactgggcgatcgcagggcgaggatttgagtcggcaagccaaacccccagagttgtggcgatggtagttaatcagatccggaattgtttcacagcagtgcttctcactcaaataatactcgcagcgagcattttgcttgatgtggtagtgcttcacatgcgactgtggactgtgaataaaattacattaatattcatattaattttgttagctttgcttaaacttacactttggtatgcagcgatagtgtgtagagacccttggtcgatgacttcctgaccacaaagcagccctccttatcaccttgcttcagcagcgattcggctctctgtcgtgacatgtcgcccacataccatctagaaaagtaagcaggtggacaatcattagtaatctcatacgattaattatatgacaaatcagttttactcactcatagcgctccaggcccagaagagccttcggcttgacatagttgctgggtatatagccgacattccccaaggcatctttgaccttccaccagtgctcttgtgagtcatctatcacttcgtattcggcattctgttaattcatttagtagtattagttttgcgtttacagagataataagtttgcgtaagtcttaccttttccagcgataaatcgccgccttcgatggccttgaatggatagagagccaccaccagcttgacaaagtgggagttgtcctgtcgcagaaacacaaattaataactattgctaattaatgttcttatttttttttttttgctaccttggctttggaatttggtgttccgggagtgggtataccgccaggcatattggcatccaatagagttccgttgccgttcaatagagttggggactgcttgaaagttgtcagcgaggactgttcgaattgaaagttggttagatgcggctttaattatttatttataatttaatgtatgcgcgaaactaacctgaggctgtagcgatgtgggcgtgcaactgccgccacctcctcctccgccgcctaggccaaggctgcctccgcctcccaatccgccgcccactcctccgccgagactccccgagctgttgtgctgcaagctaaactgactgttggtcgtggagctgttgggactgatgctgcgcgttgaattctgggctggagaactgccgttgcctgcaaaatgtaaaaagaaaacaaaactgattagatatcttgtgcaagttcgtagcttaagtctttcgtttgctcaagttcgttgcttaagtctttcgtttgggccacatagatggcccatatatatatttatttatatttgaaacaaaatcacggccaaactatgcagtttatctgaaacataacacgagtattttgcatttgtgtgccatgtactacactcgaatccaaatttaaacattttcatgccccagggctgtccaattaattagccatcgacaaatatcgcaaaatcgccttatgctgtctggctgttttttttttttttggttggtggcttgcgattcttgtcaaggtgataattaattagacgctggccgagcgctgacactgaacattgacaagattttcaacggttcaaggcgcccgcttggtcgcccacaattcgcagataaatcaaagacatcgggcattggaaagcttttttttatgatgagctgcacggactttgctcggcttaatatacgatttcagtgtttgccaactggcgcttttcgagtgcccgtcaataataataacgttagctcgaagtgaactcaaagtgtaaccccaattaaagcgaaaataaataaagataaataaatgaaacttaaatgccagtcgagagcagtcgagttttcggcatttgagtgggcgtctcttatgcaatcgccctcagcaaatgagtcaacttttcggctcatgatacacattttgttgtctgccttaatttttttcttggattttcagtgcgctgccgccactcggaatccactttgcatcggatgagcaaatggagaagtgcttcagctaggcgcctgctcgagaatcgcgagcgccgagcggctaaaaacaaaagtgaaggttaatcgcgaagcgaaagtgactgccagcgggcttagcgatttcccaacccgcaatctacacgtattgctataaattgatacaaagtatggttgaagaaaaattgccctgcagtttgcaaccggctgcagccagtgactttcaattgataagccaattttctcaatatcacacagaagcacaaacaaagcagcggtgcgcgcatttttcatgtgaaaacttgttgcgtccgtaccgcccccccccccccttttagtttccacccgttctcacaaaacaagccaaacaacagcgttacgaggaaaacgtgccggcaaaagatgacaaaagcctcggaggcaccactccaaactacgtagtacgtacacaatactcgtactcgtgcccctgcattgatgcaagattgaaaccgaaaatagaaagttttctttctttcccagccaaatgcacacaatcgcacacttgccggttgttaaagcttttgtttggccattttccatgcaaatgaaaagcgctccaagcattttctctgcttatatatacttttaataagaaaattgctatgtttgatttcgaacttcttgcgaaaggctgaagtattttgtgctttgcatggttgggaaaattgattgatttctatattatttatatttaaaaacaaaattttcatattatttttcgcaagagtaggaagaaatgctcaaattgttaaccactttttgaatgacagagtattaaaattcataagtccacaactggattttcccgttgcccagccacttgggtatttaaatcattttcaaaacacttgaaaattgccaaacggaagtacatattttatgcatgcatataggcagcaggtcgtttataaattttctataagtggagagcggagatactcgagctaagcatacattttcgacttgctgagtgccacatcaacgggtgcgttgcatttccaagcccacttgcaacatttgtcattaccgttgtacaggtatttatagctaattgtgtaattgtgctttgtctttgccccgcttttaccgcccccgcccccccaacacctccttttaacccgcctctgccgacaacatttgttatgcaaattgctattcttgttattgctactaatgcaggtagtgttgttgcacctggttgttgctcagcctcgaaccgtgtgtttgtagaaatcaaaggctgcaagactttcaaacacgtgtttgctgctttgttctctattctctattagttattccaagcaggtgaaactaatcaaaatgcttgtgcgatgactcaaaaggcagttagcagcgcaagaaaacgcccacaaaagttacaaacaagatcagggtctacaataaatttaaggagggtactgaaaaaaaaaattgaaatgaacaaaattccataatctgtgcaaatatatatgtttagttgtaatatagaaaaaacatttttctataaatttaataactttgagaaaactaaaaaaaaatactgtatgaacttcttgcttcatattaaccactaagacgaactaactaactatcttagtactcgctaacaagtaccacaatatgcataagatgatcgatgatcgcagcttacccagcttgagtgccgataatagcatcatagttcagcttcaggaaaaatctgcggtgaagacttcggtggctccactcggtaaaaattccactgtttccacctcggcgatatgttgcagtaattgtgtcaattcactttcacataaatcgcttgttcggttttttatgtttcttcttttgattcgatttgcaattctttgaactacagtttcaggttgttggcaaactggttttgtcagttgcttcctttttgcaatctgcagttgttatttgttattatagtagttgatgttgctgctttgctgtttttctgttttgctgttgacctttaagcgtttcccattcagcgatgctgagcggcttttaccgttaaggtggcggccctcgaataaaatttaaaaaaaaaactcagagcttcctgtgctcaagattttattcctagtgatctcgacttgcgctacacatttataattatttatttttgcaatatctgaagtctgctttcacacgatggccaaaggcgtcgccatcttgaaaacattttccataggctgtaactatttttccatttgttgtcatttgtgatgtttataaactttgttatttcattttattttcaacgcaaatcaaatcacaacaagtagttggaatatatttattatctctgagaaatttctttctgctttataaaagaaatcaatttttaatgcgcgacgcgaactgtttcagttaatgtttaaaagccaactgactgaaatggcaactgaattttttttagccagacagcagcaagttggctcggagaaaaacaacaacaacaaagacaacagaaacaacttccaacacacggaggccataaacataaagtaaaacttaattgtagcagtggagagcggagagtggagagaatggagagcaaagcagcaggctccacaaagcagaagccgccaagcgaaacgacgacaacttgagcaacataaacaaacactgcgaattactgcgtgtaacttagattaatctatacaatattagtaatttgtttattttaaaacatctgagctttgaaggacttagctaagctaaaatgaagtagtctgtcaatgaggcagattactacatttctattataagtaataaatatactaaaaaaaatctttaaatttctagagtttcatgatctagaaacatatgacaaaatgtaagatacttttttaaaacatcatgtaaattatgtgttttttttctgtgtaactagggaaacacatgcgtatatgtaaatacatatatcaccgatcaaggtgcagagttgagatccagctcttcagattttaggcttgtgaagctgcaactatgattttaaaattttccattacatttcgttgcatttaccaagcgatgcgccttcaactgtaaaatgaattttctttgaatgctaacggtaaagttaccattatgctcatacgccggaaaaaaaacaacaacaaaagcgattacaacaattacatcaatgtaacgaaacaaaacttttgaactttgcctgtacgccaaagttttcggagaacaaaaagcacgaaaaactcacttgtataatagcaaagtgtgtggaaaaacgaaaaaagccgcaaaagacaagacgaaataaaaaggcagtttcttttgttacttcttcttcttctgctttgtgaagatgaagcaacaggcgggaaattcagcgggcgaaagcgagacaggtgatgtctgaacacctgcacaggtgtttgcagttgtgtgtgtgagtgttttaccggtagctaatgaatatgaatcggttggcagtagcaacacaagttgctaatgtgccagcaacatgttgctaacataatattgcataaattaattaattaaaatattttttattaactaatttagcatttttttaaagtatttataacttgtttgacaacaatattatagaaatattttttcacatagccaattatttcattacacttaataataaatttgcttaaggtagaattgcagaattaaactacagaattacagcaatttaaattttgagcaacaatataaggctagtaaatctagcattcaaaacataatttagtttgcccccattttatggcgctgctttagtctgcctgaaagtaggcaacattgttgtatttgatgtttatcaattgtggcaacaaagtttcgtggtaaacagaaaaaaaattatagaaggcaacaaagaaaaaaaagaagaaagccagttgccacatgcttaagattagttattcaaagaccacttaacgccttcaacacacgagctgtaaatatgcagaaaaacacatgcaagacagaatgcctagaatcttagcactttgaaaaattaaccattttcttgttcaaagtaactggaaaatttcaatcatcttgcagccatgaaaacaaacaaaacaccacatgaaaaaattaaggttaaatgtttacatccgaggctcataaaaaagcgtgtgaaaaattgttaactaattggcaagttgcatgcggcaaagaaaacaaataattacacgcaaattgtttgaaaaattgtgcagtcagcgacaccagcgacaacaaacaataacaataacaacaacaacaattcagtaataagaatcaaacaggaaacggcaaaaagacaaacaacaaattgtaatcgtggccgcgtctccatttttgttttgttatttgttatgcaaatgtgggttaataacattttaacgcatgcgccatgaatgcaaagctgtgcggcaagcaagatactccgtggaattctaatcattttgcggctatttctattcagctgtcagaaacatagtttgtcaagttgattgaaatgtttctcgcgagagtatctcatggattgctgttgggtgttcctttcaccaataactttacacgacttgattaatcgccactaccgtaaattgtttagccaatttatggccagagaatgcatcgaattatgcattcgatttggttttacactatggcattgcattcaattaatgccagacggaagtggcatttgagtgggcggtaaataagtttgcaacaaacaatcagtcaatttctttaggaagatagttacagaatctgacagcgaagctactggaattaaatacttcaatacgcgatattgcatgacctttatgtaacttgtagattttattacgaaattaatctataattagcagttgctggaattctatagaaagctcattaaatactatacttatgatgataatttttgtgttttaactgcagcaataggatgtggtattttatttaagatacattaaaaatgagtatacattttcaaaacttttatttatgtttcttaactatcggatcgtgtttggattcacattatgcaacttttttatattaaataaatcccatgtccgaattcccctgaaaaactatatccctgggccttaaatcacgtgaaaagcgcaaacaaatcttttgggattagagactcgccccaaagcgattgccactcccccccgtggggttttatgtccccaattaacacaatataaaacaaactccgaacaaaggaagaaatagtcggggacaaagcgaaatcaatcgaaccaatttgcatatgaaaaatgacgtcaaaaatgaagcgggcgttgctgcttgatttgtttttgaatgtgaaatattttatttttgattttggctttctggttaatttctgcccgcagcttgcagcggcgaacactatggtttttgttttatttttatgcatttttaatgaaaccatttaggtgaccagaggcaacagatggaaattgtatttatgacaacgagaaatccctacgtatgtatatatgccttaaaattcaaaatcataaagttgataagcaacttttgagctgcgctctgaccttgatgttttatggtttgtttttttttcgggtttttttttattatcgttccaacctgaaagacatttttccattttcagacaatcttgtcagacttgtcaataacttaatgtttcgcatctcgatgcaaattgaatttacaataaataaaagtggatgccaagcggatggtaagatcttggcttctttggcatggcaacagaactgtgtaccaaagccaagaatggtgatcgcggatgggtgagttgcccaggtgcagaattgcacgtatgaagcttcgtgcccagaagcaaaatgaagccccatggtctgaagagtctcaacgattgctctttgtcgggccaaagacaatttacaataatatttaaatacgctttttgcaactgctttgagtcgccaactggtttggcgactgcccaagttaacttaacttaacttaacccgacttggattgagttaagtttagctgagctcagtcgagttgagtcgaacgtgccattgccggttcgaaagatttgcgtttctggcgtttcagtttctgttttcggtttcgtttcagacaaatttaaacgaattcaaatcccgcgaaggctatttgtggttaaattgaaaatggtatcggaattcacatgccactgggctataattgcttttcctctcatcgataaggtgcacaaattctagttaaacacgagtaatataaatttggagtatagtttttgacaggtgtgttgtgccacctcaataattagcatctgcgtcaagtttgcggtgatttcgcattgcgacacgaacttggttctgtgacgtcatggctgtcacacgttttttacttggcaaaataatgtgagttaattatcacaaagttagcgctacactgcgacaatattctgcaataaaaagaccacctgatagaatacgaattctatgcattatccacaataatacaaccagaaaacgcagcttgacatgcacatgaaatccgtacataaagcaacaactgcaaaataaattgaatgtttctggtcaattgattcggtcaactttaaagcaccgacattcaacaagtggctgccaatggcttttgcttttggctcaaattgcaaatgcaaattgcaaatttttgtggtcattgttaagtaaagtaaaggccataaatagacacagacacaaacagccagggcagcaacaatgcaataattttattgtcaactttggcatgccaatcagtccgaaagaaaagaaaacaaagcgaaatgagcacacagtaaaaccgaaagtctagctacagaaaaaggcacgcacacacacacacacaaaacgctccaagtggggcgtgctataaaaaatggatgaaaaaaggagggtcaggtgaagggggggggggggtggttggtgtgcctagagcaggcatgatggagcagctttcaatcttcgtcgtatctcatatgaaattactatgcaaaaaccgactattcgattggcattgatgcatctgcctggagagaatcgtagaatctaccatttaacccaccccatcgtggcactttcggttttattgcgactggatggatagctggatagctgggatctgctcttcaggtttttcttctgggcttggtcgacttggtcggactgctaattgatttcaattatgcaattgccatgtctactcctttgtttcgctgcctttctttatcgtgtgcccggcatcgtctcgccctgctgctgtcatatgttctgatgcatgcacctcctccgccggctgcactgctgacgatcatctaataaccgcctgccatccgagccatggccatataatcatgataattgtcagggagcggagatccaagagcggccagcaccgatcgcatccacagactgtcgctaaatgctggcttggctcaagcactacaaaaaaatgactggctctaaaactatggttgctcatataatgaaaacatattcaattcatagtaactatttacttaatatcattaagtatttcaacaacttgcagtttccagtttaaagttaaagttagctgaactaacgacaaagtatttcgctcagtgcaagattcgactgactgctgcattggaaggcaatcatcgccagcgacgcctctgcgggataacttggcctcatctgccatggatgttgagctttcgctttgcatgctatgcggcaatacatatcagaattggcttatggatcccgatacccaactgcagatggattcgtgtttacaattggcatggcaaagcctctagagatgtttacgctgcaatatatttacgtaattgatgcactttttgctgggattgcctgcataagattaaaatcatttgctttcgttgcgaaaacttccggtttatataaacaaacaacgaaccataaagtggttcttatcagaaaagggatatatatatttatttagatattgaaacgtttgtttgtacagcacttggttgtacagaaaatcagggaactttctacggttcttacactcatgtctagattgcactgcagatacatttaacaaatatttaaacacaagtacgtctatttaggcatgacaagaaattcacttgcagatcgtatttaaaccaactctcttaatttcaagccggttatattcattaattttactttacaatcaaagcgacacaacctgtatatttgttgtctaagttatgtgttcacacccaaaataaatggtattagtactataaatttctatgatgtttgctagatttaagagtatataatttacttatttagcactagtaaaccccactgaacgacttgatatttaccttctttggttttggaactggtcaggctgtgaccaatgtggttccagaagttgagtcggcagccgaacaccttcatttccttgacccgctccttcatgttgccaatgacgctcgtttcggccaaactcacgcagggaatcatttgggaacggctgagatggctaaccaaaaacgctggcgttgcacacgcgttttttaactcgatttattttttttttccactattttaattgaaattttactgctgacagggggagaaatagatttgtttgagcattgacgcattgtgggtcattaaagttgagttgggcaagcggtttttttttgtttttttggccattcgaagcgatttgtgcttatttttgcttttgctttgcagcagctatttgtaattgcgatttcttaaagtcacacatgaatacattaggttcagcagcaacttaacgagcttctgctcaagtacgacgcgtttgcggaagcaaactacaatactacttaaagtccatcaaattcatggatgctttaattgccaaaaaggcgaaataccaaaaaaaaaatgcctgaccattgaaacaatcaatcaaaacaacaaaatacgccacagaggaagccgacgaaatttcaattcctgttttggcaattgagtataaatattggtggcatgcttttaactacacacgtacatatgtatgcacacatgaaacccccataaatcaaacacattctgcatttgatttatgctttgtttgcagaacatcaaacgtgtctcgtttttatggcgaattactcgagaatttccttaaaaatgcagatgagcaatgctgctaaagaatcggggttagcctgatgcaaatgctaatgatgctgcagccaaagtcggttgaggttgcccccatcattatcgacaatcatcatcagcttcattgattttcgcattgtaattgttcgagtgaatcaatcgtcgcagcagcagcagcaccgaagattaataacaatttccatgcggtagaagctaatgacgtatacaaacttaaaaaccaaaattgatttatgaggctttggagtaagtagaacaattttcatttacctacagattaggcaagtggaagccttgaaccaaacaaaacgcacccagtcaagtgaaaaaacgccatcaatagcaatctgagacaacaatctatagccgtgggcagaggagacctaggagcagttcattgagctccactgtaacgcatacactcgcttcggtgtctcttctttatactattatttttttttttaattttagtagcaactgttggcaacataattaacatcaatttcaagtcgtttctacccagttggttccttaattcagtggaacaagccaacgaaatctaatgaactttcaaaatgattaacgatgctcggcgtgcggtttacgcataaatgggcgaggtgcggtatcaaaattaaggtctatttacagattgattggtagaagcttggtaaacagttaaaccgatatcgaaatgatcaggtgtggatggaattaaattggaaatgtgtgctctaaattatgtagaagtacataaaggttagcaaaacgaaggggtgtagttgtaaaacatgatttaaattgtataagaaataaatcaaacttgtttgttagttggttaagtgcaaaatattacccttataaatgcatactttatgccattaagttaaactccacgcttaagttcaaataccaagggcaaagaatagtttatttgagaaaattcaaagttaaaagcctgatgaaaagtcgtgggaaatccgaaaacaatagaagtatttatacttgattgaatcacagtttttaagccacggctctttgttgttgatttgccagttattagtactacagattgcagcttgaaactcgtgtcgaattggaaaagtgaaattttcacgccttacacaattggcattaaaatttcgactttaacgacatgtgagtgttgacacaaaaacgaaaaaaaaaaacagttcaacttttacttgtcgtaaactacacaaaaaaaagcagacaaatgaataaatgaatatgtaaagcggtgatatattgaccttgcctgaccctgcaaaaatcccgaaaagagttaagatgctgcccgcgggcgaaaggaaagcgctgccaaagtaaaaaatcgaatacaaaatataaccgtttggggcgtggcaatgccaaaagaaagcaaccgctttgacctgattccgaaaggtaaatgttaaagccgaaaaacatccagcaacttgaggagcgtgaacaaagcaaatccgccaaataatttaaagcggtcaagaagcggcgacggaaaaaagggagtgaaagagtctatagctttcgcttgtcatgttttttgtacatatttattccctcctctgttgtggtccctacttcgtcttctctccctcccgatttgcgctttgggttttgggttttttttttggctttacggagtcggtgctaaaaagctccacaaatgaaatggcacgtagctgaccttgacccgttgcttttggggctcccataaaatgcaatctttatgaaccaggcaggcaagcagtcgcaacaggcaaaagcagcaaattgcaattgaatctttgggccaatttacttttggcaaattgctaacggtaccgcaaaggaaaataagcaaaaaaaaacctaagtgcaggctttcgcaattcgcgaaaaaagagtttttttaaccagttccaaagagagctgcctaaggaaaaaggtagagaaaaagagatggggcgaaaaacttgtttccgatttttatttgcaaccttcgaagaggcatccgaaaactaccttttcgtatctgtgtgcgcctgactatttctgtgtgtgtgtactgccgcataaccgttaggcggaggatccttcgattttaaacctggtttgcattataaattgagccaagcagccacacaagtggtttggcctgtttgcgagtggaaaacatacatttttcctaccgataattaacatggacaatgaataactctcttaggtacctgccacacataagcacataccgctgcacagctgcggtcaacaaaatagatcaaggaggtaaaaaaataacgaattataaaagatctcatataggttattttaataagataggctctactgtttgtattctctatagtttcaactatttagtactaataaaataaaactattttatttgcttcacatctagtttacactattattttgaatgcaaccgtatgacggtacttcatatggtcaggaggctttttactgtttgctcatttgttaagaacatttcgcctcgtttgttttatttacgtttatggagagtttagagatgccaatcgcatttaccaggaattatccacacactcaagaggaagttaaaagtaaacctcccgccttgtttaatcggcgctgccatcaaaatatttgtaatccaaacatttatgactcggtagttacattttggagttacaaatttaatgctccagcatgtatgtatgtatgtatgagattttatatctttcactcactccacccgttattttcccccactcatttcaggccctttgttcggctttttactcagtttttaatgacaatttcaagctaccttttaatggcattttggtttgttatttttattattttttatggaccctctttccatgaaaagaacaccatggaagcggagatgaggagaaaatattttctataaacaaaagcttcacgaaagctgagaaaacacgagtagacttgaattgatttctattgaaattcgaaacggcacttttagtgctgcctttgtaattttttaatggccctgtctggatcaacagaatgcaatgcgataagggccaaactgataagccaatcgaaagttgagagaaatgtgtaaggttgagaaatgcatatgtacataggaaatgggattactgggcagcattgcgaggaaaacattgactagaaattccacttgagatggtatcattacagaaagtcagcatttcaagattctagagcatgctatgagtaagcggtttggagttttaacatttcaatagtgccaattacaggatcaaaacaaaaggcatgcaaatgtagcagctgatgatatacccataagactcgatgaagattgatacttccttttcgaccactcccaggcaatacatcttttattgtagactgaggtaccttctggcactcggttttaagtcggtagtgttattccatggctttccacggattgcttttgagctgggttacgtgataagcaggcttaagtatttaagcatttgcctgaacgtgctggcctcacaagagacaacaaagcaacgaaaaataaacatgaaacaaacgacgaacggctaacaaattctcgttaaagcaaagtgacctaaactcaaaactcaagactcaatcgaaaggcaaacgaggaaagaaacgaaaagagagctgtttgaagatcctgtttgggcaatatacaaatatccacaagaataatattgaattacacaacagtggaatatttcgggatgggctatttgggctacctgcttatgacaattctcaggttttaacagccgtaaacgactttaaaattgaagttcgttaggatcgaaggcgcccctcactttgctaattggtttggttggaaagagagaaacaatataaagggagacaggtagaaaaccgtttaaaaattaacaaagaaaatgataagaagttagttacttgtgactaaaaataaagaactattttagtcgttgcgaaatatttattttcgtaacttgcagataaaatgaacaagctaaaaggttataaaagttacccgtcgaatgaaatgtgatagatcaaaacctacacgtgcctaaatcaagaattcacatccactgggtgaagatactaactaaaagaacacaatagaagaccataaacctaaaatgaacctttgcgaagttctttctcatgtaagttttttgtattaagtgtgtttttttcgacaagttaattaagcaaatggacagaagaaataatgaatttctgagagggggtggcaggtgacaggggggactgttagaaaatgcgcaaaagataagcacgaaagcaaaaagcagaaaaactgctgtggcacgccaaaaagaaacaagttaaacaactttactcggctccccagagttgccagattggtccactaaatagggtttgaacgcagatgtttgtacttgtgtgtgtgccgtgacataagcaacttttactgttagaaatgagttttggagatgagtgagatctccagcggtaataagtcaagaaaggcacaatttcttcacttcgcctggctgcaaacacttttgcctctcagttatttctttatttttcaattgtagatatttacatttggatttatttttggggctgaaaacactttttggccttttgagcaaacttcacttctgcctgagcatttacattttgtcgccgccgcacgttttggccgtaaacaaattttctaatttattgcacttttgcggcttaacgctgccagtgagtgatctagcaatttggttatcgtggtattcagttggtactaaactcaaactactgtgtttttcaatggcacgcgcgacaatcgaaacaacagctaaattcgaaaccgcaaccgcttttcgatttacgctttccgctctgcgttgtgcactcgacgacggttaaaagaaactcaatcggatttggatcgcgcaggcgtcgagcgcttctcagcagctcaagaagtgagcgcaagagtgggagagagcacagtaagcattgcactcagagaaaaaatcactttgatgtttattataaatttaatttttaagtaactgtgacgaaatagctactttttaaataaaggttgcacaatttcagaaaacgtttataatattaatttgtttatattttgtttttttttttttaagtggaaaggagtaagcagcaaagcaattgtgggggagcgatcctctacacagagaaagagggacagcagatcttaagagagctgccaagtagggggcaaaataacaacactggagtcagcagagtggagcacagctggtatagagaataataaagcatcagaagagagcagagtggaacagcaaaatgcaacggagccaaagagaagtgcggatttaaccgcaaacgttgttgctgcttttgaagcatacgcaaatcaatgagcacttgtgcacttagccagtcacaattacagttagaatctgtgaaaaattagttacacgcgtaaatgcaagtggaagtgagacggcacgacagttgggggtagaacactaaccaataaatataataaactcctatagttctaaggaaatgaagcaaaaatgcttaagagcaagattttgtttatttttgtttttgggcaaggcaacttgtaatgcaagacacacacgaaaaagagagcgagatagagtgagtgagagatgcagaatgggagggggaggtggctgcatctttcggctgatggccaaaatggagtggagagaaagaaagaaagaaagagaacagacatggctaataacaattataagacgcaattaggaaaaacatttcggagcgaagcaagaaaacaaaaacaaggcgacaggaaaagtttgggaaacaacttcaaaagaatattttaggaaata

SEQ ID NO: 17774 - DNA, 3236 bp, DROSOPHILA
cggaaagcgtaaatcgaaaagcggttgcggtttcgaatttagctgttgtttcgattgtcgcgcgtgccattgaaaaacacagtagtttgagtttagtaccaactgaataccacgataaccaaattgctagatcactcactggcagcgttaagccgcaaaagtgcaataaattagaaaatttgtttacggccaaaacgtgcggcggcgacaaaatgtaaatgctcaggcagaagtgaagtttgctcaaaaggccaaaaagtgttttcagccccaaaaataaatccaaattaaaatttcaattaaaatagtggaaaaaaaaaataaatcgagttaaaaaacgcgtgtgcaacgccagcgtttttggttagccatctcagccgttcccaaatgattccctgcgtgagtttggccgaaacgagcgtcattggcaacatgaaggagcgggtcaaggaaatgaaggtgttcggctgccgactcaacttctggaaccacattggtcacagcctgaccagttccaaaaccaaagaaggcaacggcagttctccagcccagaattcaacgcgcagcatcagtcccaacagctccacgaccaacagtcagtttagcttgcagcacaacagctcggggagtctcggcggaggagtgggcggcggattgggaggcggaggcagccttggcctaggcggcggaggaggaggtggcggcagttgcacgcccacatcgctacagcctcagtcctcgctgacaactttcaagcagtccccaactctattgaacggcaacggaactctattggatgccaatatgcctggcggtatacccactcccggaacaccaaattccaaagccaaggacaactcccactttgtcaagctggtggtggctctctatccattcaaggccatcgaaggcggcgatttatcgctggaaaagcagaatgccgaatacgaagtgatagatgactcacaagagcactggtggaaggtcaaagatgccttggggaatgtcggctatatacccagcaactatgtcaagccgaaggctcttctgggcctggagcgctatgaatggtatgtgggcgacatgtcacgacagagagccgaatcgctgctgaagcaaggtgataaggagggctgctttgtggtcaggaagtcatcgaccaagggtctctacacactatcgctgcataccaaagttccacagtcgcatgtgaagcactaccacatcaagcaaaatgctcgctgcgagtattatttgagtgagaagcactgctgtgaaacaattccggatctgattaactaccatcgccacaactctgggggtttggcttgccgactcaaatcctcgccctgcgatcgcccagttccaccgacggcgggattgtcccacgacaaatgggagatccatccgatggaactgatgctgatggaggagcttggatcgggacagtttggtgttgtgcggcgcggcaagtggcgtgggtctatcgacacagcggtcaagatgatgaaggaaggaaccatgtccgaggacgatttcattgaggaggccaaggtgatgaccaagctgcagcatccaaatcttgtgcagctatatggcgtctgctccaagcaccggcccatctacattgtgaccgagtacatgaagcacggatccttgttgaattacttgcgacggcatgagaagaccctgattggtaatatgggtctactccttgacatgtgcatacaggttagcaagggaatgacctacctggagcgccataactacattcaccgggatctggctgcccgcaactgtctcgtgggttccgagaatgtcgttaaagtggccgactttggattggcccgatacgttctcgacgatcagtataccagctctggcggaaccaagttccccatcaagtgggccccgcccgaagtgctcaactacacgcgcttctcctctaagagcgatgtgtgggcatacggtgtgctgatgtgggagatcttcacttgcggcaagatgccatacggtcgcctaaagaataccgaggttgtggagcgtgtgcagcgcggaattatcctagaaaaaccaaagtcgtgtgccaaggagatttatgatgtcatgaagttgtgctggtcacatggacccgaggagcgtcccgctttccgtgtgctcatggatcagctggctcttgtggcccaaacgctaaccgactaaggagcggaccagattgcggcacccatcgcctgaaattaacacgcactgaacacactgaagcatcttaagatattgaagaacgttaaaggcattacatttaaggttacaaaagcggcgaaagaaagatatatttagatttatacatatatgtatatgaagcataagatttagttaagcgcgagccagtttacattacggcacaagccccatatgattatggtatatttggattatatgatagagctagagctgagcaaatgatatcattatgtttatgaacgcgttaactgttagacaatgagatacgaagcgcaacaactgacagtcacatatagtaactatattaaatgagaaaacggaaatgcattaaagtatagagaactgtagttaatagtcaaatttttgatacatttcacataccgaaagcgatataaaaaaattataacgatacatgcatatgatacgatatttaaatgtgcttttttaaatagcgagccactgtgctaagtaaaatatgattatctctaaagaatgatagaaacaaacaaacaagaaaactgattatgcattaaatattaaatgtaagcctcaagtcgaaagcgaaatgtttgcacaactgataaaggatgaaggaaccgaaggatgataagaaaagagttcgccaagaaacataaacgatttttagactagatttgtacgtgcgtagtttaagttttgtgatttattgtttaattcttgcagacgatttttatttttatttaattttgatcttgcgatggcatcacccacgctcacagtatgaatcaagtacggtataattacgagaaatttatacgttatgctttatattttaactgaattctttcgtttttttgcaatgtctatgcgatataaatctatatatctatacacatattttaccctatttttatgaacgttttacttaattaattttatcatttgattaagcaaccagaaatgcaaaagagaaaagaaaaaacagaaaatcaaataaaatgtacgataaacattta

SEQ ID NO: 17775 - protein, 604 aa, DROSOPHILA
MIPCVSLAETSVIGNMKERVKEMKVFGCRLNFWNHIGHSLTSSKTKEGNGSSPAQNSTRSISPNSSTTNSQFSLQHNSSGSLGGGVGGGLGGGGSLGLGGGGGGGGSCTPTSLQPQSSLTTFKQSPTLLNGNGTLLDANMPGGIPTPGTPNSKAKDNSHFVKLVVALYPFKAIEGGDLSLEKQNAEYEVIDDSQEHWWKVKDALGNVGYIPSNYVKPKALLGLERYEWYVGDMSRQRAESLLKQGDKEGCFVVRKSSTKGLYTLSLHTKVPQSHVKHYHIKQNARCEYYLSEKHCCETIPDLINYHRHNSGGLACRLKSSPCDRPVPPTAGLSHDKWEIHPMELMLMEELGSGQFGVVRRGKWRGSIDTAVKMMKEGTMSEDDFIEEAKVMTKLQHPNLVQLYGVCSKHRPIYIVTEYMKHGSLLNYLRRHEKTLIGNMGLLLDMCIQVSKGMTYLERHNYIHRDLAARNCLVGSENVVKVADFGLARYVLDDQYTSSGGTKFPIKWAPPEVLNYTRFSSKSDVWAYGVLMWEIFTCGKMPYGRLKNTEVVERVQRGIILEKPKSCAKEIYDVMKLCWSHGPEERPAFRVLMDQLALVAQTLTD

SEQ ID NO: 17776 - DNA, 2578 bp, DROSOPHILA
gatgcgattcttttcccgctgcagggcttcgattttctcgcgctcctcgcgttcgatgcgtttctgcttgagcttctcctcgatgagggccagctgggccttcttctcctcctcggtgagcgccttcttttcctcctccgattcggagaatttggtgtgaccggttttggcggcatggtactccacttcggtgtgatctctaagaactttgccgcattcgtcgcacttcagggacttggctaccggagcagaggtttcacctgcgccactggtgctactggaagctgctgcggccgaggaatccacagccgcagctggttgagctgtggaaccaggggattcgccggcaccttgacgggatggtattggatcatccacgtgggccagcagccactccattgccggttctacgcccttgttactggtcacctccagtgcatattcactgtgaaatatatttcaggattaaagcaaattcgattgttgcagtgtaacttattttgccggtgaccagttggccattgtattcgatacttacacacgttcccgagggaatcccatatccatcaatgtctgcacttcactcatagcgttggctgattgcgtcccaaaaattaatagttcagtttcgtatatttatgaaaacgaaaaattaacaatgacacacaaaaacaaagccaggcgagatggataactatcgatagctcgacccgtggtatatatcggtgtaatgcaatagttgcagctatggcaaacaaaaatgataaataaatagttttaaatataatataaattttaaatatatagtaaataaattaagacaaggagcggacaaccaaatacattccataattcttttaattttttttatagatattacacatacttttaaataagcattccatatagctgaaatctacccatcattttcgagtagtgtagtgccaccaccaccatagatagttcgaggttgcctgcgacgtttaccaactctgcaaatttggcgtctacggagataggttttttcgactttgaaagagaaatttcaacaattttataatcaaaaccatgtcaccgaagactaaaaaaatgatcgtcaagattccgcgccatccctacttcaatgtgcagggcgaacggagcgtggagcgcgaggtggagtaccaggtccgaaagtgtcgcgtgaatctggagcgcatcaagtcgtcgacttctccgaattcccgtccattcccgttaaaaccgaagcccaagagatgcattgtacgtgtagcccgactgccggacgtggagcgcagcgagatttccgtgacaccggccagttccatcatgaattccgacattgacgagagtaggtgccaggtcttctagggaacctacgccacagactactttaaagcattcttcttcatgttatccttacagatagtggcagcgatcaggagtctaatctgacaatctagtcgtctcatactcaaagagcaatcaacgcatccagctgacaaacttctaatcgcacttggagtcattcgaagtacacagagtacatgtccaagataaaccaaatagatgtgcggggctatccttttcctgaatatatatgtataagatccttatctaagactttatgcaaatcaagctcgatttcttaatacaaactcgtgcgcctaaatagaattttctcttgtttttcatatttagctataagttatctagcaaacttgaatccactttattttatataccagataggatttattatgtagaccatttcatatggataatttcatcggcatataattgtatgtgctgtgattttttacaacaacaaatgtttgattaaatttgtaaggaattgttgtatttttttggaatttctagaatattcacaaaatttcaaaaaatgaatttaaaaaatggcggcaataagattttatcgagttgtgttatcgaccattagatatcagcttttcatttaaaactttggtaaaataaatatacaacacttcactctttaaaaacgggaataaaagaacattaaatattttaaaataattatttttatttaaaaacatatatttttagaccacttatcgacagatctatatatcgatacccgggagtcagctgtcggcagaaaaatatttctggaataacaaaaacagacaaaattacccgtatccgaaccgagtcgttattccaacaccaaacatgaactggcacaagggcaacattgcggaggccgtggcggcatcaaaggccaagggcgccgtgtttgtcgtcttcatcgagggtaattagtaaattgccaattttaccacgtcattgcgaaatttcacctgctttttaggccaggacgaaatgacccgaaaactagagcggttcgtggatgacagtcaggtgcgctcccgcctggaaacctccgattttgtcgccatcaaagtccagggaaatagctccgcctacggacagttcatgtcgttatgtgggtaccattctggctagcaatccagatcaatatcaatatctctgatggttctttattgatttccagacaaaatcgtgccaattccctcgc

SEQ ID NO: 17777 - DNA, 578 bp, DROSOPHILA
ttggcgtctacggagataggttttttcgactttgaaagagaaatttcaacaattttataatcaaaaccatgtcaccgaagactaaaaaaatgatcgtcaagattccgcgccatccctacttcaatgtgcagggcgaacggagcgtggagcgcgaggtggagtaccaggtccgaaagtgtcgcgtgaatctggagcgcatcaagtcgtcgacttctccgaattcccgtccattcccgttaaaaccgaagcccaagagatgcattgtacgtgtagcccgactgccggacgtggagcgcagcgagatttccgtgacaccggccagttccatcatgaattccgacattgacgagagtaggtgccaggtcttctagggaacctacgccacagactactttaaagcattcttcttcatgttatccttacagatagtggcagcgatcaggagtctaatctgacaatctagtcgtctcatactcaaagagcaatcaacgcatccagctgacaaacttctaatcgcacttggagtcattcgaagtacacagagtacatgtccaagataaaccaaatagatgtgcggg

SEQ ID NO: 17778 - protein, 93 aa, DROSOPHILA
MIVKIPRHPYFNVQGERSVEREVEYQVRKCRVNLERIKSSTSPNSRPFPLKPKPKRCIVRVARLPDVERSEISVTPASSIMNSDIDESRCQVF

SEQ ID NO: 17779 - DNA, 14392 bp, DROSOPHILA
tcctagcctcatacagcgatgcgggtatttacctgttcgacagtcggaactacaacagaggcgactatttgcactgctataagggtcacatgtaagtaagccctgtttcccccaatgttctgacactgacaaatatcatctcctctttcccacagcaacagccgcaccataaagggtgtgaacttctttggacccagatcggagtatatagtaagcggcagcgactgcggaaatatattcttctgggataaaaacacggaggcgattatcaactacatgaagggcgaccacgtcggcgtagtcaactgtctggaaccgcatccctggatgccggtgctggccacctctggactagagcacgacgtcaagatctggacaccacagggacctgaaagggtagggtcaacacaaaaatgggtacaagcttaatgtatgtaatgaaatccactctccgcagaaactccccgaggatttactgaagcagacgctgcagcgcaatttcaggtgcaacattgtggagagtattgacctcgacatcaacaatttccagtactttatacgcggcttcctgcagggctccggagcatcgcatctgcgtcagagacatacgtcttcgctaggtcatcaaatgcgggacaacagctccagccgcagcaacggctcgaatgcttccaacccgacttcccaccggcgcaacagcaacagctccgacgacacaaacgacgagggagcagacgccgacgctgcgctggacacgctgcactgccgcacgcagtaagcactccccgaggtgccgtagacgggcttcgaaagcagtcctcggcgattatataattttcgatattttaactatgttagaaagcgtttctgaagctgtgaatttgtaaccgtaacacataagtgcgcatattttatttttaaacaaggtttaataaatgctcattgagaataatttcgcgtcaaatacttttataatacttttttgggctcccaatagagctcagtcgctggtctggcagatgagagccacgctccgcttgacccagtgggatgccttaacatgcgtgttcaacagcagagggaccacgtagtttgtggagtgacctgtcgtggacagcgttcccttgcgctccgcggtcttgtagagcgggcagcggtagcgggagccctcgacgacatcgacgagcccgacaggtcggaaaaagatcacgggcatggcatagatgagcaccttggggaactgctctactagcgtgttctctcgccactcccagcgggcgccctccaggtacagtccgttgcagtacaccccgtcgtccggaggcgaagtctttgtctccaccttgagcacatcgtagtcaaaggtcagcgtgtcgatggggatcttgtactttcgggcaaagttctgcatggcgcccgtgaggaaggcctgcgtgaagaagaatccagacagccagaaggttggtggcttgccgtggtgatgccagtcgtggagccagttgaggcgcttgtacagatcctggacgtaggagccaagtggcttcaggcaggggtacgacttggacatccacttggtcgggatgcggttgaatttcatagccgtcattacgttctccaggtctggagtcatcacgatgatgcccttgattcccatagccaaatctcgacaggtggtacggatctccttctgcaacttgagaaagcgttccatctcctgcaccaccactgtgttcatggactcattgtagtctactgggtacttctctgccgctgcctcgatgtccatatcagccggcatttcgcgctcgatttgcttgattgtatccaggattacctgctccacactaactcctgcgccggcggatcccgctgcctcgctgcccagtaaaaggatcatcgagtcgagcagcgtcttggtcgtctgcagatcccttgttatgccggagttggcatgcaggccgtagacctcgggtggcgccagcgaaggaaggttctcgtccagataccgcaggatctcgcggtgctccgtctttcggggcaggatgtagcgatcgtcgctggcaaacctatagcgattgtcggtgaccgcctgggcattgcaaaagtccgccaagatcgtcacgattagccggcgatcccagttgtccgtgacccttccgccgtagttgcactcgctggtcaaatacgagatggcgtcgtagggcacgtggtcatactggttgagcagcatctaaagggagcacgatgacatacatacatatgtaaatacactagacactgatatccatatcaaacttacgctcagctgcagcaccgagatctgcagatcggactcgttgaatccgtaggctatgttccaacccagtggaccgtacttgcgccgctcctggacaacagcatggaagaagcaaatgccgtagagcagccgtgtgaatgcgcgatcctgtttggcacagcccgtgtagaactcgtagtcgttaatgggctccgagttgtaggagcgcatcagattctccttgagtccggttggcggttcgttggtcattttgacgccgttctgcaggatggtcaccgggaactgtggcgttggataggcggttagccagatgcggaagttggctgcaatgaagggattcggtacttaggactttatagcttagatatgcattggatgacactcacgcgtggtgttgaatgtgtccatgttctcccagagatattccaggtagggcatccaggaagcggctaagtggcagttctgcaggcacacccagtagcccatctcctgagcattcttgatcagagccgtggcaatcggaccctggccctggcccagcgaaatgctctggaaggtctcctcctggcccatcttctcagcgaaagccagcagggagcccagtgggtcggctccgggtgagaggatgaacaccagcggcgtcagagcggtggagtcagcatacgacttggatatgtcaaactccggcggagtcacatactgatcgccgatgctctcggcgatgaagagccgcaccgccaggaaaacagagtcgggacgcagggccttcaacacaatgatcttctcgaaggcggtggtcttatcctgccaaggtggcggcaatggttgcttctccggggaggagtggtcgtagatcgcctgccaggcatgcagatggctcttgaagtgatccacgatgccacggagctccttgagctcctccagacggagcacattgagccacacggtctccgttatccaggtaggatcggggttcggaggtatgttcgtggactccttcgcattggtgaccaggtgggcaaagtgccgcatttccacctgacccgtgcccagcaggatgcgggcagtgaggataaaggagtagagcagcttgtccttctcgaaaatggatcggcatacgttgttgtagagattccgagtgaagccatccaccaggaacttgatgcgccgcggcagatccttggacttgttggccgtctcaatggagtacatgtagagattaatgtaccagttgagtgagaactggtacatgggatcaatgttgggaagatccgtgatcgagtaatagagaatggatgagtggactgccacgggcttgtagttcagccggaaggcctctatcttagccaccgtctccttggctgcttcctgcttttcgacaatgtccttggacaggcccttggagtcggcaaggatctggattgctgcctcgttctccaggatatcaccaccagcactcagcgttttcaaaatcatgttctccgcatcccgaagagcccctttattggccgccgcctcagtggtgagcgtgatgcgcagctcctgcaggtccggccgctccttagccaccacaatgctgaggagctgatccatcagcgcattctgggtgagagcaaagttgatgacggtcaccttgttaaaggtctccggcaggaagtgcggattgcgcagattgcaggtcatgtacaggcggaagttcggattaaccggcaccacagactcacccaagctgatgtgcttgatcccgccctgaacgaaggtctggcgcatcaggatgggatcgagcggcacctccagctcctcctgcacgttctctattatcacgggtgttccgtactccagcgcctctgcgatcaccttcatgtagttgctctggttgaacttgacgcagttcagccggttcttgcgctccatgttcttcagccagttgttagcctgtgcctgcggatcgataaacaagctgtatcgactggagttggccgagatgatggcgttttcgctggagaactcgtcgttgggcagtccgtccagctgccagttctgtatggtcacctccaatccgagcacatccgtgatggagtaatgggaggagcagggaatctttaggtccgtgaccttcttgaaccaatccttaacacactcggatcggtactgcagattcacggcggagaggtaggcaataatcccgcaggagatgagcacatcgccaggcagatggtcgtacaactcctgcagatcctccgcagccttgttccatcgtgacttttccccacccaatccaccgatgagagcctccgcccggagcaacttgttgcgacagctctctgcgtgctcctctgtcttttgcatctctgcgttggccttgtccagttcgatgttcagcagggccaccttttcctccagagccaaggccaacgcccgcttttgggccaggaactccatagtgtccgcgtactccttctcggccccggccagcttggcctttttgggagccaccaccttggccacctcgtcgtacatcatcatggcaatgatccactggcacagacccttggcggcacttgaggccttggccaccacctttggatcgaagtccttgttggggatgaactccttgtggatacgcttaacgatttctgtcggaatattgtccttgtcgaactccttgaggcccggaaggaagttcatttcgcccagaaggcgcttactcggtccccagtagtcttggaccattttcccagaggctggatccggaatgcgctcgggtggaattcccttgatcacacagaccgcggccatcactagcttgatcacgggcggcggattcttcatcgacttgaccagtgtgatgtccgccggcttaagagtgttcaatgcagccagggcatcttccaggacgggaatggctttggccagatctcgttcgcagtcctgcttcagaacctgagcagcctcggcctgcacggaagccacttcttcgtctcgcttcacctgctcggcggcagcgctggcggctagcgtctccttgttgatctccagcatcatcttccgggatgattcggccagggccaccagcttgggttgcagcgcattaagatccctttgcatgatggagatggcggcggctgcctgggccagtgtatccaaacctccaatgtagcgcatcttggccaacatggtttcactctgcttgcgctcgatgagtgtctggaaggagcgtatcagctcaatgaaagaggcgttagtctggtagatgtggcgacccgtcatctgacagaaggcccgcgtagaccgtgcagccgtcgtatggaagtactggcaggtgtccatgatggccagcttgatgtcctcactgggcacgttgacatcaaccagcgacatcttggcaatcatctgcagggcctcttcgggccagctgtcgtaccagtcgatggtgcagcagttaaccagcgagggataaaggcgcacccgtgttctgagagcatctccgatgggcgagaaactgaggatcatgtgcagtttctgcttgcagcggtccacgaagaaggagaagacctgcagggcggagacgtcgatgttgcgattgcctccctgggcagccaggcgcaccatttccaggacctcctgcttctcgtcgatagggaagatgttgggcacctcgccctggttcagcaggcagtcaatgtcctggaggaatagctccatcttgatctggttctcggtaatcaggaacgtggtgtgcttgttcattccgcccgcctcctttaagatcgccttgatgtcgtcgtgccagtcgttggccccgtagtttttggtgatttccggctggaagaacgaagtctgcaccatattggtcgccagcttggtcagcgactggcgcccggatccgcccaatcctatgatgagggcactggctccctggatggaaatgatgcggcatatgcggttcagatgctgcagagcaaaggtgaacagggtaatgtccattttgttgcgtcgcgtcgagttgtaatcatccaagctggtgagagccaggttcagaaacacctccacgctgggcacttcctcgtagcgccgctcatccggcacgctgtcctcgtcgaagtagacgccgaacaagatgttgctggccgcttccatggtgaacaccgcttcatccgggccctgaatggtcatggattcttggcggtctatatcaaatcaaagactgatccaatcggacttacctgaacgcaatacctctcgaagaccgtctccaccttgtccttgaaatttgccttgaggcactcgttgagcttgtcgaacatccacttgcgatccacgtcgtccaccagacggtcgtagaaaacgcgcatcgcctcgtggtaccagacgcgcacgaaaatcttcttgtccgacaccgactccttccgcaccagggtgcacccggtcaccacgcgtgaaatgtctcgcagattgaatatgtagtgggacttggatggcgtggccctgatctccgactgcacgctcttgtagatgctctgcgtggcgctcacaatctggttggtcacgacgaacacatcctgcccgtggccagcgcgtcggaagccattcagcgccacgttaaggaatatacggaacatactgtcgtcactaaaagtgttaatggaatacacgttgaagtggttgaggaagcgggcatagacgtcctggcgactgccgccgggcaggccacatgcggccatgatcaggacattgtggatgtaaaccttggagctgtctttcaggtcatacacatggccatagtcgaagaactggcgcaacagctccagtggcggctgggcaccataaacctccttaaccggcatgttcatgtcgtccacgaagagcacactttgcattccctttggcggaccgtagatgccccgcttccacttctgcagcttggatataagcagatcctggcactggttagccgagatcattaccgtgaaggtgatgaatcccgtctcgaacacctccttgtccagcttgttcatcaggtagttctgcacgtagaccgtcttacctgtgcccgttggtcctacgagcagcattctcttcttgtgctccacgtgcatcttcagcaggtgaatgtagcgagctgtgtctactgtgggcactatcacacctgtcttggtctcctcgacgtccatacgcttggccagatctggccagtaccgccaggctccacgctgcttgtacaggaacacgtagtccaccagcagaccctctgtggggggagtgatctccatcttgcccagcggttccgggggcggaggatcagtgtcccatagctaggcagtaatattctatgtatcgaggtaactaagttgatttgcagtacccataccttttttaagaacacgtcgaacttctcccgggaagcggtgtccagcactccacccactccccaaatcagagcgaacagtatggccgcctggaagtatgtctggaggtacttctggtagtcctctggattctcctcgatcgcctccgcgatttgcatgtcgaacaggtcgaaggtggtcagcatacaattgaactctcctggcttgataaactggctgcagaaccgccgtacaaaggtctggcactgcaattgattaaccttggtcaggtggtgagcttcgtaggctgagaagaatttcttacgggcggtagaagccactgcatcagggccattacgtagggcacgccctcctcatccgcccatcgaggatcggccttcttgagccagcttttggcaaaggcgcgccagccgagcgtcgagggctccatgtagatcatgccacagcgggaaacggtggctggtgaggcctgagccaggtccattacctcgaacaccatcgacatctcgttgctcatggtgatcacctcgccgctggtcaggcacagttttttgttgtcgtccagcaccgtgttcatattctcaatccaaacggcatctaccggtccgtcaaagatgacctgcaatggtatcgtatttcttccaattgcagatggaacggttatttcaaggactcacccacttcctgtccggcgtgggcgtcatggcaaagtcgcggaagatcttggccaccaggccgtcggtccactcgtacgagatcggatcgaaggagccgtacagctggttcatggtaatggacttcgggttcattatgcccatttgaacgtgctgaaagtagttgctcttctgtggcgccttgatcttcagcgcggacaggaccttggcgaggacctgtagggtcttcgacttgcccgccagcggttcgcccaccagcatgaatccgtgccgcacgataatcatttcgtacgtctgaatgaccttgagaaggaagctgggtgcaggctccagcacctcctccaagcagacgcgcttgaactcggactccaccagggagtaatcgatgtgtggcaacttgatgcccgggaatatgtccgagatgatgccctcgaacaggggaacatcgaaggagaggaacttgggcaggttcacgtcgatcaagctgcgcagcaacagaatgtcctccacctcgtccggatactgtttcttaatgttgccacaggcggagagcaccgtcttcacggctcgcatgccgtaatcgtaatgattttggctggacaactgctccgaacacagacggtaggtggtcacaattttgacggccagctttcgggcatccacgaagccgtacgagtagagggagatctccccaatcatggcgtaatccggcaccatcatggccacggaacggaagagcactttcaaattatccggcaactcggatcggccggcatagccgggattcatggtgatgcagacgtagcaggcggggttgagggtcagctccgtaccttcgaacatgaacttggtggcgttgctgcgaacagcttgaatgatgagcagaatctgttgcgccaccacggagagcacctccagctcaattcggttgaactcatcgaagcaggcccaggcaccgcacgaagccaatcccttgaagaacttgcccatcgccttatagtccagaccgtcagagcaattgaacaccttgcactgcacggccagagccttggccagatccttggtggtctccgtttttcccgttccagcaggtccctccggagctccgttcagatgaagttgataggctccaaccagagtgcggtagcatcgatccgtcagtggggtaatcaccaggcgatccgagttgcccagatactcgttggcaaatggcacagtggcgttgatgattctcacccaggtcttgtcgtcctcccagtagtatcgcatctgggccagccactggaagtcgaactcactgctgaccttgttcttgataagatcctcggaaacgtccttggcgtggacatcgatcacgatcagggacttaatggtgatccggttaaggttgcttatctttggcgagcggaccagggtcacaatgtcgttcagctccttggacagctcttgaaagaagttcatcataatggtcatattcccgccaaacgtgcgacgcaggcatccgtggacacgggatgcccagtacacctgtgagatggccagcaccgtcatctggggccactccagaacccactcgtgccgcttcaccttcggatagtgcgcaaaggatagctcgttctggtagcgcactgccttgagcatctcgtcctccaccccgatgagccacttctccacacttcctccggccgccgctgtggacacctgctcaatgaactcaatcgtttccttgtcactgctgatcatggccagcacgttcttggccgcatcgaactccaggctgttgatgccctcgaagcacttgctcaaatggggaagaacgcgcagcggatccttggtctctgagagaatctccagcatttcgtcgttggccagaaagaagaagcgggggaagtacagacgcttcttctccaggtagttactcacgccggtggcgatgtcctccagcaactcattggccttctgcagggactccagcagacccgaaacaggcgctgtttccatcaccagcggctgccggaggaccaagcccatgttcctggtatatgtctgctccacgatgacgaagagacgaccctcctccggcatctgggccacgatgtccttcgatgagaagatgggcaataggtacagatagttggcctgcaccttgccccattggtccagtgtttcattgacgcgcatgattttctcataccacgcccgcacctcctcctcgcagggcttcatgaatgccgatccgcgcatgacaagcgtcttgagaatgtggtcatccagcagggcctgaatgtcatccaggctgctgaggatctgcacgcccgtctccttgtagggaccatagggaaacaccctggtctcccattccttgatcatggcctgcagtgcgttccacagctgcaactctttgttggccccaatgctgatgatttcaaactgatcgagaatcgggtccaggccagagttaagaatcttgcgtagagtggtccctgcatcgggtgtaacatcgaatcccgcaatttctgacatctccttccagtggcgtttgcgcagagcaggattacacatggtgttcactataaacacgccagtggtgaagtctttgattgactgtatcatcgaggtgcacagtcgcaagggcactgggtgcttagccggatctggatcttcagtttgaccctgcaggaaagtcgaaagttgtggtatcacaaaatgatcagtggtcagccagtggtctcaccttgaatttgcacacgggattgtcgatcagatcctgcttgatcttgaccctgtagtacttctggttcttctggaactccttcaggtagtcatctgtagttcgctccacgaactggggctcaaggtactcgaagggtccgtcgttccacacgctcaagtaacgctgccattcaatgcagcatctacagatggcaaaggttccaagtgtatacatgaaatctttgattattccttaaagatatatcacttacttcataagctcggcaaaggggtaaacaaacgttttgataatatccagcttgggatactcggtcagggcgactttgaagagcttctcctccttgttgatccacgccacgtagtcgtcaaaggtcttcagctgatctataaagttctgcaaaatgatgtagctgtcccggaacttgtccggtcgactcatgtcatcaatgacggtcagcttgggcagcagctcatctatatcggagtttagcttctttatgacctcctgcaggtgctcctcgaacgtgaacttgaactgctcctgctgtgaggcattatagtcgcagatgtcattgatgtccttaatccaattgatggtcttgatggtcaggtcaaagtggtatttggacatttcagtcagctctacgatattggttccgacttgcaggcagtattggatgcggtcagtcagttcggcgatcttgtccttcttcacgtggatcatgtactcagcactctcgagcagctcctccgttgatttcgggatctccagggcccggtacttgatcttctcgaactcgtcacatatgtccacctctgccttaatgtgctcccgaatgatgatcgtggtgatctcgtggatcagattctcggccagagtgcggagtccaaatatggccggctcgttgtgtataacggccatcacgaagtactcggttgcgggctcgcttcgcagcatttggatgaatccgtagtacatgtcgatccgggcaaagtactcctcgaactcatgcggctcggacagaaactggttgagggcgtctcgctcctgccaggagtacaacgcatagtacttgtcccggaagccctcgacatactgaattacctcctggtaagtgcgaaggattatgttctgaaccttgtctatcacgtcctttaggaagttatcattcatctcgatcttgaggtaatcgttcactttcgcgtacgcagccatcgatgtgagtgtctgcacctgcggctgcagtggctccatgcggtagcccaccatcgagatctcagtagcgatctctgcgaaggtgcgcaagatggaccaggcattgggccgcgtgtccagatcactggaaaactcggaccactctagtgacatgcgcatcatgggcattgtgcgcgggtgactgcacatccgatacatttcctcgaaggtgcggatcttcatgttggtcatctcgcggttcatcagagcctccatggcattccaggaacgcttccacgtgctcatcggcatcacccgcttgcgcataagcttgcgcaatacctgcacaatctttgggtaccaggtccacctcagaaaggtgttcaccttgtccagttggttctggatgtacttgtggtaaaacttgtaggacagcgcctcccgacctcccagtcccaactgttgctgcatggcgccggtggccaagacgtagttgaagatgcaggccaattttggcagttcgccgacggatatattaaggattgctctaagcgggagctgcaggatcagtagcttctgagctatgcgtcgccggttctccaggaagttgctgtagttctgggtgcgacctggtcgccgaaagccgatgtcaggacggggcagttcgaactgggccggatcctcgtccgagaactccggatggcgcaggatgttcttcatgctgtagaccttcataagtcggttgaactcctcgtggacgtcgtgcatgtaggcctgcaccagctccgggtacttgttcttcagtcgctccgaggcgaagctcagaatcttggcctccgtgcggcgcagcataggaggcaccacaatcttcctcacctcccgacgtaggttgtcttcgtagtgggattggggcagaaggcgcatgtctggctctggctgccactgctgccgggcgacccgcaccttgacatccgccgccttttgcttaaggaactgatagtgccggcgctcgtgcacctcgctgatccggaacttaagcagcgggttcttcatgtacggctcattatcgtacttggtgatgtccgaggccggtcggtgcatccgctccagcttcttggtgtacatggtcgagccttctttggttggaatatcaaagtacagggaatcaatcggatttaattctccgatagttattgttgctaaggcgacttgtgtttgtttgttcgtttccggggaatgacttccggctcgacgaccttggaggacaactactcacaggtgttaaagtttatgtttatttattgatcgatagcgttatcaattcgattgaaaatgacattatagatacagagattaacaacagtttagcaacaataataatagttacaataataattacataacgcctcgctcctccgttcgaatatacaaaattctaaaacacccgaaatgtttgtcaaaaaacagccttaagtttatgtcctactataacttacgcagcatgagggactggaaacggggtgaggggccgttgggtgcgggggcgggatgtgcttgtatagtgtaaagcgcattacagttcacaaagttgtacgtatagaattacaaaacatagatgagcgtgtctctcccacaatagtttcaatatattcgtatcaaagaaattgcacgtgtttgatttgacattatttaaattggcttcttgtgtgtgtttcatgttgtgtctaggtactttaaaaacgttttcatatctcatacgcaacagcttcagatcaagcgtatctcctttggccctaaattaagagaatttagcgatctaattaggtgttataacaaaaagtatacataactattcgctttcgatatcaaagtaaattcagtcatttcagaactgatcgttaagctacgatgggccggcccagaacaggcctgatagttcgtaattattgcgtacctacatacctactggggtaggcgaatatgcgtattaaacattacatagcctaggggcaacagtagtgattgactctagttcgctgcggttgggattcattggtccttcggccgctccactcgctacctctcgaactgcagcacgtagtctttgagcgggcccggcaggttc

SEQ ID NO: 17780 - DNA, 11607 bp, DROSOPHILA
atgtacaccaagaagctggagcggatgcaccgaccggcctcggacatcaccaagtacgataatgagccgtacatgaagaacccgctgcttaagttccggatcagcgaggtgcacgagcgccggcactatcagttccttaagcaaaaggcggcggatgtcaaggtgcgggtcgcccggcagcagtggcagccagagccagacatgcgccttctgccccaatcccactacgaagacaacctacgtcgggaggtgaggaagattgtggtgcctcctatgctgcgccgcacggaggccaagattctgagcttcgcctcggagcgactgaagaacaagtacccggagctggtgcaggcctacatgcacgacgtccacgaggagttcaaccgacttatgaaggtctacagcatgaagaacatcctgcgccatccggagttctcggacgaggatccggcccagttcgaactgccccgtcctgacatcggctttcggcgaccaggtcgcacccagaactacagcaacttcctggagaaccggcgacgcatagctcagaagctactgatcctgcagctcccgcttagagcaatccttaatatatccgtcggcgaactgccaaaattggcctgcatcttcaactacgtcttggccaccggcgccatgcagcaacagttgggactgggaggtcgggaggcgctgtcctacaagttttaccacaagtacatccagaaccaactggacaaggtgaacacctttctgaggtggacctggtacccaaagattgtgcaggtattgcgcaagcttatgcgcaagcgggtgatgccgatgagcacgtggaagcgttcctggaatgccatggaggctctgatgaaccgcgagatgaccaacatgaagatccgcaccttcgaggaaatgtatcggatgtgcagtcacccgcgcacaatgcccatgatgcgcatgtcactagagtggtccgagttttccagtgatctggacacgcggcccaatgcctggtccatcttgcgcaccttcgcagagatcgctactgagatctcgatggtgggctaccgcatggagccactgcagccgcaggtgcagacactcacatcgatggctgcgtacgcgaaagtgaacgattacctcaagatcgagatgaatgataacttcctaaaggacgtgatagacaaggttcagaacataatccttcgcacttaccaggaggtaattcagtatgtcgagggcttccgggacaagtactatgcgttgtactcctggcaggagcgagacgccctcaaccagtttctgtccgagccgcatgagttcgaggagtactttgcccggatcgacatgtactacggattcatccaaatgctgcgaagcgagcccgcaaccgagtacttcgtgatggccgttatacacaacgagccggccatatttggactccgcactctggccgagaatctgatccacgagatcaccacgatcatcattcgggagcacattaaggcagaggtggacatatgtgacgagttcgagaagatcaagtaccgggccctggagatcccgaaatcaacggaggagctgctcgagagtgctgagtacatgatccacgtgaagaaggacaagatcgccgaactgactgaccgcatccaatactgcctgcaagtcggaaccaatatcgtagagctgactgaaatgtccaaataccactttgacctgaccatcaagaccatcaattggattaaggacatcaatgacatctgcgactataatgcctcacagcaggagcagttcaagttcacgttcgaggagcacctgcaggaggtcataaagaagctaaactccgatatagatgagctgctgcccaagctgaccgtcattgatgacatgagtcgaccggacaagttccgggacagctacatcattttgcagaactttatagatcagctgaagacctttgacgactacgtggcgtggatcaacaaggaggagaagctcttcaaagtcgccctgaccgagtatcccaagctggatattatcaaaacgtttgtttacccctttgccgagcttatgaaatgctgcattgaatggcagcgttacttgagcgtgtggaacgacggacccttcgagtaccttgagccccagttcgtggagcgaactacagatgactacctgaaggagttccagaagaaccagaagtactacagggtcaagatcaagcaggatctgatcgacaatcccgtgtgcaaattcaagggtcaaactgaagatccagatccggctaagcacccagtgcccttgcgactgtgcacctcgatgatacagtcaatcaaagacttcaccactggcgtgtttatagtgaacaccatgtgtaatcctgctctgcgcaaacgccactggaaggagatgtcagaaattgcgggattcgatgttacacccgatgcagggaccactctacgcaagattcttaactctggcctggacccgattctcgatcagtttgaaatcatcagcattggggccaacaaagagttgcagctgtggaacgcactgcaggccatgatcaaggaatgggagaccagggtgtttccctatggtccctacaaggagacgggcgtgcagatcctcagcagcctggatgacattcaggccctgctggatgaccacattctcaagacgcttgtcatgcgcggatcggcattcatgaagccctgcgaggaggaggtgcgggcgtggtatgagaaaatcatgcgcgtcaatgaaacactggaccaatggggcaaggtgcaggccaactatctgtacctattgcccatcttctcatcgaaggacatcgtggcccagatgccggaggagggtcgtctcttcgtcatcgtggagcagacatataccaggaacatgggcttggtcctccggcagccgctggtgatggaaacagcgcctgtttcgggtctgctggagtccctgcagaaggccaatgagttgctggaggacatcgccaccggcgtgagtaactacctggagaagaagcgtctgtacttcccccgcttcttctttctggccaacgacgaaatgctggagattctctcagagaccaaggatccgctgcgcgttcttccccatttgagcaagtgcttcgagggcatcaacagcctggagttcgatgcggccaagaacgtgctggccatgatcagcagtgacaaggaaacgattgagttcattgagcaggtgtccacagcggcggccggaggaagtgtggagaagtggctcatcggggtggaggacgagatgctcaaggcagtgcgctaccagaacgagctatcctttgcgcactatccgaaggtgaagcggcacgagtgggttctggagtggccccagatgacggtgctggccatctcacaggtgtactgggcatcccgtgtccacggatgcctgcgtcgcacgtttggcgggaatatgaccattatgatgaacttctttcaagagctgtccaaggagctgaacgacattgtgaccctggtccgctcgccaaagataagcaaccttaaccggatcaccattaagtccctgatcgtgatcgatgtccacgccaaggacgtttccgaggatcttatcaagaacaaggtcagcagtgagttcgacttccagtggctggcccagatgcgatactactgggaggacgacaagacctgggtgagaatcatcaacgccactgtgccatttgccaacgagtatctgggcaactcggatcgcctggtgattaccccactgacggatcgatgctaccgcactctggttggagcctatcaacttcatctgaacggagctccggagggacctgctggaacgggaaaaacggagaccaccaaggatctggccaaggctctggccgtgcagtgcaaggtgttcaattgctctgacggtctggactataaggcgatgggcaagttcttcaagggattggcttcgtgcggtgcctgggcctgcttcgatgagttcaaccgaattgagctggaggtgctctccgtggtggcgcaacagattctgctcatcattcaagctgttcgcagcaacgccaccaagttcatgttcgaaggtacggagctgaccctcaaccccgcctgctacgtctgcatcaccatgaatcccggctatgccggccgatccgagttgccggataatttgaaagtgctcttccgttccgtggccatgatggtgccggattacgccatgattggggagatctccctctactcgtacggcttcgtggatgcccgaaagctggccgtcaaaattgtgaccacctaccgtctgtgttcggagcagttgtccagccaaaatcattacgattacggcatgcgagccgtgaagacggtgctctccgcctgtggcaacattaagaaacagtatccggacgaggtggaggacattctgttgctgcgcagcttgatcgacgtgaacctgcccaagttcctctccttcgatgttcccctgttcgagggcatcatctcggacatattcccgggcatcaagttgccacacatcgattactccctggtggagtccgagttcaagcgcgtctgcttggaggaggtgctggagcctgcacccagcttccttctcaaggtcattcagacgtacgaaatgattatcgtgcggcacggattcatgctggtgggcgaaccgctggcgggcaagtcgaagaccctacaggtcctcgccaaggtcctgtccgcgctgaagatcaaggcgccacagaagagcaactactttcagcacgttcaaatgggcataatgaacccgaagtccattaccatgaaccagctgtacggctccttcgatccgatctcgtacgagtggaccgacggcctggtggccaagatcttccgcgactttgccatgacgcccacgccggacaggaagtgggtcatctttgacggaccggtagatgccgtttggattgagaatatgaacacggtgctggacgacaacaaaaaactgtgcctgaccagcggcgaggtgatcaccatgagcaacgagatgtcgatggtgttcgaggtaatggacctggctcaggcctcaccagccaccgtttcccgctgtggcatgatctacatggagccctcgacgctcggctggcgcgcctttgccaaaagctggctcaagaaggccgatcctcgatgggcggatgaggagggcgtgccctacgtaatggccctgatgcagtggcttctaccgccctgccagacctttgtacggcggttctgcagccagtttatcaagccaggagagttcaattgtatgctgaccaccttcgacctgttcgacatgcaaatcgcggaggcgatcgaggagaatccagaggactaccagaagtacctccagacatacttccaggcggccatactgttcgctctgatttggggagtgggtggagtgctggacaccgcttcccgggagaagttcgacgtgttcttaaaaaaggtatggctatgggacactgatcctccgcccccggaaccgctgggcaagatggagatcactccccccacagagggtctgctggtggactacgtgttcctgtacaagcagcgtggagcctggcggtactggccagatctggccaagcgtatggacgtcgaggagaccaagacaggtgtgatagtgcccacagtagacacagctcgctacattcacctgctgaagatgcacgtggagcacaagaagagaatgctgctcgtaggaccaacgggcacaggtaagacggtctacgtgcagaactacctgatgaacaagctggacaaggaggtgttcgagacgggattcatcaccttcacggtaatgatctcggctaaccagtgccaggatctgcttatatccaagctgcagaagtggaagcggggcatctacggtccgccaaagggaatgcaaagtgtgctcttcgtggacgacatgaacatgccggttaaggaggtttatggtgcccagccgccactggagctgttgcgccagttcttcgactatggccatgtgtatgacctgaaagacagctccaaggtttacatccacaatgtcctgatcatggccgcatgtggcctgcccggcggcagtcgccaggacgtctatgcccgcttcctcaaccacttcaacgtgtattccattaacacttttagtgacgacagtatgttccgtatattccttaacgtggcgctgaatggcttccgacgcgctggccacgggcaggatgtgttcgtcgtgaccaaccagattgtgagcgccacgcagagcatctacaagagcgtgcagtcggagatcagggccacgccatccaagtcccactacatattcaatctgcgagacatttcacgcgtggtgaccgggtgcaccctggtgcggaaggagtcggtgtcggacaagaagattttcgtgcgcgtctggtaccacgaggcgatgcgcgttttctacgaccgtctggtggacgacgtggatcgcaagtggatgttcgacaagctcaacgagtgcctcaaggcaaatttcaaggacaaggtggagacggtcttcgagaggtattgcgttcagggcccggatgaagcggtgttcaccatggaagcggccagcaacatcttgttcggcgtctacttcgacgaggacagcgtgccggatgagcggcgctacgaggaagtgcccagcgtggaggtgtttctgaacctggctctcaccagcttggatgattacaactcgacgcgacgcaacaaaatggacattaccctgttcacctttgctctgcagcatctgaaccgcatatgccgcatcatttccatccagggagccagtgccctcatcataggattgggcggatccgggcgccagtcgctgaccaagctggcgaccaatatggtgcagacttcgttcttccagccggaaatcaccaaaaactacggggccaacgactggcacgacgacatcaaggcgatcttaaaggaggcgggcggaatgaacaagcacaccacgttcctgattaccgagaaccagatcaagatggagctattcctccaggacattgactgcctgctgaaccagggcgaggtgcccaacatcttccctatcgacgagaagcaggaggtcctggaaatggtgcgcctggctgcccagggaggcaatcgcaacatcgacgtctccgccctgcaggtcttctccttcttcgtggaccgctgcaagcagaaactgcacatgatcctcagtttctcgcccatcggagatgctctcagaacacgggtgcgcctttatccctcgctggttaactgctgcaccatcgactggtacgacagctggcccgaagaggccctgcagatgattgccaagatgtcgctggttgatgtcaacgtgcccagtgaggacatcaagctggccatcatggacacctgccagtacttccatacgacggctgcacggtctacgcgggccttctgtcagatgacgggtcgccacatctaccagactaacgcctctttcattgagctgatacgctccttccagacactcatcgagcgcaagcagagtgaaaccatgttggccaagatgcgctacattggaggtttggatacactggcccaggcagccgccgccatctccatcatgcaaagggatcttaatgcgctgcaacccaagctggtggccctggccgaatcatcccggaagatgatgctggagatcaacaaggagacgctagccgccagcgctgccgccgagcaggtgaagcgagacgaagaagtggcttccgtgcaggccgaggctgctcaggttctgaagcaggactgcgaacgagatctggccaaagccattcccgtcctggaagatgccctggctgcattgaacactcttaagccggcggacatcacactggtcaagtcgatgaagaatccgccgcccgtgatcaagctagtgatggccgcggtctgtgtgatcaagggaattccacccgagcgcattccggatccagcctctgggaaaatggtccaagactactggggaccgagtaagcgccttctgggcgaaatgaacttccttccgggcctcaaggagttcgacaaggacaatattccgacagaaatcgttaagcgtatccacaaggagttcatccccaacaaggacttcgatccaaaggtggtggccaaggcctcaagtgccgccaagggtctgtgccagtggatcattgccatgatgatgtacgacgaggtggccaaggtggtggctcccaaaaaggccaagctggccggggccgagaaggagtacgcggacactatggagttcctggcccaaaagcgggcgttggccttggctctggaggaaaaggtggccctgctgaacatcgaactggacaaggccaacgcagagatgcaaaagacagaggagcacgcagagagctgtcgcaacaagttgctccgggcggaggctctcatcggtggattgggtggggaaaagtcacgatggaacaaggctgcggaggatctgcaggagttgtacgaccatctgcctggcgatgtgctcatctcctgcgggattattgcctacctctccgccgtgaatctgcagtaccgatccgagtgtgttaaggattggttcaagaaggtcacggacctaaagattccctgctcctcccattactccatcacggatgtgctcggattggaggtgaccatacagaactggcagctggacggactgcccaacgacgagttctccagcgaaaacgccatcatctcggccaactccagtcgatacagcttgtttatcgatccgcaggcacaggctaacaactggctgaagaacatggagcgcaagaaccggctgaactgcgtcaagttcaaccagagcaactacatgaaggtgatcgcagaggcgctggagtacggaacacccgtgataatagagaacgtgcaggaggagctggaggtgccgctcgatcccatcctgatgcgccagaccttcgttcagggcgggatcaagcacatcagcttgggtgagtctgtggtgccggttaatccgaacttccgcctgtacatgacctgcaatctgcgcaatccgcacttcctgccggagacctttaacaaggtgaccgtcatcaactttgctctcacccagaatgcgctgatggatcagctcctcagcattgtgatccttgccgactccaagggcctgtccaaggacattgtcgaaaagcaggaagcagccaaggagacggtggctaagatagaggccttccggctgaactacaagcccgtggcagtccactcatccattctctattactcgatcacggatcttcccaacattgatcccatgtaccagttctcactcaactggtacattaatctctacatgtactccattgagacggccaacaagtccaaggatctgccgcggcgcatcaagttcctggtggatggcttcactcggaatctctacaacaacgtatgccgatccattttcgagaaggacaagctgctctactcctttatcctcactgcccgcatcctgctgggcacgggtcaggtggaaatgcggcactttgcccacctggtcaccaatgcgaaggagtccacgaacatacctccgaaccccgatcctacctggataacggagaccgtgtggctcaatgtgctccgtctggaggagctcaaggagctccgtggcatcgtggatcacttcaagagccatctgcatgcctggcaggcgatctacgaccactcctccccggagaagcaaccattgccgccaccttggcaggataagaccaccgccttcgagaagatcattgtgttgaaggccctgcgtcccgactctgttttcctggcggtgcggctcttcatcgccgagagcatcggcgatcagtatgtgactccgccggagtttgacatatccaagtcgtatgctgactccaccgctctgacgccgctggtgttcatcctctcacccggagccgacccactgggctccctgctggctttcgctgagaagatgggccaggaggagaccttccagagcatttcgctgggccagggccagggtccgattgccacggctctgatcaagaatgctcaggagatgggctactgggtgtgcctgcagaactgccacttagccgcttcctggatgccctacctggaatatctctgggagaacatggacacattcaacaccacgcccaacttccgcatctggctaaccgcctatccaacgccacagttcccggtgaccatcctgcagaacggcgtcaaaatgaccaacgaaccgccaaccggactcaaggagaatctgatgcgctcctacaactcggagcccattaacgactacgagttctacacgggctgtgccaaacaggatcgcgcattcacacggctgctctacggcatttgcttcttccatgctgttgtccaggagcggcgcaagtacggtccactgggttggaacatagcctacggattcaacgagtccgatctgcagatctcggtgctgcagctgagcgcggtcaccgacaatcgctataggtttgccagcgacgatcgctacatcctgccccgaaagacggagcaccgcgagatcctgcggtatctggacgagaaccttccttcgctggcgccacccgaggtctacggcctgcatgccaactccggcataacaagggatctgcagacgaccaagacgctgctcgactcgatgatccttttactgggcagcgaggcagcgggatccgccggcgcaggagttagtgtggagcaggtaatcctggatacaatcaagcaaatcgagcgcgaaatgccggctgatatggacatcgaggcagcggcagagaagtacccagtagactacaatgagtccatgaacacagtggtggtgcaggagatggaacgctttctcaagttgcagaaggagatccgtaccacctgtcgagatttggctatgggaatcaagggcatcatcgtgatgactccagacctggagaacgtaatgacggctatgaaattcaaccgcatcccgaccaagtggatgtccaagtcgtacccctgcctgaagccacttggctcctacgtccaggatctgtacaagcgcctcaactggctccacgactggcatcaccacggcaagccaccaaccttctggctgtctggattcttcttcacgcaggccttcctcacgggcgccatgcagaactttgcccgaaagtacaagatccccatcgacacgctgacctttgactacgatgtgctcaaggtggagacaaagacttcgcctccggacgacggggtgtactgcaacggactgtacctggagggcgcccgctgggagtggcgagagaacacgctagtagagcagttccccaaggtgctcatctatgccatgcccgtgatctttttccgacctgtcgggctcgtcgatgtcgtcgagggctcccgctaccgctgcccgctctacaagaccgcggagcgcaagggaacgctgtccacgacaggtcactccacaaactacgtggtccctctgctgttgaacacgcatgttaaggcatcccactgggtcaagcggagcgtggctctcatctgccagaccagcgactga

SEQ ID NO: 17781 - protein, 3868 aa, DROSOPHILA
MYTKKLERMHRPASDITKYDNEPYMKNPLLKFRISEVHERRHYQFLKQKAADVKVRVARQQWQPEPDMRLLPQSHYEDNLRREVRKIVVPPMLRRTEAKILSFASERLKNKYPELVQAYMHDVHEEFNRLMKVYSMKNILRHPEFSDEDPAQFELPRPDIGFRRPGRTQNYSNFLENRRRIAQKLLILQLPLRAILNISVGELPKLACIFNYVLATGAMQQQLGLGGREALSYKFYHKYIQNQLDKVNTFLRWTWYPKIVQVLRKLMRKRVMPMSTWKRSWNAMEALMNREMTNMKIRTFEEMYRMCSHPRTMPMMRMSLEWSEFSSDLDTRPNAWSILRTFAEIATEISMVGYRMEPLQPQVQTLTSMAAYAKVNDYLKIEMNDNFLKDVIDKVQNIILRTYQEVIQYVEGFRDKYYALYSWQERDALNQFLSEPHEFEEYFARIDMYYGFIQMLRSEPATEYFVMAVIHNEPAIFGLRTLAENLIHEITTIIIREHIKAEVDICDEFEKIKYRALEIPKSTEELLESAEYMIHVKKDKIAELTDRIQYCLQVGTNIVELTEMSKYHFDLTIKTINWIKDINDICDYNASQQEQFKFTFEEHLQEVIKKLNSDIDELLPKLTVIDDMSRPDKFRDSYIILQNFIDQLKTFDDYVAWINKEEKLFKVALTEYPKLDIIKTFVYPFAELMKCCIEWQRYLSVWNDGPFEYLEPQFVERTTDDYLKEFQKNQKYYRVKIKQDLIDNPVCKFKGQTEDPDPAKHPVPLRLCTSMIQSIKDFTTGVFIVNTMCNPALRKRHWKEMSEIAGFDVTPDAGTTLRKILNSGLDPILDQFEIISIGANKELQLWNALQAMIKEWETRVFPYGPYKETGVQILSSLDDIQALLDDHILKTLVMRGSAFMKPCEEEVRAWYEKIMRVNETLDQWGKVQANYLYLLPIFSSKDIVAQMPEEGRLFVIVEQTYTRNMGLVLRQPLVMETAPVSGLLESLQKANELLEDIATGVSNYLEKKRLYFPRFFFLANDEMLEILSETKDPLRVLPHLSKCFEGINSLEFDAAKNVLAMISSDKETIEFIEQVSTAAAGGSVEKWLIGVEDEMLKAVRYQNELSFAHYPKVKRHEWVLEWPQMTVLAISQVYWASRVHGCLRRTFGGNMTIMMNFFQELSKELNDIVTLVRSPKISNLNRITIKSLIVIDVHAKDVSEDLIKNKVSSEFDFQWLAQMRYYWEDDKTWVRIINATVPFANEYLGNSDRLVITPLTDRCYRTLVGAYQLHLNGAPEGPAGTGKTETTKDLAKALAVQCKVFNCSDGLDYKAMGKFFKGLASCGAWACFDEFNRIELEVLSVVAQQILLIIQAVRSNATKFMFEGTELTLNPACYVCITMNPGYAGRSELPDNLKVLFRSVAMMVPDYAMIGEISLYSYGFVDARKLAVKIVTTYRLCSEQLSSQNHYDYGMRAVKTVLSACGNIKKQYPDEVEDILLLRSLIDVNLPKFLSFDVPLFEGIISDIFPGIKLPHIDYSLVESEFKRVCLEEVLEPAPSFLLKVIQTYEMIIVRHGFMLVGEPLAGKSKTLQVLAKVLSALKIKAPQKSNYFQHVQMGIMNPKSITMNQLYGSFDPISYEWTDGLVAKIFRDFAMTPTPDRKWVIFDGPVDAVWIENMNTVLDDNKKLCLTSGEVITMSNEMSMVFEVMDLAQASPATVSRCGMIYMEPSTLGWRAFAKSWLKKADPRWADEEGVPYVMALMQWLLPPCQTFVRRFCSQFIKPGEFNCMLTTFDLFDMQIAEAIEENPEDYQKYLQTYFQAAILFALIWGVGGVLDTASREKFDVFLKKVWLWDTDPPPPEPLGKMEITPPTEGLLVDYVFLYKQRGAWRYWPDLAKRMDVEETKTGVIVPTVDTARYIHLLKMHVEHKKRMLLVGPTGTGKTVYVQNYLMNKLDKEVFETGFITFTVMISANQCQDLLISKLQKWKRGIYGPPKGMQSVLFVDDMNMPVKEVYGAQPPLELLRQFFDYGHVYDLKDSSKVYIHNVLIMAACGLPGGSRQDVYARFLNHFNVYSINTFSDDSMFRIFLNVALNGFRRAGHGQDVFVVTNQIVSATQSIYKSVQSEIRATPSKSHYIFNLRDISRVVTGCTLVRKESVSDKKIFVRVWYHEAMRVFYDRLVDDVDRKWMFDKLNECLKANFKDKVETVFERYCVQGPDEAVFTMEAASNILFGVYFDEDSVPDERRYEEVPSVEVFLNLALTSLDDYNSTRRNKMDITLFTFALQHLNRICRIISIQGASALIIGLGGSGRQSLTKLATNMVQTSFFQPEITKNYGANDWHDDIKAILKEAGGMNKHTTFLITENQIKMELFLQDIDCLLNQGEVPNIFPIDEKQEVLEMVRLAAQGGNRNIDVSALQVFSFFVDRCKQKLHMILSFSPIGDALRTRVRLYPSLVNCCTIDWYDSWPEEALQMIAKMSLVDVNVPSEDIKLAIMDTCQYFHTTAARSTRAFCQMTGRHIYQTNASFIELIRSFQTLIERKQSETMLAKMRYIGGLDTLAQAAAAISIMQRDLNALQPKLVALAESSRKMMLEINKETLAASAAAEQVKRDEEVASVQAEAAQVLKQDCERDLAKAIPVLEDALAALNTLKPADITLVKSMKNPPPVIKLVMAAVCVIKGIPPERIPDPASGKMVQDYWGPSKRLLGEMNFLPGLKEFDKDNIPTEIVKRIHKEFIPNKDFDPKVVAKASSAAKGLCQWIIAMMMYDEVAKVVAPKKAKLAGAEKEYADTMEFLAQKRALALALEEKVALLNIELDKANAEMQKTEEHAESCRNKLLRAEALIGGLGGEKSRWNKAAEDLQELYDHLPGDVLISCGIIAYLSAVNLQYRSECVKDWFKKVTDLKIPCSSHYSITDVLGLEVTIQNWQLDGLPNDEFSSENAIISANSSRYSLFIDPQAQANNWLKNMERKNRLNCVKFNQSNYMKVIAEALEYGTPVIIENVQEELEVPLDPILMRQTFVQGGIKHISLGESVVPVNPNFRLYMTCNLRNPHFLPETFNKVTVINFALTQNALMDQLLSIVILADSKGLSKDIVEKQEAAKETVAKIEAFRLNYKPVAVHSSILYYSITDLPNIDPMYQFSLNWYINLYMYSIETANKSKDLPRRIKFLVDGFTRNLYNNVCRSIFEKDKLLYSFILTARILLGTGQVEMRHFAHLVTNAKESTNIPPNPDPTWITETVWLNVLRLEELKELRGIVDHFKSHLHAWQAIYDHSSPEKQPLPPPWQDKTTAFEKIIVLKALRPDSVFLAVRLFIAESIGDQYVTPPEFDISKSYADSTALTPLVFILSPGADPLGSLLAFAEKMGQEETFQSISLGQGQGPIATALIKNAQEMGYWVCLQNCHLAASWMPYLEYLWENMDTFNTTPNFRIWLTAYPTPQFPVTILQNGVKMTNEPPTGLKENLMRSYNSEPINDYEFYTGCAKQDRAFTRLLYGICFFHAVVQERRKYGPLGWNIAYGFNESDLQISVLQLSAVTDNRYRFASDDRYILPRKTEHREILRYLDENLPSLAPPEVYGLHANSGITRDLQTTKTLLDSMILLLGSEAAGSAGAGVSVEQVILDTIKQIEREMPADMDIEAAAEKYPVDYNESMNTVVVQEMERFLKLQKEIRTTCRDLAMGIKGIIVMTPDLENVMTAMKFNRIPTKWMSKSYPCLKPLGSYVQDLYKRLNWLHDWHHHGKPPTFWLSGFFFTQAFLTGAMQNFARKYKIPIDTLTFDYDVLKVETKTSPPDDGVYCNGLYLEGARWEWRENTLVEQFPKVLIYAMPVIFFRPVGLVDVVEGSRYRCPLYKTAERKGTLSTTGHSTNYVVPLLLNTHVKASHWVKRSVALICQTSD

SEQ ID NO: 17782 - DNA, 9594 bp, DROSOPHILA
cagacctttaaaatacgaagtaaatcgactttaaagcatttctcacatcgtaaacaacatattcgtctttgaagcccacgcagacagcatggcccacccagcacagtgtcctgggcacatcgctgagctcgatgatcaattccagggaattaagcttgtcctccttccaaaagaagaacacaagacgccgccggatagcgcagcacacccgtatgacggtggccacacgtccggttgtggacttcggcgtgtccacgtccatggtgaacagggtgcatcccttcgtgtcgggcgcactgtgcatgaaagcgaagttgctctcaatccgccgaatgtcgcacacctgcacctgtaagtcggtgagtacgaagagcaggttctccgaggcaatcacttccatttgggtgatcggtttccggctgaagttcttgttgaacatccgcatgtccacgcccgtctcctcgtccacagagtacatgatcagctgtccgctgcgggtgcccaagatgacatggttgcctgaaaaaatgcgtccggtgagtaatagctgtgcaccgaaaattccactcaccatatgccgcaattgactctatctgcacgccctgtttcaggatcgagtgaacactgtaggcctggtgcatcttggccaagtggaaaaacttcggtctcctccgcctcaatttattttcgtaaaaaagcttataaacaaaccagatgggagtaccactaatgatagctgatgatgatagatatcgatagctttagcggtggtaaatcgatttcttcctcttatggtgatagcgaaataacttaaatatacaaagtagaaaataaaatttgtacatgttataatttaagattcaatcgctaatgactaaaaagttgagtgaaattttaaattacgatactttaaacgaatgctgccagactctgcattgctgtcgatagcaccagttcgatatactggttccccgcgaaaccgtccacctctagtccttttcactttagcgaggcgaaattgtcacatttacatttgacaaaattgtaagttttgaaacaactctgtcgctttatttcgggttgaatgttttcattgcattactacccacccagtgaagtcgttgagtaacagttttaccccgttcccgctccagggtcgccaacaagcccgcagacagcaacaacatcgaaagtagctgcacagcaacaacagcaaacagccaaaatgcccaagaataaaggaaaaggaggcaagaatcgtcgtcgtggtaagaacgagaacgagttcgagaagcgtgagctgatcttcaaggaggaccaacaggagtacgcgcaggtgaccaagatgctgggcaacggtcgtctggaggcaatgtgctttgatggcgtcaaacgcctgtgtcacattcgggggaaacttcgcaagaaggtgagtgctgctctgactacgctctttgtttcgcctgtgctctcttcgcttgcgttgagtgggtgcccctctctaaggtggctctcttaagccattttggcattgattgccagcgaatgctacgtatttacgttattgtttttgttgaaatgcaggcagtttttgtgattttgggggattttgcattaccctgctaactttcgacctttctatacctaattttcaactctctttttctgcaattctcttttactggtccattattgagtgggtgtcatcgtccttgtgcgaatgcattaacaaaagagcagtgggcggtgtggacggggcggctgattaataatacgcaagtgcctatgcactgatgtatgtatgtagatgaaagcaaagcaatagcactgcaaatacagggtgaccgccgatacttaattctttcaaataattcgatttgaaatgtaaaaaggcgtaatacttaaaataagtactattctgtcgaggttatagtcaatttcactttactgtctacttaaaaccatatgaaatttaattttattgatacaatatatatcattttaaacaatagaagtatgatatatcatataagtatatatatatatatcataagaagtatgatatatatagtcagttttcacttcagcgattctgaaactaagctagtgaaaaagttttgctacgcactttttttttcaattttttcatggtagtacaccttacgcaaaattttgcgtatatcttttgcatttgaattagctattcagttacatgttttcaattgcgaatacagcctcctttatagcactaatttgggtggtcaaactgcattccatgaaataccatacgtccgcaatggtagttcctccttatcacctacctgagttagccctggtcgtggtcacggtcgtccatatagagattagatcgtttcttccgaagggaatgagcacatgtcaaattttggattgtgcttcacgccgcaggagacgggcgtcataaataagattccatccaaatcgactgcgtcaagattcgcggcgtaattagtgacgtcttcgatttctagtaggtgtcaagtaaatatacaataccagaagtggactccaatcggagcgaacaaatcagacatgaagttataaaggaaactacgcaaccaaaaagattccagactcttgaaaatcatgtcatacgttaattgccaatcattggcactgtaaatgcaagtaaacagatcgaaatagaagttcactagctagcgatatttcttcaattgaaattccaatgaattcttcgggtattagatcttgaactttttatctttataagcgccataaattagaacagaacctgtcagattattggacattgattaacaaagtaaatcacctgctgcaccactgcaactattcaatgccattagtaaaaaggattttctacatttacatgcaattccaaacgaagctggtgaaagaacttcaaagattcatagcacgtgctgtgccataaaatgaacctcatgcaacatcctgacttggcaattattctttgaccgcacttggtcaaggggtttggggcatttatctaatctactgttaaaagtcgtgtccgaaaaaacggaaacccaattataatttgcaagcaagtgcgacgcagttttatgttttttagtttgcgccatgatctccataaatggatttataatctcacctaatcttaaagtgatatgttacgtaatggccgtaaagtaggggattcgtttggtgcatgtggctgagacgccattgaattaacaacgaatttattcgcgcttgcacttctgtgattagatttttgaacccaaacttatgtacacgtatgttggtgttgaatacgcttttcattgcaactgagatttttgcattactaatttggcaaataaaaactcagcgattataaataatccttcacacaaataaccaaataattaattttctttatttcttatctattttattgaaaatgccctataattgatctgatagtacaataacatttgaataccgtgtgatgggcttgtggggagtgcttcacaatttctaggccatctgtcaagttgaatagatatggataattcctggaaattggaagtgcggaattacagctgaccggtagccaattactcagtttctgggggctcaaagtgcagcagttggacagacgactcaaggttcaacgagctctcgatcctcagatgtctgggcccaaaaacaagggcagtaattttcgtacacactgtcccaaaaaagtctgtcaatcatccagcagtcagctgatggtggcaatttagcgctttctacgtgctcccagctaatctagtcacactgatcccaatctgacagtcgtaacatgctcccgatgcccctttaatttggccagacgttgctcgggagcatgactaatgcgtggaaaggcgccaagtgaattgtgctttcgtaccccaacaactccgcctgctccccgcccagcaacagaatgggattatatcgcgaattcttatctggccgaccgactgcccgcgcctcagcttatttcacaatctatttcgactgggccaaatttgaaggagctctctggtggctctatacgcacttttctaattcaatctgcgcaattggatttaaatccaaactaaagatccggtgtgcgatctattttggttcttgtttgttgagctaatttggttagaaaagcaagatagttatcttacgcaataactgcggagtaaaataggtcacatttattctattttaactcatcctacttggctagataagctaaaaataagaagacagttgagatctttgttctatttaagtattcacaattttattcatgttttttttttggtagcttagtctaagtcttaaattactagaatcgtggcagtatataattctatatttgttcatcttattttcctagtgagattgtctagagaatctacatttttctttgggtttttcaatcttttgtgtctttttttttgtatatttcgtttttcgatatcttcacattcgagcgctaatttgtgggcgaatctgcctaagttgtatagtatctttccgatgatcattattacatgatcttacataatgtgggtggccgtgctgatgacctggttgatccactccgtgaaggcggagacgcgaacaaagaccgagggcgcgttcttctggccgcatggcatcttgccccaggacacaatgccgatgacaatgttggcctgctcgaagtgctcctcgcagcactgctgaatcaatggtccgccggagtcggcggtgcagatgctaacgcctcctgtcagcgggccagtgcacagattggtctcgtgcaatgggagtccggagcgggcgagaatctgttcgcataactccatgtccagtatgggcatgttggcctcctgcaggcggtgcggataattgggtaccgcagtcatcgagacattgccccagccgtacaaagttccatatccctccggctgggcatcctgctccggcagcgttgctggctggacataggtgtcaaagaccaggggctccttggtgtaaattagcgcgatgtcgtagggattcactccgccgagatagagctcgtgtcgcacgtagtagtcgatgtgtcgcatttgaatgttgctcgcctcgcccttctgatcgtgaatatcgtggctgcccgccacaatgaccgagttctccaccgcctgcggtgagctgaggcagtgggccgccgtcaggatccagtgctcgttgatgatggtgccggcacagtagtggaccagtccctgatcgggtgtcatcatctggatgctgaccacatacggcgccgaatggggagtcgcctcccgcttggccaggaactttttcgtccagtgcgtttgtcgcggtgcttccagagtgctaatccgattctccagcagcccgtaggccgccaaattcatggccattgtgtgggctgctcccgcagatctgccaccgccgcacttgcgcacagtgggcagctgtatggagccggaggatgcagagcttagtaccaccataatactggctatggtggacagcagcaccgagtagatgcatcggtaggataagagcatgatgtcctcgctctggttgcacgcgccgcacgaatttgtcgaatagtagaaggtaattttgacggttttggggttcttggttgtggaggcgcgactcgtttggggattcgatgtcgcgactactttagcttttcgcccttgttctggcgtatcgatagcacttcacttgtattccgtttcgctttggcatggaattcactttattcggcccgattttgccgtgttcgtattgttcagttgtctcttgcttgctgccaattttggatttgcccgtcgccagcgagtgtgggctgtatttatagggagagccgctctggagagagtgttccttgccaaatcgtaattggtggctccttatcgctaagaaagcgcgagcgagttttgcccccccatatatggtagacccctatcagtgacgagttgagatagcagagtgcgagtgccaatggtatgtctaaggtactttggggatcgggcttgtcttgccctggaatgccctacgtggaggagtcccaatctacacattgctatgtaaaacaagtgtgtacttagcacccagaatagcagagttctaaaggtttcaatttcaatcgaagtaattgagaagtggtttaaatttataacaataactaagtaatctaagttagcttgctaaccagtgtagttatgtttatgacacatagaattatcccgaattaatggttatacccataaaagtattatcgctgattttattgatgggagttttgttaaatggaaagctcacaatgaatcgaagttaagttagtgttttgctaatattgtgttttttccttttgtagaaagctttctgtgtagccaaagccaaagtagccaaacatattacatttcgcactgagcatacataccagtgcaaactggctacgcaatctctggagttcaatgatgtctatgtctatatatagggtatcgagacctgctgccttgaatgccattccactgacggatcacacatactcgctaacttactcattggcggcacactgccgtgcaatcagtggagaaattgggtgcttcccggccagctgtttcgcgaatgggcccatccaagaatgtggtacgcttatctgctggaaatcgtaatagggcaatttcgattcaatttagtcacgattcttcgcttttggcatgatctatcgtgttggtttcccgctggttcccggatagataaccggatggaactacggcgcgatgccatcaattcggttttaattgatgataaatactccaaagttcgtagagggcccgaaaggcttgtttattttcagcacgcatacgtaatgtgggaattatgcgacagtggcttcgattccgtttaattaattataaagcccaccacaggtatcatcgcttatcgaactttacgtggtcaacgggttttcttcgtatatgtgtcatctatgcatggcactggaatttatattgcacccaccttggacgtagagccagtggcaggaagtggttttgggaagtgaatttatgaatgggcattgaatcactcgactagtgcaacttgccctaggtcgttgacttgagtaagtttgtttgagtaagttactaatataaggggggtttttctcattgccaccctagcatttactgcatttccacttcctacttcgccaatcttgtcttgacgtcactgggtgatagatatcacgatctgttgtcaggcctcctgcgtactcgcatccgattagggtaaatgcttgctcaagaggcttgccatttatatggcaggcaggtaccttcttatcgcttcagtaccaaaactgggtttgctcgtgattggatttgagatatctcaatgtgtcttatctcgtcagtagcgaattcctctgttttccatggaattagccagtgcctgttatgcgatccattcagtttgaacccatctatctcctctatgtgagttcttactcgttttcgagggttttttggccggctataatcttagtttatcaatgtttgatggtttgtttcgagtactgattggaatccacgaggaattaattactctccagttcacgtgagctcctccgcttgcacctctgcttgcgaaattctggccaaaaaaaagccaatggtcactttcaatatagaacattcttactaaatatggaactttcctgtttactcagttagcatggcgctgcgttgcgcccatttgtgaaattcccggaatggagtcgctctgcgccatagatcagttatcttttatctattacacggaatacaagctgcaaaattgagtttgccttttcccacagaattactcacaacacaaaagaaacaaagagtcgtggcctttcccaaaaaaaaaagtgcagataacaatgtttatttacggattcccttggtactttcaggtgtggattaaccagggcgacatcatattggtgggcttgcgtgactaccaggactcgaaggctgatgtgatcctcaaatacacaccggacgaggccaggaacctgaagacgtacggcgagttccccgagtcggtgcgcatcaacgagacagtcacattcgtggaggatggcttcgacgaggacatcgagttcggcgatgagatcagctccgaggatgacgccgactccgtggacaacatctgattaacaagaaacaaagtggcgccgggtgggacgacgacgacggcgggagcgtctggaacgtctgtctcggcagcagcaccagcagaagcggaatcagttcgagaatagtagggaatttaatcaattgtaaaaagcagaaagccggtagccccgagtcctgttcgaagtcatagccaacatccaatctaatccaatcctaaacatttatccggcatccacaaagcggcgcagcggcagttaaattgcgaaaccaaacctatagtatcagttcatttatagccatttttaatgttctaatctactctgaaattgttttattccgaaaatccaaattgaaacggtttgatttatggccgccttaaacaacaaattattaattacaaatagtagaactgttacgctgtgcaagaaatggaacattgcgaaacataaactaataatatttgaattaaaaacgaaaaaacaaagaaaaacaaacggatattagttattatttatctaccaacaaatctatccaactaaatgaaaaagtaaaaaaaaaaaataaaaaacataacgatatattaatgaaatctacaactcatacacataaaataggagtttagcgaacactaatatttaaggcaaaaggatatataataataatgatcaaaaggcgagatgtgaggttagctagcgagtaagcaaaatcaaatccatgagttttcgccagatatatctgcgccccatccccccaagtgttccttttcagcgtttcgtgtcatgtcttttgtttttattatacacctgcgttatattttgatggttttccatatagcaatatccaaatcattttccaaacgccccattttcttttttgctgtccatgcattcagttttcccttttcagtttagttgtagtctaattcgaaccaaacaaaaaacaatggatgtgtaaaaagtgatgagactattgatttttgtaatgagttgaactccaataaatggcgttgattaacccgaatgcaaaacagcacacgttccaaggctttttcactttttgatagtaaaattcatgctacaatttattattaaatgcagaaactcgtacataattgtgtgtaagcggaaaaccgccatcgaatttggcatcgtttacagctcctcgtggcgcgaagggaacttcttgagtatggcatggtagagactgtagaaggcgtacaccgaaaccgtgatgatcaccagcagagctccgccgaacgcgatgctcaggaagtttccatcgatgatgcccgccgagcggtggcgcttggtggagaatatctcctccgtggtcgccgggttgttttgctgctgggacgtccgctcggccatcagccgcttcatggtgc

SEQ ID NO: 17783 - DNA, 932 bp, DROSOPHILA
cactttagcgaggcgaaattgtcacatttacatttgacaaaattggtcgccaacaagcccgcagacagcaacaacatcgaaagtagctgcacagcaacaacagcaaacagccaaaatgcccaagaataaaggaaaaggaggcaagaatcgtcgtcgtggtaagaacgagaacgagttcgagaagcgtgagctgatcttcaaggaggaccaacaggagtacgcgcaggtgaccaagatgctgggcaacggtcgtctggaggcaatgtgctttgatggcgtcaaacgcctgtgtcacattcgggggaaacttcgcaagaaggtgtggattaaccagggcgacatcatattggtgggcttgcgtgactaccaggactcgaaggctgatgtgatcctcaaatacacaccggacgaggccaggaacctgaagacgtacggcgagttccccgagtcggtgcgcatcaacgagacagtcacattcgtggaggatggcttcgacgaggacatcgagttcggcgatgagatcagctccgaggatgacgccgactccgtggacaacatctgattaacaagaaacaaagtggcgccgggtgggacgacgacgacggcgggagcgtctggaacgtctgtctcggcagcagcaccagcagaagcggaatcagttcgagaatagtagggaatttaatcaattgtaaaaagcagaaagccggtagccccgagtcctgttcgaagtcatagccaacatccaatctaatccaatcctaaacatttatccggcatccacaaagcggcgcagcggcagttaaattgcgaaaccaaacctatagtatcagttcatttatagccatttttaatgttctaatctactctgaaattgttttattccgaaaatccaaattgaaacggtttgatttatggccgccttaaacaacaaa

SEQ ID NO: 17784 - protein, 148 aa, DROSOPHILA
MPKNKGKGGKNRRRGKNENEFEKRELIFKEDQQEYAQVTKMLGNGRLEAMCFDGVKRLCHIRGKLRKKVWINQGDIILVGLRDYQDSKADVILKYTPDEARNLKTYGEFPESVRINETVTFVEDGFDEDIEFGDEISSEDDADSVDNI

SEQ ID NO: 17785 - DNA, 3753 bp, DROSOPHILA
ggcgcaaacatatagaagccaaatcgaaacatcttaaacttaaagcaaggaacctcccctggctcataaatgctcgctctccacttagtctggagttcaaagctcttctatacaactccgtcttaaaacctatctggacttatggctccgagctgtggggcaacgcatccagaagtaacatagccattattcagcgagcccagtcaagaattctgagaattatcactggagcgccgtggtaccttcggaacgaaaacatacccagagccctaaaaatcaaattagtaatcgaagtaatagctgagaaaaaaacgaagtataacgaaaagctgaccacccatacaaatcccctcgcaagaaaactaatccgagtatgcagtcaaagccggctgcaccgcaacgacctcccagcccagcaataaacttattagggcattaatgaaaaaaaaaaaactatcactaagtgaaagttaattaagttagattaagatttgaacacttattgttagtctcttaacacaaagggaagattcaataaataataaaaattaaaaaaaaaaaaaaaaaaaaaagaaggagagcaaacagtggggctggcgatataactagattggatctaaacttgtcaggaaattgcacaaaagtctcaatggtctgatgaaagcaaaatatttctgcaaaattctacactaattgagtttattagaggacgctacattgtaatagcacaatatttaaacaaaaaatacaaccaacacatccaatttaaatgcaagtactccacaatgcctaaaggttggtgttttcttattgtttatatttttctattcctgtataaaaactgtaaattttgaaaaatatttatccagtgaactgaagtcagttcaacccgagtgaaaaccgaaagatttactgtgtgcgtttcttataaagtcttcagtattaatttccatttttgttatgttgttcatcgaatacagatgtcattggattatacgatttatgtagtggtctcttctttaaattcccaccagtcattttcgtatccctccctcacatggcaaaggaggacatgtcgtcgtttttggcaatagtgcgataagtccagaaccttttgtttaacttcatagatattcttgacagtgatctctcgctccaagcactcggacagcttttctgtggccatttccatgtccttctgattatcctcgaatatgatcttctgattgttgttcatcaaataaaatgcaaacacatagctgtacatcagagtggttcgacattggcataagacatcgacggcatcacgcagaaactgaacctcaatccagctcatctcctcctgcatgtcatccattttggcctgaatattggaatataatttattttccattttcaaactttgcatgtggttgctataacgattgtaatagtgcagatatcgggccattgaagagcgatatttttgctgagccaatctggcctgtttcgcttcctcctcgtcgaagcgattgcaactgtaccaggacgaaccatgtggctcccaggatccaaggcatacccagcagaaatcataacggcaggatggattcttgcataccatatgattgcaaccaccatccttctcgatggtaacattgcacttgggacactccttcgtgttctgggcaatccaattcgatgtctccgagtcctcaagacattttttcacccacttcttgagcgaactgcagctggcgggttcatgccaattttcgccacaagcaaagcaaaactcatgcccacatttgcaaaggactgctcgtggttcagcacaaacggccttgacggcatggctgcaattgggggcggggcaccatcgcatcagcatgttgcattccacaaacgtgttggtgatgagctgctgatatcgctcgacaacctctgaatcatcggcaagtttcagaaaggatatataatccaccaggatctcgcagttggccgctggacatttgatggtattggccaagccctcgctacacgtcttattggccaaatattgtttccagcaggcggcacaaaagttgtgaccacagcccaaacctatgagctcatcgcaagaacaaaagcaaatgccacagagctgaggtatggcacaggatgtagacgccgcagactcgcgttcaatcttcttctcaaagggattcaacacatgggcacgctgaaagaagtccttcggattgctctcgaaataattttcgaacaagctctctttgtcccatttgaagtgatttaggataatacgcgtgacttgcggtggcaaattcaggacattattcacctcatcgatgatgttacgctgatgctgaacaatctggtccaccgaaaggaccttgtacacaaagtcctccgtttcgggactgttggaattttccggcaaaaggatttccgtgcaggtgtcctcgctgtcgctgtcattttcgcaactcatgtgagtgagaagcgaccgatgcgagtcaccgtggtcctcatccgagaattccatttcggaattcatattaccagcatgtggttagaattttttttggaatttataacaccggatctaaaacatttgatgtcttttatgggcctgatggaatagagactcatataaacggtacaaacacgacagcaacaacgttttacagaccacgaatcgtattggaggctattgaacactctcgatgtaaagaattaattttttcttgtgtttttcttcttttttctactgaagactaaacctacttagttagtaattgtcaagatttccctttgcgaaaaagacacacgcaaataaattgtacgatatggcagcatttaaggattgccgttttcgattcaaattatctggtaagtttgtacaaccatgtaagcaccagtgctgtaaaattttgaagtcttgggaccaaccgctattagaatggctacataaactgctttccaccaaaaatatgtctgcaatatttggaaaacgagattcaccagtgttgtgttggtagttaaaaacatataaaaaaatgtttgaaaaattttataagacttatagcaaaaacactgaaagtagaattttatgtgaattttagttgctatgcggctttaggcatcgagcatttttagttttgagttgagagcacatcgaaatgcacttggcctgcgcttttaacgcgttctcacatgcacactaaaagcttttcgggatatatgttttttcataaccctttcgtggcataaaacagaacaaagcaatgtctcaagtggcaagggtaaggcacgtaaataaaaacgaggaataaaatccgggaaaaaaccccatgcacacatatatacgatatgcgaaatgaaagtgaagtgagcgcaggataatggcgaccagagcgggacggaaggccaaaatgagtgagagagagagagagcgatctggagtaagggtaatgagtgtgcataatgcagatgcagatgcaggatccccgtccaggatcccaggagcagaccaatccagcccatctccagcactcattgaacaagcgggctcaatctgccatgccaagatgcacttgggtagtagtacactggaagaaaattgagagtaacatttatttttttttgcaattaaaatattaaatttatcattattcgaaactttgtaagtaaaataattataattaaaataggcgtatttaatgcaaaataaatttgtcactaaaatggttaatatattatgattctaaaata

SEQ ID NO: 17786 - DNA, 1693 bp, DROSOPHILA
tcagtagaaaaaagaagaaaaacacaagaaaaaattaattctttacatcgagagtgttcaatagcctccaatacgattcgtggcccataaaagacatcaaatgttttagatccggtgttataaattccaaaaaaaattctaaccacatgctggtaatatgaattccgaaatggaattctcggatgaggaccacggtgactcgcatcggtcgcttctcactcacatgagttgcgaaaatgacagcgacagcgaggacacctgcacggaaatccttttgccggaaaattccaacagtcccgaaacggaggactttgtgtacaaggtcctttcggtggaccagattgttcagcatcagcgtaacatcatcgatgaggtgaataatgtcctgaatttgccaccgcaagtcacgcgtattatcctaaatcacttcaaatgggacaaagagagcttgttcgaaaattatttcgagagcaatccgaaggacttctttcagcgtgcccatgtgttgaatccctttgagaagaagattgaacgcgagtctgcggcgtctacatcctgtgccatacctcagctctgtggcatttgcttttgttcttgcgatgagctcataggtttgggctgtggtcacaacttttgtgccgcctgctggaaacaatatttggccaataagacgtgtagcgagggcttggccaataccatcaaatgtccagcggccaactgcgagatcctggtggattatatatcctttctgaaacttgccgatgattcagaggttgtcgagcgatatcagcagctcatcaccaacacgtttgtggaatgcaacatgctgatgcgatggtgccccgcccccaattgcagccatgccgtcaaggccgtttgtgctgaaccacgagcagtcctttgcaaatgtgggcatgagttttgctttgcttgtggcgaaaattggcatgaacccgccagctgcagttcgctcaagaagtgggtgaaaaaatgtcttgaggactcggagacatcgaattggattgcccagaacacgaaggagtgtcccaagtgcaatgttaccatcgagaaggatggtggttgcaatcatatggtatgcaagaatccatcctgccgttatgatttctgctgggtatgccttggatcctgggagccacatggttcgtcctggtacagttgcaatcgcttcgacgaggaggaagcgaaacaggccagattggctcagcaaaaatatcgctcttcaatggcccgatatctgcactattacaatcgttatagcaaccacatgcaaagtttgaaaatggaaaataaattatattccaatattcaggccaaaatggatgacatgcaggaggagatgagctggattgaggttcagtttctgcgtgatgccgtcgatgtcttatgccaatgtcgaaccactctgatgtacagctatgtgtttgcattttatttgatgaacaacaatcagaagatcatattcgaggataatcagaaggacatggaaatggccacagaaaagctgtccgagtgcttggagcgagagatcactgtcaagaatatctatgaagttaaacaaaaggttctggacttatcgcactattgccaaaaacgacgacatgtcctcctttgccatgtgagggagggatacgaaaatgactggtgggaatttaaagaagagaccactacataa

SEQ ID NO: 17787 - protein, 511 aa, DROSOPHILA
MNSEMEFSDEDHGDSHRSLLTHMSCENDSDSEDTCTEILLPENSNSPETEDFVYKVLSVDQIVQHQRNIIDEVNNVLNLPPQVTRIILNHFKWDKESLFENYFESNPKDFFQRAHVLNPFEKKIERESAASTSCAIPQLCGICFCSCDELIGLGCGHNFCAACWKQYLANKTCSEGLANTIKCPAANCEILVDYISFLKLADDSEVVERYQQLITNTFVECNMLMRWCPAPNCSHAVKAVCAEPRAVLCKCGHEFCFACGENWHEPASCSSLKKWVKKCLEDSETSNWIAQNTKECPKCNVTIEKDGGCNHMVCKNPSCRYDFCWVCLGSWEPHGSSWYSCNRFDEEEAKQARLAQQKYRSSMARYLHYYNRYSNHMQSLKMENKLYSNIQAKMDDMQEEMSWIEVQFLRDAVDVLCQCRTTLMYSYVFAFYLMNNNQKIIFEDNQKDMEMATEKLSECLEREITVKNIYEVKQKVLDLSHYCQKRRHVLLCHVREGYENDWWEFKEETTT

SEQ ID NO: 17788 - DNA, 8802 bp, DROSOPHILA
gactgataacacacaaaaagaacacgcgtctattgtacaaaaaagagaaatcgatacgaagaaacaatttatttacctattagtgagagattattaatggaaactatcagcggaaacaattcccagccccaaaaactactaaaggaaactgtagcgaacattttactgtattgctgtaaataatcatgaaacattgggcaaaggacagagttagaaaccattgcggccgaaacaatacactgaatacaaccgaattgaagaacttgcgagttcaaaaactagctaaagaaaacacaacacgaatattatatttctattaactaggcgaatgcaaagcatcttggagcattgaacattgaatttgaattccaaatcgaaactgacttagccacaataaaatgcgcatagcatatgaatgtacgttgagcgtaatgttgagtttgaaatatatattttatggtgtttggccaaaaacacgaaaataattagaactcaaggcgaggactcgaaatgcaaaattgcaacttgaaagcggaggtgcaaagaacacactttgtaaatgaagagcataatttaatttatatttattcatgtatgataaccgtaaaacacacaaattatacaatatgcatacagaataaactaaactaaccaaaatcccgcgtcttcttctttttaatcaacacgtatctggacctaacttcccggggatttcccttctggacgtgtcctttggaaagataaaagaggaaagcttaaagatcgctgtaaggtgcttgcaccgattgagaaggctcaatgcaaccgtttttatagatgatgcatcctatggcctgcgaaaatatttaagttgtgcattttattgtttgattatagtaaatgactttttaaaaagtaacgttaaataccatttccaatgattggtatttctacaaactgaaatggtatataacgccattttctgccaggtccgaaggaattcttatcgtttgtagcacggtcacactgctcagttatttcaattgtttgtcccgtttgctcgagcacttgttcccaacgtaagtctaaaaagacttattttccgagataataaatcgccgtggctgcgcattatgtaaagtggagtggttccgtgccgatttcgctgcgttggggccgttccaaacatatggaatctaaacgcagcgtatttcactcctgctcgtgtgtgtctgtgtgtgtttatggttgtagtggggcttccgtgtcgcaagtggaaaacaaatgaaattgagttctcgctttgagtcatattcgagtgacaaataaagcgcgtcatgcgttgtccattgaattacagtttaatttgattacagtttaatttggtaccgccaagacatgtacgtccaaccaccgatcgatctgtgagggcctcaaatatagacatggtgtacccgcacaggaatgaagatgcgggagcatctctggcgtgtttgtgtgctaattaattaattgctcatacttgacctggacactaagcagacgctgttgaaatcgacaatacatataacactttgtgctcgcgtagatgaaatgggcgaaaatagtgcgtgcttggttcaagttacgtgagcccctcgcttcgtgtgtgttggtagggagcattcaatgcgcgcgagtgtgtgtgagcagcggtgtggggatgggcacctcctctttgcttgtacctaggtggaatagtttggtacccgtgactttcccaggaaaagagcattttataaagtttccctattcttttgttttgtaaattactgtgaacattgggtgatttattcaaagttgattcaaaataaattactaagtactaaggaaacttacagaataaaatatttctgaaacatctcctcgcgttcggaaatgtaggaagcatgactcaatttgtattcgtgaaatcatgaacccacaatgcagtacccgaggttcaaagaactagtaccctccacagcagtgtttaagcagggtttctctcagtagcgcagttcatttggcttaatttctctttatttacactcggttcgcacagatcaggttttgttcgctgctcgacggggcagctgcattctttctcgctcccaccctgcccctggattcccctgcacctgttcgttctcgaggtgcgagcgagaggccaagaggcagaggtagagcggcacttgccacgcttgacttgcagcaggtctgcaggcgacgcggaaatgccactagaaggtccagctacagccgccgatagacaccagttccagtcccgataaggaagcgatagactgaagtagacagctagctggaaagacagatagcgacggggagagtggatttatttattattcaaattctgaatggaatgacgatgtgatgggctcgtgctcgtgtacgcggcgacactttttgctgtcaatatgcttcctgcaagtggtgagtagaccgcgatccgaatgattacaattcgaaatctacagccgttccccatagataacgattatcgagcgccaggtattcgacttcctcggctacatgtgggcgcctatcctagtgaactttttccacattttgttcatcatattcgggttttacggcgcctaccactttcgcgttaaatacatcatcaccgtaagtgccctgattaccatatctctgcgataaccccattttattttgtgtgcccgcctgcagtatctaatatggaacttcctgtggatcgggtggaataccttcctcatttgcttctacttaaatgtggggcagttgaacagggtgagtttcgtggctccacaatagacatatctcttcttaactagaaggaaatctcttcacaggacagtgacctgctcaacctgggcactggcagcgtctcctggttcgaggcgaatgggtacggttgcaagcccacctataacatggccgcggacgatacgttccgtccccagcggccggagcgcgtggaaggctgcctgctggactacccgctggtggagatcacccactcgggggtacagtgcgctctggcggtgagtgatctactagcttaagttccctgaattgtgtaaattgtctcgcccactcccacagctgctcggcatactcggtgcgattctgattagttgcatatttcttgacgaggacgacagatgtaagtggcgctctctgaatgcgaataagaaacatgctcgcctgtcataaacaccactaaccgggaacggtcattgctaacccctctcatccccataagatctttcactttcgggtctgtgcactgaggtgtatgttttcttttctcacaaaacctaaaataataccctatgtgtaagcaatgtttgtaaagttatcatcgagaatttggccaatggctttatattattctcgattgtataaggctctcgataagaagtctcttgcctccctaccaaaaaacccgcaacctggaatgcgactgtacccccagaaaattatggtttcgatttaaacataaattgtgtcctatattaaccattatgacttgtccatttgaattgtgtgcatctatacacatgccctttaaaacattttactcacataccacataatcgtattgttattcatgttatgtatatgtcatttactcataatcaagaaatcagaaacattgtatttgcatatgggcagcgacactgtgcagctctaaaccatgtaagacgacattgagataggtgctccgaaatgaatataattaattgatatgaaagtatgtaaatgtaaaaatgtagacaaaatgagcaaacaatataaaaacatatttatttacacaaataagaagctaaatcaattactcttgactagttctataattagtaaaaagcttgtgggtgctgcacggtgtcctgctgcctccgatgttttcctctgtttattgttaaagcatcttaatcaatttctggttttcagtcgatttcatgaacggcgacgcgaagagtccacagcataccgtggtgcacccaatgtacgtgagctatacaagtatacccacaacatccgcaagcgccaccatgcaatcaaataagcatctgcaactgcagcaccagcagccgcagcagaactcactgaaactctatcatcatcagcaacaacagcaacccaaactacaccacttcaataagaactaccagttgagcggcagcaacaataatacactgaataataatctccaccagcgtgcgcctgcgctgctgccgccaaacacaacaaataaccgcagcgcatcattccaaactcaaagtcacccttcaaacaaccatgtaactcaacgcacaggcggagaggggagcaactgcagtagtctacgccgccatcgacaacaccattccaaggcactcgtcagccccagtcccatgtcacctcagaccacgccgtcgctttcgtacgcttccctgcaaaactcgagtccctacctagccggaaactcccttagcaacagcaactacagcatattccagagccccgactcgctccagggcagttctcatttcgcccgtattcatcacaagcccaagccgcccaaatctgattatcctgtttctggagaattcaatccgggcgggaatatatcctcgcctgtccgtccgctcgatcgcctgtcgcgcagtctcgaggacgacgaagacaacttttcgctgcagaagttcgctcccggcgaacacggtgtcacctacgtcccttttcaaagtcctactccaaacagcctttttctgggcgagaacaacaactcccagccccacctcgtctttcacaccaactctcggtctagtcccaacaacaatgcttatccctacgaccagagcggtttgccctcttccctccgtatggggtcaaactccaatgcccgacggccgactcacattcctctgcccacggttcccatgcacaactgccaggaggtagaaaatgatgaggacgcagatggcgaatccgagcaagatcacgatcagatgctgacgcctccgcctccgccgttagtgcggcctcacatccatcaacgcttgggtcaggcgccctacctcgatctctctccggaagtggcagagcgctatgcgattcccagcaagcttggacccagccttcccattcaagtgccactccccgtcccacatggttcgcccatggtacgtcgcagtaatcgtcgacctaggccatccaatcccgtgaacttttgcgaccagattcgcgctacacctcctggttatgtggtacgcgcccagagcgacgaccgtctaatggagcaggtcgaggctgatgcagcaccgcacgtgaatcgtcggagcggtcgcggcggtagcggtcaaaagacccgtcctcggtcgttctgcaactcgatagtgggcgtgcagggttagacttaagtacgtcccgctgcacttgctcctctcctctctcttactcacgctttctgcctaggcaggatggctgttactaactctaccaggatcactcgatccctaaacacatacaaaaaatttcatatacataggtgttgctgtttctttgttgtgcctaaccagccggctaacctggctaagaacaggtcctaaccatagcttcccatgcaagcgtttatcgattttaatgataccttgcagagctgactttaattgtgtaaatctaattaataattcagatacgtgcgatcagtagagactttcctcgaattgtgatagaaggcgtggaaagtcgtgacagaatgcaagcctaacaattttatgttgatctgtgataactgaaaacaaatatgaacgacaaacgataatttgaaaaacgaaaatgtcacaaaatcattatcaagaaaaggatatgacaatttgttgagaatacgagcgataaatgaaattttgagccaattgcaaccagatgccttggatgtatgacggaatagagattagaatatacaacatacatatatataccgatgttatgggcgggagagcccagcctccccaagagttgcctttgttgtttaactaataatacatatgaatgtatatttgcccttaataacgaaatgtactacgatgcaaactttagttgtcgaacacaaacaagaagttgcctattccgttaagtgagagattcgttatacaagcgcaagcaaacgtaaaaacgtttagaattacgtatagaaatgttaagcctagtattaagcttgaggccacaaaacgcaagagcagagcagatctaaatccatttagcgtagacactatttactgttttagatagatccctcatatttagccatgcgaattgtgcgtagactggtgccaattctcgaagagattgaacgcgtttccaataaaaatgttcatttacaccatagtacgggtaatctttctctgtctcggaagcttttttcgtagccgatccttctatcttcctaagttgctctcttactggtagttggctttttgtagcaattgtgcctctaaccaaccgctaactattgattctctccgaacgtagctaatccaacttgattaacagctccaatcacaaaagcacactcaaaagcaagccaaggtaactttgagcattgtatccgcggcttaacggtctaaacaatcttccactgatcctatattgttctctccggcgcagtgaagcatattaggaagcagtctaaacaccgccagtcgctgtactccatcgaattcggcagcagtaccgacaccatccggcatggcggccactccttgggactgggcgatcctcggggcgaccaagatggcggcgaactgagtcctaagccgatgacaccacgacgcgtcaagcggcgatcggtcatggcgcgcggcacacaaggaaggcagtcaaatggaggaggctctagcaggcgctcataccacggatcaagcggcaccctgagatccaagcacggacatagtggacgtggaggcggagcagacagcagtagcggaagctatgtgaggagcagcactcgaagctctcgccggaagtatcatcagaatccagtgactaaaatcatcgatcagcagcttcagcaggagcaacctcacctgggttccttccaccgacaggataaactctcgctgactgcctccaacctgcaatcactcaacaatgactttgtgaacaacaccaatgcttccggcagtcaattgggaagtctcggcaaacccaatgagcactactaccacagctaccgcaaaaacattccgctggatcccatttactacaataccaacggtctaggagcgctggaggaaccaccgagccttccaccgccaccacctctgccatctgcagctggagcctcaatcctgcacgcgggcggtggaggccactacaaccccagttaccaacactccacgacgcacctaaacgacgttggtcacgctcccgatgaagtatacaacaatcgaccgccctcggtgcgctccagttactcgaattttcatggctcacggccactctccaccgcttacgggaatgccactggtgagaatgtattcgctggactgaacggagccagcgccagcccaccgcaggctccttgtacgccacccctctaccaacagcatcccatgcaactacagcagcaccaacagcagcagtatcctccaccgccgccaatggatccggcgcctgcttacgtcagcaccatgtcgttctccaaaagaactgcctctcgggaaagcattcgctcaatggcctttctcaacaacggcccgcccgcctacaatctgaattaccacacgccgcccgactcggagacgaccatgtaatttggttcgccctttgtctttaccgtcgcacatggatcttgaactataacacaatcatcatcaagccatcagcccatgcccaacacatattatatcttgtgcaacaagccaaggctaccacttggtgctttaaccacatggatagcatatacttgatcagtaaaataacgatatctgtagtgcttaatttatacgtaagtttctgtcgttttaccaaagtgcctttgtaaataaatacttaaaataatggatcggttatttaaatatcagaaaatattgttaatacttgattgtttatgttcatttatatttcttcttaggtaattggcttatagttttatacctgtagataagtacgtgctgtacttggtatcttagtcccttcgacacactgtaagatgtacgaaaacttaggaaactgcaaaagttggatatttgctccaatacttacattcatctgcatcccagcccggctcgatgtccagttgcttgttgcgctccttcagccacgtgaaaagtggggcaaagtactcaaggataccgcgtccgctcaactttcgttcaccggtggctatctccatgacatcccgccaatgtcgagtggctcccagctgcatcatgtcgcgaatcttttttcctgcttctttgctgtcgtagaaatcgcaattgtgaagtgggaaattgggatcaccgggcttgtactggccacttgccaggcaaaaggaacggtagaactggaatcccaggatctcggccaggaattttctgtgggtcccggggaatatgaaattcatgattatcaaaaacaaattatggaaactgacttggtattggaggtttccggatttagtcctcgatagaacttgaaatccacatcaaagtccttgttaagacgttgtaatggcggctgaactccggcgaatttgtcctggaggccccagtaagcgcagttatagtcctttactccgattcgcccgtccattacgtccacgaggaattt

SEQ ID NO: 17789 - DNA, 3507 bp, DROSOPHILA
tcacactgctcagttatttcaattgtttgtcccgtttgctcgagcacttgttcccaacatcaggttttgttcgctgctcgacggggcagctgcattctttctcgctcccaccctgcccctggattcccctgcacctgttcgttctcgaggtgcgagcgagaggccaagaggcagaggtagagcggcacttgccacgcttgacttgcagcaggtctgcaggcgacgcggaaatgccactagaaggtccagctacagccgccgatagacaccagttccagtcccgataaggaagcgatagactgaagtagacagctagctggaaagacagatagcgacggggagagtggatttatttattattcaaattctgaatggaatgacgatgtgatgggctcgtgctcgtgtacgcggcgacactttttgctgtcaatatgcttcctgcaagtgataacgattatcgagcgccaggtattcgacttcctcggctacatgtgggcgcctatcctagtgaactttttccacattttgttcatcatattcgggttttacggcgcctaccactttcgcgttaaatacatcatcacctatctaatatggaacttcctgtggatcgggtggaataccttcctcatttgcttctacttaaatgtggggcagttgaacagggacagtgacctgctcaacctgggcactggcagcgtctcctggttcgaggcgaatgggtacggttgcaagcccacctataacatggccgcggacgatacgttccgtccccagcggccggagcgcgtggaaggctgcctgctggactacccgctggtggagatcacccactcgggggtacagtgcgctctggcgctgctcggcatactcggtgcgattctgattagttgcatatttcttgacgaggacgacagattcgatttcatgaacggcgacgcgaagagtccacagcataccgtggtgcacccaatgtacgtgagctatacaagtatacccacaacatccgcaagcgccaccatgcaatcaaataagcatctgcaactgcagcaccagcagccgcagcagaactcactgaaactctatcatcatcagcaacaacagcaacccaaactacaccacttcaataagaactaccagttgagcggcagcaacaataatacactgaataataatctccaccagcgtgcgcctgcgctgctgccgccaaacacaacaaataaccgcagcgcatcattccaaactcaaagtcacccttcaaacaaccatgtaactcaacgcacaggcggagaggggagcaactgcagtagtctacgccgccatcgacaacaccattccaaggcactcgtcagccccagtcccatgtcacctcagaccacgccgtcgctttcgtacgcttccctgcaaaactcgagtccctacctagccggaaactcccttagcaacagcaactacagcatattccagagccccgactcgctccagggcagttctcatttcgcccgtattcatcacaagcccaagccgcccaaatctgattatcctgtttctggagaattcaatccgggcgggaatatatcctcgcctgtccgtccgctcgatcgcctgtcgcgcagtctcgaggacgacgaagacaacttttcgctgcagaagttcgctcccggcgaacacggtgtcacctacgtcccttttcaaagtcctactccaaacagcctttttctgggcgagaacaacaactcccagccccacctcgtctttcacaccaactctcggtctagtcccaacaacaatgcttatccctacgaccagagcggtttgccctcttccctccgtatggggtcaaactccaatgcccgacggccgactcacattcctctgcccacggttcccatgcacaactgccaggaggtagaaaatgatgaggacgcagatggcgaatccgagcaagatcacgatcagatgctgacgcctccgcctccgccgttagtgcggcctcacatccatcaacgcttgggtcaggcgccctacctcgatctctctccggaagtggcagagcgctatgcgattcccagcaagcttggacccagccttcccattcaagtgccactccccgtcccacatggttcgcccatggtacgtcgcagtaatcgtcgacctaggccatccaatcccgtgaacttttgcgaccagattcgcgctacacctcctggttatgtggtacgcgcccagagcgacgaccgtctaatggagcaggtcgaggctgatgcagcaccgcacgtgaatcgtcggagcggtcgcggcggtagcggtcaaaagacccgtcctcggtcgttctgcaactcgatagtgggcgtgcaggtgaagcatattaggaagcagtctaaacaccgccagtcgctgtactccatcgaattcggcagcagtaccgacaccatccggcatggcggccactccttgggactgggcgatcctcggggcgaccaagatggcggcgaactgagtcctaagccgatgacaccacgacgcgtcaagcggcgatcggtcatggcgcgcggcacacaaggaaggcagtcaaatggaggaggctctagcaggcgctcataccacggatcaagcggcaccctgagatccaagcacggacatagtggacgtggaggcggagcagacagcagtagcggaagctatgtgaggagcagcactcgaagctctcgccggaagtatcatcagaatccagtgactaaaatcatcgatcagcagcttcagcaggagcaacctcacctgggttccttccaccgacaggataaactctcgctgactgcctccaacctgcaatcactcaacaatgactttgtgaacaacaccaatgcttccggcagtcaattgggaagtctcggcaaacccaatgagcactactaccacagctaccgcaaaaacattccgctggatcccatttactacaataccaacggtctaggagcgctggaggaaccaccgagccttccaccgccaccacctctgccatctgcagctggagcctcaatcctgcacgcgggcggtggaggccactacaaccccagttaccaacactccacgacgcacctaaacgacgttggtcacgctcccgatgaagtatacaacaatcgaccgccctcggtgcgctccagttactcgaattttcatggctcacggccactctccaccgcttacgggaatgccactggtgagaatgtattcgctggactgaacggagccagcgccagcccaccgcaggctccttgtacgccacccctctaccaacagcatcccatgcaactacagcagcaccaacagcagcagtatcctccaccgccgccaatggatccggcgcctgcttacgtcagcaccatgtcgttctccaaaagaactgcctctcgggaaagcattcgctcaatggcctttctcaacaacggcccgcccgcctacaatctgaattaccacacgccgcccgactcggagacgaccatgtaa

SEQ ID NO: 17790 - protein, 1039 aa, DROSOPHILA
MGSCSCTRRHFLLSICFLQVITIIERQVFDFLGYMWAPILVNFFHILFIIFGFYGAYHFRVKYIITYLIWNFLWIGWNTFLICFYLNVGQLNRDSDLLNLGTGSVSWFEANGYGCKPTYNMAADDTFRPQRPERVEGCLLDYPLVEITHSGVQCALALLGILGAILISCIFLDEDDRFDFMNGDAKSPQHTVVHPMYVSYTSIPTTSASATMQSNKHLQLQHQQPQQNSLKLYHHQQQQQPKLHHFNKNYQLSGSNNNTLNNNLHQRAPALLPPNTTNNRSASFQTQSHPSNNHVTQRTGGEGSNCSSLRRHRQHHSKALVSPSPMSPQTTPSLSYASLQNSSPYLAGNSLSNSNYSIFQSPDSLQGSSHFARIHHKPKPPKSDYPVSGEFNPGGNISSPVRPLDRLSRSLEDDEDNFSLQKFAPGEHGVTYVPFQSPTPNSLFLGENNNSQPHLVFHTNSRSSPNNNAYPYDQSGLPSSLRMGSNSNARRPTHIPLPTVPMHNCQEVENDEDADGESEQDHDQMLTPPPPPLVRPHIHQRLGQAPYLDLSPEVAERYAIPSKLGPSLPIQVPLPVPHGSPMVRRSNRRPRPSNPVNFCDQIRATPPGYVVRAQSDDRLMEQVEADAAPHVNRRSGRGGSGQKTRPRSFCNSIVGVQVKHIRKQSKHRQSLYSIEFGSSTDTIRHGGHSLGLGDPRGDQDGGELSPKPMTPRRVKRRSVMARGTQGRQSNGGGSSRRSYHGSSGTLRSKHGHSGRGGGADSSSGSYVRSSTRSSRRKYHQNPVTKIIDQQLQQEQPHLGSFHRQDKLSLTASNLQSLNNDFVNNTNASGSQLGSLGKPNEHYYHSYRKNIPLDPIYYNTNGLGALEEPPSLPPPPPLPSAAGASILHAGGGGHYNPSYQHSTTHLNDVGHAPDEVYNNRPPSVRSSYSNFHGSRPLSTAYGNATGENVFAGLNGASASPPQAPCTPPLYQQHPMQLQQHQQQQYPPPPPMDPAPAYVSTMSFSKRTASRESIRSMAFLNNGPPAYNLNYHTPPDSETTM

SEQ ID NO: 17791 - DNA, 12547 bp, DROSOPHILA
catagagcggctctataaagatctattttccccttactctctgtctctctctctctctctgtctgtttgtagctctctcttttttcccataagatgatttctgaacgcagataattattcttattcttattatatttttgtattaatttgagccaataattttgcctttttccaaaattagttaagcataataatttctattatatttcttattaatttagaaacgtgttcagctcaaagctaaacaaaaacatgtcaaaagaaacggaatttttgttcagtgcaataagatctctgagcggatctattcaacagtccaagttctacgtcgtcatcatgatggtgtaaacacatttgccaaatcacatcacagcccactgttgagccggtcttgtgagagtgcgatagagaggggtcgcccaggccaagacagagagacagagaaagagacaggtggagagagagggaaggctattgcccggcaactgctaattgggatggctaaatgctgcattgcatcctctgccgcgattcctgctgcacttacggtgcatcgtcgtctatcctggcgctgcccacgcacgaagagagaagttcacactcttcccgccttccgccggcggtacagagcaaaaaaaaattttattaatttcggttaattacaaatttgtaccagggacttaagctaacgaatttcagaaccgaaacattcataagcttatgcttaacaacgtaattatataaaataaataaaattgggaatttgctagcatgccaagcatgtgatgtgtaatgtgatccttggtcaagagatttacattctctcttgcttgcccaatgcaaatttctctcagtgtacgggccagctctctccgaccatctcgctctcgttccgccgttttgctttgccagtgactttgctttgctttggcgtagagaatgctataaagcagaccgcagcagtggaatagcagcaagtcgactgctggccgcgtaacagtaaacacaccaacgagcggacgtacacggagcgaaagaagaagttggctaccacgaaagagttattgtttgttagaaacaccaagcgcagcagcagcagcagcagtacaaatattattgtgtgccgtccgaagagaacagctgagccacacgctgttttttaacgctgttccgttctgcggcacttgctgtttgttatccgtatccgtcgtgtttcgtcgtcgtatttgaactctctttttgttactgtgcatatatttttgaaatctctgtgctgcacacagcgcagggggaaaagtgctagaattagcagatcatcaagacatctggctaacctgtgatttccaacacacccgaaggcaaattggcaacaagttaccaccgtaagtctcgtgtcgatcaacaagtgaagatgttagttaagtgtggcaaaagaactgaacaagaatttattgcatttgcaaatatacatatgtactataccgataggaacgcgttttaagaaagtaatcatgcttttaatttacgtgatgtgtgactgttatttgtgattcaatataagaagattaagaagattaataagattttgtgaaattttcaaactatgcccaagacaaatgtagcccactgttttgggggtaggggattttcagaagctttgcttttgagcataaaccgtaattagaaggcattaaaaacgtgtgatttggaaattcgtgaattaaaccttataggatttctctctctctctctctctgtgagagagtgtgagaacccaaattgagtttaagaattagctgaagtttccataataaccactggccaagtgattagttcacatggtgggtggaatccgtctagtccaaaccataatcccctgcccagtctgatctgatcccggaaccaaattgagttttgccaaaggtttcagcatttttcatgtgcatttttttttcatctaaccatcgacggggagcagaaaatgtttaccaaattgaattacacatttttatgatgtgctggtgccttgctcttcccccttcctcaaagccaccgccaccccgccgcctgacaggcctcaggtgctgtcctgaatctggaaatccgtgtgtccgggtgccgaagccggaatggaaggagtccacgttttcgagagcgggaatgcatttatggcgccgccattagggtggaccagtaaattaggttaattgtagaaagtaatcgaaagctttaacagcaccaaattgcatattctgaatcaaggagactgtatttttcccacactgcaagtcacatttcaatatgtaagtgctgcattgaatatgtacatgttcaacttataaatgtgtattctatatatatatatatataggcacataatctataatctgttttgtaatcactactgctttttgcaactttatggtaaaaaatactttgtaaatcctttggtgtgcaccaaaatgagcatgaatgcataagcaaacataagcgcttaattatgaaaacataccgatttaactagagtcctggattataattgaccgattatttgattaaaaggcatccgaggcattcaagagcaaccaaatattgttggccgttgataaccattgctggttgccaaggtttccatagtatttgcaatcggctcagaagtgaaatgctctgtctgaaattccgacttaactccccaccagataacctgttgcatttcgcaatggggtaaacaatggaatcacctgtgcgcccccacattttggccttcatatggaagcacattcgtgcgcattcatctggaaaattgatggtaaatttcgcatttagtttgattctcaattgaatcaacagttctaagcctactgcttacgtgtttgtgcgatgatgatgatgatgtataatggtctatccacctttcgcaaatttgcaatggacaaggaggcggtgcaaaggtctgtacataagtccagaatctcaaggggtgataagcctaaaaaaaaggcagactgttatatgtcagatactcgtagatagttagaggggtttttcaatgaaaaacttagaagtgttattttgccttctgacacttcacaatgaatattcagaaaaaaaaaaatggggaattaacaaagcaatatgattatgatatgatattatatcaatagttttatttatcaacattcaggtgtgcactaatttcttgccgccaaaaacaaagccaatcaataatttatgtagataagcattttgcttataaccatgcattttcattattgaattgtcattttttatcttagttgaacccaactccgcctcctccgcgtagatcgtgtgtcagccacttgtcttgtttgacagcacacccaagtggcattagcatttggggactgaaactggaaccattggccagtttgcccaagagaatttctgggattggttttgggtttctccagtgcaccgcagtgcactcctctcgggccaccacttcagttcacggaaggcaccacttggtgggagtcggcttgaagtacgtgagtttatttggctgagcacaaaaatcagagactcgaacaacacacaagatcgaaaacaaaaaacaaaattaaacaaaaaatataataaaataaaagaagtgaagtgaagagcagggtcgagaggagaggaggggagaagtgcctagaaatggtctgaaatgtgcattaaacgctttgcataggaaagcgacatggacatggtatggggattgcgccggagattgacattcccattcccattcccgttcgtattcctattccattgggctacccactcctatttccatttcccattccctaacccaaatccctactataccattttcacttcgagaatcgcagagaacacacaaaacacacatgtgagaatgtgccgggtgttgggattattttgtggccgggtgaggggccttcaggccttcaggccttcgggcaataacaatcattcgaaatgcgccttaaaatagcaaacaccaaacacgttgctcataatctccgatgcaattgagtgctggcagccagcacatgaatgataactttgtccaggcccgctggagtattaatagccatttctagtccctattgaaagcgagcatgacgcccgctgccatgccaaccagcatccccattgagctcctaaccatggccgaccaaccaacatcgtccgaacctgcagaacaaagccgaaaaaacgtctctaagccacagtccaacttcagttttggttgtcgccaccaggtgtcaatgctttaaattatgttttacatttccaccaaaaaacacatcatcagccaaccaacaacaccatcatttgcacttgttgttggctaattagcggcgagaagttttttctaacacagcaaagcccatccattcacccaaccgtttgttcgagttagcgaagttcaactgtatggcttggtgcccgaaatttttgcccactcctgggatttggtcttatgcattttgcaatttgttttccaccacgaaagtagcaggcgccaaaaactctgggttcggaataaaggccatagattccgtgaaaccaagggggtcttctttattagagtttacgattcgatgcgtttatattaccgaaataaaccctaattggacacattgatgctgcaaaacgcaacacacatttgtgcttttgactttcctcctcccatcgacgttgatctctaaaaaccggttttccagccttatatgcatacaaatcacttcctctaaacaacgattcaacgatttcagcgtcattataccgtcaattaaagagtacgcccctaaaaacgagagtttgacatatttgtacatatgtaaacccgttttgaacgaggaactattttagttaataataggtatgtatataactacagatttctagccaacaaaatgacttccgaaacaaataattaagtaaaaagtattctatagaactctattgttttgatagctagattagtgcgcaggtataaaaaactgaatatttcctctaacacattttctagacactcaacttgaaagcattgtggcattatttgttttcgccttcctcgaatactaaatcatttaataatgttcctcaatcagatcaaagcggaatccgttcttattgtaatcttctgaaaaagaggtaagctcttcgggcaaatatgtatctcattgatagatggatgatatctcccatatagtatagccatccataccagtgggtgattataataattatatttacaacgaagcgttcagttcacaagtccgatgttgcccttttcccttctcaaactttaagtacacctccaaccagattgtacatatgtacatacatatatgtacatacatatatgtttgttctcttatttgatcagctgaatgttgggcgttctcttacttttctcattagcagcgaatcaattacgcgcgtatcgctgggtgtttaatcaattctcattgacacaatttaattgaagcgtttgcttgtgaaataaaacgatctgagcgccaattcgttgacgcctctcgttgcgcatacccatgtattcactatatgttgtgaatgaatatactcatatactcatatgttgtatatatacgattcgattccgtttattacacacaaagcaaaccgattaatctcaattaggggccaattggctgagcgaaaatgctggagaaaacttccgttgcgtgtgtaaacactgggagaaaatcttgtacgttagaactgaagaagtgatcgtaataatataatataatataataataataataataataatagcataatatgataacgtatttatattattattgtatataattaaattattttatgtgtgaataattgttaacacaattgatatgtctttctctgagtgtatcaatgggaagcttgtttgatagttgttcgcccattagctgcacctgttctacacgcttgctccttgtattctttttttgtcatctgtgtgcctgagtgggcatgtcgtgaactcgagaaagtacaagtgtttccagcactttgttctctggctccacttcgtcccgcccagagataaccggcgatcggcctaatcaatagtgccgcgccatcggggccctctatctatatatttatctttctatctttccgagcgtatgactcatcacaggcccgaccgtttgccattccgggtgcgataaggcctagaatttggtagacccgttaattggtgcacagagaaaaaaaaatgatgtcattggtaagccgcattccttgatacacagtatcaagctgctcttcactccgaagccttgctcattttgagattggcttttcaagagcaattctttgaagattcatctttgattccacattacatcatggcggaatcgaaatcttcgaaaaacaccatttaccgatgcggacttgaaaagaagataatttgggatttggaactgcgttttttttttttggctttagtcttccaatttttgcgttatcttatctcataagtgacatgatcgtataaccaccaatattccagtttgcatgcaagtttctagacagacagattcgcgatatatatgtacatatatagcacgtgctttttggctgtattcgattctattatctggccattgcgaaaagaatttgccaatccttgggcgcattcggttcctttgtccgatcgcttggggaacactccggctttccattcgtggtggcccgtcttatcgtttataaaagataacaccattcgacggcaataagcccagcgaatcccttgtttattgacttcttattcaccgggccccggtcattaaaatgcaaaattataggcggcacacaagcgtcttatcgatgaacgggttatccaaaaataggtttcaaccatccagacaaattgcgatttgtattttattgcatgttggcaaatcgaaatgtgcgcgaattaaaaagaaaaaaattaaataataaaaaaaaacataattgtgaaataaccaattgtcaccaactaacccaaccaaacaacagccagcacttaccaacattatctcagcagctatttgtatttgttttttttttttcacaaaaaattgttgcccatgcggcatgacggcgcaaaatacattgtcatttataagaaaacatcaacgacaaattgcggaaaccactcggcaaatgccccaccgtaacccgaagccccaaagaccggaatatggtggatcgatcgatggagattgggcgatctctcgaacgctccaacttgctcgatattccgacgactcagagagaaagtatcgccacttaatgctctcacgatagcgtagagccatattgaatatgtggaatgtcatgcgatgagtttgcaagtacagtgtagcaaactagtcgagtgtgtttgtttttaatcacttctagtcgataatgttaataatgtagtggcataattttaatgttatcgcattggaagtgttgtagttcatggaaaagacttcagttttatcgaaaaggtgtctaaaagtaggctacaacatcttacaataggcgtactacttaaccaagtaaaaatgttagaagttagaagaatacttatgccaccacatggtaaccaaattatttgtttaaatacataattcctttaaactttctttagaaactgcattgctaatacattaacttccgtagaaatgttaacacaatcaattcctcttaacttttgtatattcattaactcatcctgtgcagatggccagactctcatccagcttttctcagttgatcgatggcttggaacttagagtctgctaagtgccatcgtcgggggttttgtacttctggttctaccccttctgccctcgatcccagactgactgcgtcagcgggcgggcgtcaatttatggcacgcttcgatgaagttccatggatgatgatgatgatgatgatgatgggatggagcgttgatgatgggacggggcttccggggaagcactgtctgaatgaagacatatccccagtgcaccagctgtactcgttcccgcattatcgatgcataaataaacgagatgccgaggttgtgcgatgccacacgatccacgatacgcgatccgcgatccgtcgagctatgcttttatttttaaaacttgtcctttgattatcgcaagaaccgaacgatgacaacacgttggtgtctcgcattgccgcattttgatggtccggtctggcggctttcgcactctgctccaatctcccaatcaaagcacacacacccgctaagtgatttcccttcaagatcaccaaattgcatcagtttttttttagcggtacaggcagagcgtgccttgcataaccaagctccgtgcgctgtgtgtcgcacccatgataaaggcaaatcaaaaaaaaaaaaacaaaaaaaagaaaaaatagaactatctatacgatggagccactcgatcgagtggtctatcgaccccaccccgttcataaatgcctatgactgtcatataaaaatgactccagcaattccagctatctgctgcgatcccaattagcaattagagcattatctcccccgtcaccaccctttaccacgttaccactgcaaagagtcgttaaaggtgtgtcgccgatttatatgatattgccgatggagtctgataccttgtaatttggaaaatcgccggatgggcatatgttgtcccaagtgatgtgcatttgtagattcgttagatcgctggcattggtatgggttgagcatttaacgcctgctttagaacttataacgcattgtgagagaggtctcaggaaaaataggtgttacctaatgaaaagtgtggatgccttttaatttacacgatttactcagcaatttgcactttaaagtggtgggaaatcgaagtcaagcactaagattcttgaagtaccacaaattaggtacataaataaagcgcttaatagttgtaagtagttaaaccctttacaagttggtatatgggctcacctgcaaagttgctaatttctgctgtttcgacgagagcaccaactaatttcttcgaaaaatgtgacatttgcttatcatttagccttgtatgtacatacaagtatttattcaattagcacactatcgagtagatcattagtcgcattataggatggtttcaacagcgcaaaattcctactccttaaatattaaatcagtgaatactactatagtaggcccagtgtgttctgccttcagcgacaaattaaggcctgaactaaaaaaagaaacgacccaggcagtgccattaatcaacgtctttgcccttttcaggatcaaatctcgccacaatggaaaaatccagcttaacggagaagaatcacacccaagtgtacaatgacacaacgaagccaaagaagcccaagcgtcgcgacaagagcgatctgggtccggattttgtggcgcccgacgggggatggggctgggtggtctgtctggcagccggtttgaataacgtaagtgatatatagcgtggccgaattgcagcagtctggatggtgcataataatctccctatcctcatcctcacattcccgcacagttcttccttttcccggctctgcagcagtatggcctgatctacagggtgcggatgcaatcgctgggcttcgatgccaagcaaaccacgaccattgtgaacgtggtgatggcaatctcctcgctagtgggtgagtttcacctggccaacgttcaatcgattatgcatttactgatatatatatatatatacattaaattctccgtgcataggcattgtcaatggcgccatgttccggcggttcacattccgtcaggtggccctgaccggcaccagtctggccttcctgggcgtcttcttgtcggccttttgcaccaccttctggcagtatatcatctgtctgtcggcgatatttggtatcggtttgggtcttgccatggccgccacctcactggcggtcaatacgtacttcaagctgaagaggcgtcgtgccacgggtttctcgtggacgatcactggcctgggacccatattctttccgcaggtgtctaccgtcctgttgggctactatggtgcccagggcaccattctgatctatgctggaatcgccatgaatgccattctctgcgctttgaccctgcaacccgtactttggcatgtgaagaagcccgaaaaaccagttcacaatacaatcgagggaattgccgagacggagaagctgcaaccagaacttttggaggccaatggcaatctgttgtcgcccagcaatgatccgtggaaggattacgagtgcaagtactgtcagtatcagaaacgttctaagcgaggccttttctcgtcccaatacctcttcaatgtcgatgatcccgagaggccggggtacgagatcaccgagccaggaactcccatgttggctcgcgccaatgacggttggttcgggtcgaagctctccctgacctcggagagcgcgggaggagctcgctctcgcactcgtcaagctctgatgcgtcaggtttcatccagaagtcgtgagaatctcgatagactggaacagaatcgtcatgaccagggtccagacactccatccgctgcggccttgtacaagccaaactacttcaatcgggagcgcgaggatctcgatcgctatgccagcaagacgagcgtgtattctcggcctggtcaggatgagctgctgcgctgcacctgtgcagaggacaaggcactgttgcaaaagacagccgaatcgcttcaggtgaacctgttcaataattcggccgacaacacggaggccgaggaggaggccaaaaggcgcatgaccttcttccagaaggtgagcaagttctttgatttggatctactgcgggactttacatttgtcaacctggccgttggcatgagcatcatgatgtttggcgagatgaacttctcggtgctgacaccattcattctgaacagctttgggtacacggatacacagatctcgctggtgatgtcgctgctggcctgcatggatatatcggtgagatttctcgctccgctcgccttggagaaggtgaagctggataaccgtgtgctgtttgccttcggcatcctatgcatcgccgtgggccgcgtggttgtggcctttaccgactcctacgagatcatgatcggcgtcttcctgctgatcggctttggcaaggcattccgcaccatcttctcaccgctgataatacccagttacgttccgctcaaccgcttgccagctgcatctggtctgcagctcatcttcaacacaatattctcgttcgccatgggcccaattcttggtgagtttaatgttaattagattgtgtctgaaacgtaaatgacctttactattttccttaaaggtatcttgacggaggcctacggttatgcagccaccattcataccatcaatgcactcacccttttggctttactcctttggttagctgagtccgtggtgcgccgcattttgggtataccctccaaaggattgggccaatagaagaggcattcatactaatccgatttgaaattgcgacgagtgtgagctgaaaaccttcgtcggaactgaactacttgctatatgtccatcccagtgtgcgagatcatggctaacttggagctgtagacataacctagtccatacttcccgattgatgtgtgcgaatagtattaattgagcgtaaagatacctaagaaacatatctcttaactagctcataatcacccatcgctacataaaatttacggtccatttttttttttagcttttgatactcgtactagaataattgaatgtacttagtgatacgttataagtgtaataatattgttctgcagttgataaagaaatatatatatgtatattagttagaaaaaagttaatgcactattggtaaggtgacttaattgaaatacaccatatggtttgaacatgtgagtcagcatatttataaaatgggaaattgaactacttttgtgtgcttcgtttatacataaatgtagtgattagagggtaggtttaaaggaaatgttaaagcatatctcaatgtttggggatgatttcatgatgagttcatactacatttagtatgcactttactcaaagattacgtagaagaaataaatatttaccagaaattcgagggcttgttcaatatttgtcaaggttctaattaagatatcggccagttaaaaataaatacaatctcaagtttgttttgttctacaatatatgtgcaaatgcagcttgttgaactagcttattaagattacttacaatctttgtgtatgtaaagttaaaaactgtgagaaactattttcaatagctatagtcggtgttttccatttgagaacgatttaataaagttcatataataaatttgcccgttggtagaatatgtgtaaacatttttatttgcatataaagcttaacaataaaccaataaatagataagtaaatgttgtgtacgtttctggttcgatattgaatatttaaaatg

SEQ ID NO: 17792 - DNA, 2367 bp, DROSOPHILA
taaacacaccaacgagcggacgtacacggagcgaaagaagaagttggctaccacgaaagagttattgtttgttagaaacaccaagcgcagcagcagcagcagcagtacaaatattattgtgtgccgtccgaagagaacagctgagccacacgctgttttttaacgctgttccgttctgcggcacttgctgtttgttatccgtatccgtcgtgtttcgtcgtcgtatttgaactctctttttgttactgtgcatatatttttgaaatctctgtgctgcacacagcgcagggggaaaagtgctagaattagcagatcatcaagacatctggctaacctgtgatttccaacacacccgaaggcaaattggcaacaagttaccaccgatcaaatctcgccacaatggaaaaatccagcttaacggagaagaatcacacccaagtgtacaatgacacaacgaagccaaagaagcccaagcgtcgcgacaagagcgatctgggtccggattttgtggcgcccgacgggggatggggctgggtggtctgtctggcagccggtttgaataacttcttccttttcccggctctgcagcagtatggcctgatctacagggtgcggatgcaatcgctgggcttcgatgccaagcaaaccacgaccattgtgaacgtggtgatggcaatctcctcgctagtgggcattgtcaatggcgccatgttccggcggttcacattccgtcaggtggccctgaccggcaccagtctggccttcctgggcgtcttcttgtcggccttttgcaccaccttctggcagtatatcatctgtctgtcggcgatatttggtatcggtttgggtcttgccatggccgccacctcactggcggtcaatacgtacttcaagctgaagaggcgtcgtgccacgggtttctcgtggacgatcactggcctgggacccatattctttccgcaggtgtctaccgtcctgttgggctactatggtgcccagggcaccattctgatctatgctggaatcgccatgaatgccattctctgcgctttgaccctgcaacccgtactttggcatgtgaagaagcccgaaaaaccagttcacaatacaatcgagggaattgccgagacggagaagctgcaaccagaacttttggaggccaatggcaatctgttgtcgcccagcaatgatccgtggaaggattacgagtgcaagtactgtcagtatcagaaacgttctaagcgaggccttttctcgtcccaatacctcttcaatgtcgatgatcccgagaggccggggtacgagatcaccgagccaggaactcccatgttggctcgcgccaatgacggttggttcgggtcgaagctctccctgacctcggagagcgcgggaggagctcgctctcgcactcgtcaagctctgatgcgtcaggtttcatccagaagtcgtgagaatctcgatagactggaacagaatcgtcatgaccagggtccagacactccatccgctgcggccttgtacaagccaaactacttcaatcgggagcgcgaggatctcgatcgctatgccagcaagacgagcgtgtattctcggcctggtcaggatgagctgctgcgctgcacctgtgcagaggacaaggcactgttgcaaaagacagccgaatcgcttcaggtgaacctgttcaataattcggccgacaacacggaggccgaggaggaggccaaaaggcgcatgaccttcttccagaaggtgagcaagttctttgatttggatctactgcgggactttacatttgtcaacctggccgttggcatgagcatcatgatgtttggcgagatgaacttctcggtgctgacaccattcattctgaacagctttgggtacacggatacacagatctcgctggtgatgtcgctgctggcctgcatggatatatcggtgagatttctcgctccgctcgccttggagaaggtgaagctggataaccgtgtgctgtttgccttcggcatcctatgcatcgccgtgggccgcgtggttgtggcctttaccgactcctacgagatcatgatcggcgtcttcctgctgatcggctttggcaaggcattccgcaccatcttctcaccgctgataatacccagttacgttccgctcaaccgcttgccagctgcatctggtctgcagctcatcttcaacacaatattctcgttcgccatgggcccaattcttggtatcttgacggaggcctacggttatgcagccaccattcataccatcaatgcactcacccttttggctttactcctttggttagctgagtccgtggtgcgccgcattttgggtataccctccaaaggattgggccaatag

SEQ ID NO: 17793 - protein, 655 aa, DROSOPHILA
MEKSSLTEKNHTQVYNDTTKPKKPKRRDKSDLGPDFVAPDGGWGWVVCLAAGLNNFFLFPALQQYGLIYRVRMQSLGFDAKQTTTIVNVVMAISSLVGIVNGAMFRRFTFRQVALTGTSLAFLGVFLSAFCTTFWQYIICLSAIFGIGLGLAMAATSLAVNTYFKLKRRRATGFSWTITGLGPIFFPQVSTVLLGYYGAQGTILIYAGIAMNAILCALTLQPVLWHVKKPEKPVHNTIEGIAETEKLQPELLEANGNLLSPSNDPWKDYECKYCQYQKRSKRGLFSSQYLFNVDDPERPGYEITEPGTPMLARANDGWFGSKLSLTSESAGGARSRTRQALMRQVSSRSRENLDRLEQNRHDQGPDTPSAAALYKPNYFNREREDLDRYASKTSVYSRPGQDELLRCTCAEDKALLQKTAESLQVNLFNNSADNTEAEEEAKRRMTFFQKVSKFFDLDLLRDFTFVNLAVGMSIMMFGEMNFSVLTPFILNSFGYTDTQISLVMSLLACMDISVRFLAPLALEKVKLDNRVLFAFGILCIAVGRVVVAFTDSYEIMIGVFLLIGFGKAFRTIFSPLIIPSYVPLNRLPAASGLQLIFNTIFSFAMGPILGILTEAYGYAATIHTINALTLLALLLWLAESVVRRILGIPSKGLGQ

SEQ ID NO: 17794 - DNA, 15115 bp, DROSOPHILA
gcacacacagtgattaaatatacagaaaataccgaattgaaattatcacaatgctctctataagttatttcaaatatctgcgggaatttaattaaattgatcttttttgtgtccgatcctgaagatcacgctgcagctggcgtttcagctgctggagcgtctcctggcgctccggaggcacctccaggtgcagaagtcgtaccattttggggtggtggcggacttggttcagccatgtggtagtgacatgcatctctgcacgattgcaaactatggaactcattcctcctgtagatcttgcggcaatttgtggtcaccttaaatgatcaaaggacctaaaggatatgctcgtgatcgtttctcgcttctacctttatgcagtcgaatagaactcggtgaaaggcaaagaattcccgatgcgatgatctacaagaagattcggggggatatttgtttttcaccagacaggagctgttcttagctagaaaatcggtaattgagtgaatggttgagtattaagttcaatcttactcctggtcttgccagcctctataagaagccaagcgagggcaacaatcaccgccaacagcagtagcttcatgacggatcatcagatggttggcggctaagtggacatccaactggcaaagcattaatacttaacacggcattaagcatgaaaattgccatttgccataaaagtaaatgctatatttgtgtggattaccaaatgaaggctgagctctctaagaaaaaaacatcgtggctaaatatattagtaatatctctttatatatcagtgtatacaattgtaacattccacaacactttcggcttacaaatacgtttgagaaacaattaaaacttatggttagtccgatacgagtagcgaaggtagtgtagttaaggtaaggaagctgttcatcgaagaccgtcttgggcagagtgaggatttggtaagtggaagagcttcagcttcagcttcagctttcagcttcatctagcagattccggaaaagctgtagtcaaactcggtgttcttctcgtttaggcgacccaaatactgggagtgcttgatcccaaagctgtaggcgggcacatgggagaggtttacctatcgtgaagagtaattggaaggcagaaacaacccattgattatgatgtgttgaccaaatgaatttaatggcaaaatacattctcaaatattatcgtagggcttgtccgcccgattctccaacaaagagcgaacacaacgctgcggaacgttgactggcaatggtttcttgatatagggggagtgcaggatgccaaaggatatggcaggaggcgaacgtttctcccagtactgtgggagggtttaggatgaggtgaaatctatttgcacggagtgatgtcccacaggtaagagccgttttatggtaattatcaaaggatattggttaaataactgacctttccaatttatcgcaaacggcacattacccttacccaccaaaaatacttttaatacagggcaaatttgtttctgaatctcaataatcttacgaactctttcaggacgtaaggacgagatctgactcaccttctccggacagtgcgctccgggtccgggcttcgagtcctcgctgcccatcttgtacttgccgcgcatggagaagactggtggctttggtttgaccaccgtgtactcgccgtcgtagtaaccgggtccggggaagatcatcaccggaatcagcggaggcttctcccgacccgtaatcgtataagccggagccgaacgaatcttgccctccttgctgctgcccatgacggtcggtattttgtagacattaggagctgtcaatgatggcaaaatgtgtgtaaaaagttagttgagaatagttaattcatttgctggttaattcaatggcttgtctcttgggctggtgtttgaatggttcgggttagtttcgggttggattgggtgatcttggtcttgacatgacgtgcctgcaaataaacacacgaaacggaaacggacaccaagcaattgggagtactaatatcagttaacattcgaaagagttctatatttgtagttcttaaaaaacataataacaaagtaaaatattgaatgggttataagtatcatcatatattctgtttgtaatctaaaatattactcatacgacatgtgttgagtacaaggtaaacatcgttttcttgtctcaaaattaacttttatatatgttatgtcaataaagttgttgtttcatttcatgaatgcaaattgggaatatttacgctgaagattaatgagtaaatgcaacgttgcgtatgagtgattttactctttaaaatccctctggttacctgataatcttctcctgcacgctgctcgcctccacagcgtacttgaccgtctgcatcctcgaggattggccactggtcacaatggcgccatctgcctgcaccactgtctggtggctcacggccgccgctttggtggcactagcatccgacttaccgctggccaccaccttcagattgccactctccttttggccgtgggcaacttcctgaatcctggtggttgtgctgaccatcttcgagtggttgccattcgaaacgatattgccattgcttagtggtgcttgtggtgcggacttaagctccttgtgggtgccattcacctgcttggtggtttccttcttctgcagctccggctgctccactccgtttatgaaggtctttgtggttgtggtggtggtggttgttgtggtggtgctgctaccagcattgttgttggtgtggttggtggttgtggtggtgcattccgcattgttgcgtactaagttttggtatttgtgtaaaatcataaattgacaagaaagaattccaacaatgagatggtgcaggaatataaatacaaaaagcacaatttattctacatgaagaaagcgattcaagtagatcagattttgaaatagtttttatatctatatatcaaagggcatcattttaatgattgaatgatcttgaggattcttaccgggactggccagacggcgttctcgtctctggacaatgcgatcttctatgtacgcgcctctgggttctggtgatttgtgggtatttacagggggattcgaaacggatgagagcatggccagaataccaaagaatgtgtgtgcgaacaaacatggaacaaaaaacaaataggcacaaaaacaaaaacagatcgtatggatccggacggagtctgcggaatccggcaccaagaaaagcggaaacggatttcacctacctggtagcgatgcagtgggcactgtcttcaggccaaagctataggctggcgagctgtccagcttgcactgctcgggatgatagtgaccaggggctaaatgggtgaacggtggaaaacaaacaaaaaagcgggagacatgcaatacacacaacagcaacatgcaacaccgatggcggccactatttacctggagcatcggtggtcacgcggatatcggacttggtaccaaagctgtaggcgggtgtggagtgtagtgagtgcttctccggctcataggcggagggtgctgcaatggtactgatgctcgttaggataattgaggatataaccctagacatcctttaaggaactaatcctaatgcggcttccttttggaagttacttgcctggcgtatcggatatgcgctcccttcccagtcgcatgccgaaggtgaacgctggtgtgctgtccacctggcactgctccggatggtaatcgcagggtgccggcgtctggctcacgtgatcggcggctggacgacctgcaatggtgtaggcgggtgtatggtcgagacgaactttctcgggggcgtagtcgcatggcgcgggatgaaggtgctccgtcttggggtcgtgcttgccgccaaagctgaaagcgggtgcatggtccagtcgcaccttttcggggctgtagtcgccgggagcgggggattcactcagtgatctcggatcgtgtttgccggcgaaggtgaacgccggattgaagtcctgcctgaccttctccgggaagtagtctccgggtgcgggcgtttcgctgggcttatgcaggtcatggcgaccggcgaaggagaaggcgggattgtgatctagcctaactttctcgggatggtaatccccgggagctggagtgtcatgggttacctttggatcatgcttgccggccattgtaaaagcaggattatggtcctgcctaactttctcgggggagtaagctccgggggcaggagtctcattgggcttgtggagatcatgacggccggcaaaggaaaatgcgggaacatgatcttgcctaaccttttcagggtgataatctcctggtgccggtgtattgttctccaccttgggatcattcttgcccccaaatgtaaaagctggagtgtgatctaagcgaaccttttcgggacagtagtcaccaggagctggggtgccattggtaatcttctcaatgtatttaccagccattgagaatgcgggattgtgatcttgcctcaccttctccggtgagtatgctcctggagcaggagtgtcgctgggcttatgaagatcgtgacgaccggcgaaggagaaggcgggattgtgatcttgtctaactttctcgggatgatagtcacctggagctggggtatcgttttctactttaggattgtttttaccagcaaaggtaaaggatggtgtgtaatctagacggaccttttcgggactgtagtcgccaggggcaggagtatcattggaaaccttagggtcatgctttccggccattgtgaaggcaggattatgatcctgtctgactttttcaggagaataggctccaggtgctggagtgtcgctaggtttttgaagattatgacggccagcgaaagagaatgctgggttatgatcttgcctaactttctcgggatgataatcacctggagctggggtgttgctctcaactttgggatcgttctttcccccaaaagtataggcaggtgtgtgatctagacgcaccttttccggactgtaatcgcccggagctggagtgtcgttggctaccttttgggtgtacttacccgccattgagaaggcaggattatgatcctgacggaccttttccggacaataggcaccaggggcgggagtatcattcggtttgtgaagatcatgacgaccagcaaaggagaaagctggattatgatcttgcctgaccttttcgggatgataatccccaggagcgggagtattgttctctactttcggatcgtttttgccaccgaaagtgtaggctggagtatgatttaagcgtactttctccgggctgtagtctccgggagcgggagtaccattagttagcttttcaactggcttgcctgccattgaaaatgctgggttatgatcttgacgtaccttctcgggagagtaggctcctggagcaggagtatcacttggcttttgaaggtcgtgacgaccggcaaaggagtacgctggattgtggtccaacctcaccttctccggatggtaatctcctggtgccggagtgttattctctactttaggatcattctttcccccaaaactgtaagcaggtgtgtggtctaatctgcacttttcgggactatagtctcctggtgccggagtgccatttaaaatcttctgatcgtgcttgccagccatcgtgaaagctggattgtgatctaatctcactttctccggcgagtaagcacctggagcgggagtctcgcttggcttgtggagatcatggcggccagcaaaggagtacgctggattagtatcttgcctaactttctcggggctataatcaccaggagcaggtgtatcgttggtaaccttggcatcatacttgccggccattgagaaagctggattgtggtccagtctcactttctccgggaagtaggctccaggagcgggagtgttgtctggtttctgaaggtcgtgacgaccggcaaacgaatatgcgggattgtgatcctgcctaactttttcgggatgataatcacccggggccggagtgttattctctactttaggatcactcttaacgccaaaactgtaggcgggagtgtgatccaagcggaccttctcgggacaatagtccccaggagccgggctatcgctggtcaccttttgactgtgtttcccggccatcgagaaggcaggattgtgatcttgtcgcaccttctccggggagtaggcgcccggagcgggtgtttcactgggtttgtgcagatcgtggcgcccggcaaaggagaaggccggattgtgatcttgccggactttctcggtgtcgtaggctcccggtgctggtgtgtcgcttggcttgtgcagatcgtggcgaccggcgaatgagaaagcgggattgtgatcgtgccgcactttttcgggacagtagtcgcccggtgccggagtggagctctcgagtcgctgctcgtgcttaccgccgaaggtgaaggccggcgttcgatcgttgcgatacttttccggggcatacgaaccgggcgccggagtctcgctcacggacctcgtctctgggcgtccggacagggtgaatgcgggcgtgtggtccagccgcaccttctccggattgtaggtgcccggcgctggcgtgtcactcgacttggccagctcggcacggtggccaaagctgaaggcaggcgtcctgctcaggacgcacttctcgggttcgtatgctccgggtgctgcaagagattgggtgaagataaggtgtaaaaagagttgggttttggtgtgcgggtcgcacgctaagactaagatccattgaaatgcgattctagaactcaccaggtgtgcaatcgaccacgtcctgcgaagcctttccggcgattgagtaagcgggtgcggagtgcaaccttgacttttcggggctgtaggcaccgggtgctggtcataaggacataaaagtgtgcgctataagccaagttactacagcccagctgagcgggaagccttacctggagtatcgctgacctggatgtgtttggtcttcaagccaaagctgtaggcgggaatgtgttcgaggacaacctgctcgggcttgtaggtgcctggcgctaatgaaagtgtcgtcgtggtgaaagcatcaagcagctatattaacgtggctcaaacctacaaggcatactgtttacaaacctggagtgtaatctggtcgctgttcatggtgcttgatgccgaaactgaactctggcgtcttgttgagcttcaccttctctggacaatatgcgccaggagctgcggatgggatgggatatcagtattaagttggccaaaagtcacgggaatagaaaaggaaagcgctatagatactgtccaattgggtacgcttgagcaagtggtgcctcgattggggtagatacggatacaattacagatgcagatacagttacttgggggggaggctgggatttattacctggtgtgccctgatcgtgttcgattttagttcgtctaccgaaagtgtagcgtggcgcattcttttttgattgcgtgaccttttcagggcaatagctattcggagctgttagtgttaataaaacattcgatttttagtctactcgaatcaaaactaaaggtctacactaggtgagctacgactaagtgtgggtgaattacaaatagatagatatgtatatacggatagaaagatacattatttcgggaattagtgatgagttggggattaattgatcgggttagaagttagagagcggagctagaccaacaccaacactaaaacgcaacgtggacgaagtttggacagttagttgggttacctggattgttaaccaaatacacgttaaccttaatgcgaaaggagtagcgtggggctcgccgcttgacgacatcaagtggcaccacttgataatagttgggacctgagtctcgattttgccacggcaatcattcattgaaagagaaaaacgtttcaaattaaaatcaaatcaggcaacataacaaaaaaaaagaggtcacacaaattactgaaccactaaagtaacacatatacaaagaacactgtgtagctaggaaataataaatgagaattagagaatatgtataatcttaaatagaaatatttatgagaaattaagacatctgatctccgtttccgtttgactcataaataaaaataactgagccaagttgtagacaatctttcacaaaatagatgaccgtataaagacattgccaattcctcctacgtaaatttgtagcttttttttagggaaacaaagaaagtttagagaacgagatatgaacaaatcgaataaataataataatgcccaacattataattaaatactttttaattaatgtaccaaaaataatagaatagaataagccaaatcattcacgcacattacgaggtgacataactacgattcaatctcaaggatacccaaagatacagcagaataatctacgaaatgtggctacgactacactagctactgagatagagatagaaagtgggagaaagtggaagaaaggggcggtagcaacttacgcgctgcttgcagtaaggatgcaactggcatggattcggattagttaatgagtacgcttctatgtacaatgatgatccatgattgaaattgattgatgatctcctcagtccgcgcatgcaaccaaaaaaaaaaaaaaaaacagcaccagcccgcaacaaacaccgaattcaacgccaaattcaaagtcaattttcagatccaactccaaaatccaacatcaggtccaaaaacaccattcaaacaccagtggaagaagaccgagactcacctggtatctggaaggttttcaacgcgaccggccgttggccaaaagtgtatttgggcgtggcatcgatcaccgccttggccgccggcaccacatcgtattccccaggtccgggattcgagaagcgtgttagttccttgggtctgctctgcagagtggctgctcgaggataatcccgacccttggctcgcatacccgtaacattgtactgcgccggacccggtccggaggtgtcatactttccgcccaacttgtggccaaaggagtacgagggtgcggccttcttcttggagtcgggaactttgctgcctaaatgtgggattttcaataagttatatttgcaggaacattaaaccaatcttaagcttacctatcaaggttggaagttggacagtggctggacccggattggtggtctcggcggcgatcttgccgatcctaacagttggagtccaaggacgctgctccacgttgccgcccatgttaattggacgaatcttacgcacgcgggcgcagggtccctgatccttgttcttgtttttgaactcgacctaaaaaggggaaaacaaacaacaatattaagaaatccattagttatttagatcttcaagaaaccaccttgttcatcttgctgtttttaggcttagtagtatcgaagtctgaaaattgtgccccaatgtaaaaaaaaaaagttaaagaccaaatttactgaactcccttcgctgacatttacacgtgtgagtgggtgataggctgactactgaaatctatacttcgacccccaaacttgggtaacctaataatccaaatttcgtcctactccaacagccaagtcgatgacacaaaaatcaatcgtctggcatttgtttcgaactttctgggccaattccgatggggcggctaataaccaggcgtgtagctccacatattcataccatccatgggcgaatggattcagtggatgggggcgtgtcgtgtggcggctgtcactctttttcttctccttcttctgcagtggctgttgctcggcatttgttgcaggttccttctgttcgagccgcgaatttgttgcgccgcacgaaatacaaacaatggcaataactttgcggtaggctcgtaattcttgggcgtcagtggcaggcacaaaagttgcaggggtttgcagtgcaaccaaaataaagttaagaaacttaaattacagtcttattatgtctttgcctttcagttgtatttgattttgaatagagagcaataatttatatatgtaatcgaagtttgtaaaggtgcctaaatatatctagcatatattgagcttcaccctttaaattgaatttccctataaaaagggaacaataaaatacgaagagaaaaccaaatgaattttaatgcagttaccacggtagacaattttattatacatatgattaccactaagtcgtaacaaaagaagtgcacaataaaagtgtttccagctagttaggagctagacaaaatgaatattttaatgagaggcccccctcaacaacattcgtattccccaaaacctgctgctgccctgggtgacgaccttcttttcacagctcagcacacgggacaccaagtgttgcccatcgacaggcgggcagacatcggaaaacagaccggtaccagctggtatcaggagttccaaccacgctccaccttaccaactttccacctttccacctttttagcgccaggaaccaggcatttgggcatgtaatcgatatggggctggatttggatacggatacgaattcgacgggcgccgagatttggggtctggtcaacaaggttgtgtcccgaatcgaagcgaaacgaaacgaaacgaaggggagtatgctaagtgctaatgctgcccattttgtggggcatgtaagccaacaaaacgattacttttaatgacttatggccgacaattgcatgaaccaaaacaaaaacaaacccaggacccaaaagaaatgcgaagcgtgccacttcttttggccgtgaaaattcgccagcctgtgtaaataattacaaacaatgttagggggcgtggcctggctgttaacagggccaataaagccgtcgttctgctgccaagaaaggcttcacttttcccgccagccgcacttgttacttgctacatatgactcctgacctcgcatgcaattcacatatacatatgtatgtatttatgtacaaaaaacaatgttctcttcgcaaggcaggcagtcatcaggcggtcttataaggcgactcttacatcaccatcatgaggttggaaagcccacacaccgtaccgcctgttcaattgctgttcgaggccaagatcagcgaagaaaactgaaaatctaacgatgaatcagagccggcagctgagccaacaaactcagacatctgtcagacaaagagtcttggccacccacccacattgctcgcattgaaggaaatctgtcttaatatgcacatatggcatcgaaaagagatcaattaaaaatctaaaaatatattaagcttaattgtgaaagaaaattgtgattgaataatagtcatcttatacataaaagcataactgtcaagattttggaagcatatagtagaacagaaaatttcaaaacataagatattgcatttgattgtcacgcttttttctataaaccattaaaaaaggggttcaaaatacaaaatcatgtatgccttatatatgactttaatttatcagccaagttattgccaccaccaaatagtgtgtgctatttttccgagtgcaacttcaattgaataatgtttggttcgcccgttcaggaggtcgcatttaatcacgttaatagagcgttggctcatgcaatcaatttgcatgtggcgatcagatttcagtaatcaaattatagatggtgatgctcgataatctatgcacgggggtcagtgtataaaccggctaaactatatagtttattaaaatcgcccccacacactcgactttcgatctctctttctcgctataaatatttgcttgcattttgtgaataacaaaaactggcattcattattagttacagagagtttcagcaaatattttagcattatctctgtgaccttcggtgatttgtttatgatgatgtgtttctgtttgatttaaattgatattctcacagttgacccgatgactctgcacccgtgacgaaaacaacgcgtcagctttaatttgtgattttcactctaaaaatataaataaaagctgtaggtagcctcagccataaaactgaaataccctgtaagtgaagttgtgtttactaatctgttttgattgaatataatagcataggttcgaaataagtgaaagaatgcctaatatagattccttaacatggaaataatgtttcaaattgtataaatatttcaacagtttttaatcacataatcatttttaatcatcgatggaccatgtatcgatataccccccttatttactaattgtgaggtatctgtatctctgacatgatcaacaatcatctcaactcagtgaaaacgtttttatgttctttcgacttcatttcacgctctccaaaactgcgaattaaatatgagctcattcccaaaatttagacaatttccaggcggccaacttgggggcttttacgcccaaatacggcggccgacgtttcctttagcccacattgagttgtccgaaaaagccagttcggaattgggtttccagacggcagatcgacccacgcagaaactccatgactccgcgatatatagacatacagccaaatagccataattcgtgtgctgtctctattaactattgcctctttttttttgtaaaagtttaattaacgccgaacaagttgagcaattcctttccaaaaacagaaaacgacaacaagtgagtgagccagccggcaaaaggccaaaaaggccgaaaagagctggtaaatgaaaacatgagagccaagaagcaaaactgaactctcgtgattgtgataaaaacgccaagaccgactgacgtcagctgtgtgaactagtttgcgatcgtccaaatctaattaagtttctcaacattctcggtgctctgcagcgcgaacgtgttttggctttgaaaaccaagagaaagctgggaaatgaggcgggaaaaattggcaaaccctcactgaaacttggttctcaaggcacaaggccaatgttttcaaatagctgttgataattactaaatttaatgggggaccatcacacatccgtttccaaattctagagcctgagatcactggctgctgctgacacaatttgcatgtttggatacataaatatccgtttgggtcattttataaatatttatttagcgattattgcatttccccttagcagcttacttttctatttaaccttttaccattcgttacttcgctattttgtatcttttttttttttgtttttggccaacgcgcttttgtgttgtgcctgcgccataatcagtgactttgaaaaatgagctgctgactcgggtcgaccggttattagagctgatgtcatgggcttcgtgggacaagtgaagtaaaggtatcaagaaccgcggaagggttacatctatgccaacaagtgacatcaatacgggaacgcgagtgtcattgactaaacaatgggaggagctgggtggatttatttgggggcggagcagaacagctgactggcggtggggaaacctagccctatgccaccaggaaatgccaatagttagacagacagacagtcaatgaactttggggtcgggtcagcacgcaatcccactggctgctccggtcgggctccacctgacttggttaacgcctactccagtttatccttaccgcaggctactttacgatttcgggtatctcgtcctgtttccgttgtatcgtgtgatttccgtaactttcttttacacagtaaaaaacttcactttattgcggtgctaatagcgcgtagtgcatacagtccttgccaggattagtcgcgatttttgggcgatattcaaaacatctgttcacccgaaagagattgctatattcgttgttattgtagttgggtttcgtggctgatttattatttcgttgattcgttcgttgattgggttcaagtgacagccgctttcgagtgtcggtctgccgactggcgtttgaagtctactagaggttttcaaaacaaaacacactttgctgatttatttataccgattggattggccgctatgagctgagtttgtttcagtgaaagagaagagagctagctagaaccgcactcgagagctgtcgaacagaaactgcggcaccaagtcgctaacgctcgcttttcgtttcaaattttcgacgtaacgaatgcaagacgtcacgtaagccaccgcgttggcgttaacagtcgacgtaagagttaacatgagtctcctctgttatttggctaaggattttgattgatttgtggtgagacatgagcttcaaactctatttaatatcaattaagaagtagttttagaaaaaatgtatatgctcatcacttatattttcagcaaaatattcaaataaactttctgggagtggtgtcgggtagaatttccccgcccaaaacatatttcctgaaatcgatttccatttaattggctcatttacattttaagaaagtcgtatctaggagaaggtcgccttagatagacattgcccccggtctcctgcccacggttcaatcgtatcttaatggctcattgactatctgtaattcgactgggtttgcgctcatcgagaggcctatttatggccgtgctcaccaacaaataatgccgctcgattgtggttatgtaatgcgagaccgcgatcttgcctccgacaaatcaatccgccccgccgacccaacaatctatggaccactgctgcggtggcacacagacagccttcacccacacacatgcctaatgaagcatgacaaattattggcatgatttgtattggaaaatcgtttggtgcaaaattggtatagttgtgtttttttttggggcagaaaggggagtgatgttcaaaacaatacttaactttcttatttatccaaaacccatctagatttagaccatataaaaatattttacaattttattttgataaatttttgtttgtttattcatttatatcctaatagtaggccattaagcaatataaaccactatttaaaaaccaaaatccagtagaaagatattctttttttttcagacctccataattatgtggcatattttcaggctcaatagc

SEQ ID NO: 17795 - DNA, 1376 bp, DROSOPHILA
ttctagctagctctcttctctttcactgaaacaaactcagctcatagcggccaatccaatcggtataaataaatcagcaaagtgtgttttgttttgaaaacctctagtagacttcaaacgccagtcggcagaccgacactcgaaagcggctgtcacttgaacccaatcaacgaacgaatcaacgaaataataaatcagccacgaaacccaactacaataacaacgaatatagcaatctctttcgggtgaacagatgttttgaatatcgcccaaaaatcgcgactaatcctggcaaggactgtatgcactacgcgctattagcaccgcaataaagtgaagttttttactgtgtaaaagaaagttacggaaatcacacgatacaacggaaacaggacgagatacccgaaatcgtaaagtagcctgcggtcgagttcaaaaacaagaacaaggatcagggaccctgcgcccgcgtgcgtaagattcgtccaattaacatgggcggcaacgtggagcagcgtccttggactccaactgttaggatcggcaagatcgccgccgagaccaccaatccgggtccagccactgtccaacttccaaccttgataggcagcaaagttcccgactccaagaagaaggccgcaccctcgtactcctttggccacaagttgggcggaaagtatgacacctccggaccgggtccggcgcagtacaatgttacgggtatgcgagccaagggtcgggattatcctcgagcagccactctgcagagcagacccaaggaactaacacgcttctcgaatcccggacctggggaatacgatgtggtgccggcggccaaggcggtgatcgatgccacgcccaaatacacttttggccaacggccggtcgcgttgaaaaccttccagataccagctcctaatgtctacaaaataccgaccgtcatgggcagcagcaaggagggcaagattcgttcggctccggcttatacgattacgggtcgggagaagcctccgctgattccggtgatgatcttccccggacccggttactacgacggcgagtacacggtggtcaaaccaaagccaccagtcttctccatgcgcggcaagtacaagatgggcagcgaggactcgaagcccggacccggagcgcactgtccggagaagtactgggagaaacgttcgcctcctgccatatcctttggcatcctgcactccccctatatcaagaaaccattgccagtcaacgttccgcagcgttgtgtaaacctctcccatgtgcccgcctacagctttgggatcaagcactcccagtatttgggtcgcctaaacgagaagaacaccgagtttgactacagcttttccggaatctgctag

SEQ ID NO: 17796 - protein, 293 aa, DROSOPHILA
MGGNVEQRPWTPTVRIGKIAAETTNPGPATVQLPTLIGSKVPDSKKKAAPSYSFGHKLGGKYDTSGPGPAQYNVTGMRAKGRDYPRAATLQSRPKELTRFSNPGPGEYDVVPAAKAVIDATPKYTFGQRPVALKTFQIPAPNVYKIPTVMGSSKEGKIRSAPAYTITGREKPPLIPVMIFPGPGYYDGEYTVVKPKPPVFSMRGKYKMGSEDSKPGPGAHCPEKYWEKRSPPAISFGILHSPYIKKPLPVNVPQRCVNLSHVPAYSFGIKHSQYLGRLNEKNTEFDYSFSGIC

SEQ ID NO: 17797 - DNA, 6033 bp, DROSOPHILA
atcgttcaaaaatcgcttcgcccacatcaagaagtgcttcagcatcaagagacgaggtcctttgtacaggatttatggatatgcggagtgcaagtgcggctttcttattgcagacacggaaaaagcccggaaactgcattgttgttcggtaaataagcagtgtgcttaagtattgtaagtattacaaggtttctgttcatttagggaaaacttcgcccctgcaagccaatcataccaactgagccgaaagtcccggtgacaaaacatgctgaagaactaacatcaactaaaagggaacaggctttgcagccgttgattagaaattttatcagtcccatcaaacaacaggagtttccatctttggatatatcatattccagtaaatatgatcctaaaccaacatcgaggccacgcgtccgtaactttgatagaccacacagaagtcaagctccaaaggaagtctgtgtgtactccataattcggaggaatggggctatctcagtgacaggaagatccatcgttaggtaccggggtggcaacgaaaaccttgccatacttaaaaggcgagaattaaaaataaaatacgtataacatagttatgtataagtaaactaagctgtagataagtctgaatattatgaaagtaaatgttgtctcttgtatttattaagttacatttaatattttgcctttattcaatcttaccgattgatgataaggcatctataagtaattttcttgattaatgtaaacaaaaataattaattttgtaaatcaaaagttttttaaacaccagcgtataatggtgtgtatttaatggttaaaagaaaaaaagtgataagaaagaagtagtgtaatataaaaagtataaatgaaattatataaagatagctataaattatgaaaattctattgcattttaaatgaagcgccacattacagttgaattaaattggttgggttaggttgggtctcccacctggtcacactgcactccgagcaaaacaaaataatccacgtaaaaaacgtaatatcccggcgtttatttttaaaatatccgatgtcagccgccaggacgcaggaatacgattgcaccgccaagtgcagactccgccagcatggaaacgccatcaccgccgcgctgacaaagcgctccattgacaaccagaagctggcgtcttttattttcaagacttgcggaaacttcgccaatattttagacgatctggtgcgtggtgaaattagacaagccgtagaaggcaattcatatgttatcttcatctcgaaattctagggccgctcggcggtgcacatgtccgcctccacggccaggtacgagattttggagtggctgctgaaccacggagcctacatcaatggccaggactacgaatcgggaagcagtccgttacacagagccctctactacggctctatagattgcgccgtactgctgcttcgttacggggccagtttggaactgctggacgaggacacaaggtgtccactgcaggcaatctgccggaagtgcgatgacgatgacctcgccacggattcacagtgagtggggtgcaggacgctgttgatttcacacacttaacttatgtatcttcccatagaaacgatgtcctagtgtggggctcgaacaaaaactacaatctgggcattggcaacgagcagaacaccaatactccgcaggcggtggacttctttcgaaagtctaacctttggctggaacaggtggcacttggagcttaccacagtctgttctgcgacaagaaaggccacctgtatgctgtgggtcatggaaaaggcggtcgcctgggcattggattggaaaacagtcttcctgcacccaagagagttaaggtttcgtccaagctgagcggcgactccattcagtgcatcagcgtgtcccgccagcactcactggtgctcacgcatcaatcgctggttttcgcctgcggccttaacacagaccatcaattgggcgtgcgtgatgccgccgagcagctcacgcagtttaaggaagtggtcgcgttgcgtgacaaaggtgccagcgatctggtgcgcgtgatcgcctgcgatcagcactctatcgcctacggcagcaggtgtgtctacgtctggggggccaaccagggccagtttggcatcaattccaacacgccatccatcacggtgcccacattggtgagttgtttatattgctgtacgtctctaacatctttttttattagatcaagcttcctgcgaaaactacaatacgctttgtagaagccaacaatgcagccacggtaatttacaacgaggaaaagatcattaccctttgctatgcagacaaaactagatacataaagacccccaagtgagtttactaaattaaagaaaattatatcacaacgatttgttgcacaccagctacgaagatctcaagagcatttcggtgatgggcggcaaccttaagaactccacgaagggctccgcggcagctctcaagctgttgatgctcactgaaactaacgtggtgtatttatggtacgagaacactcaacaattttacaggtaagccattcacgccagcttaagattttctgttatgaccatatacacttttgcagatgtaatttttcaccgattcgtctgcaccagataaagaaaatactctacaagtgcaatcaggttatggtgctttccgaggatggctgcgtttatcgaggaaagtgcaatcagatcgccttgccatcctcagcactgcaggaaaagtctcggggcagcctggacaactggcaggacaacgatcaaaacaaaacggaaatctcccgggaacatgttatccggatcgagctgcagcgagttccgaacatcgaccgtgccacatacattttttgcgatgagggcttctcgtcttttgccgttctgcaggagtcacacaccaagtactttcggaagccatcactgccacgcagggagcacagcttcaagaagctgctgcacgagactagcgactgtgatgctgtccacgatgtggttttccatgtggacggagagaagttcgcggcccacaagtttatcatttacagtcgagcgccaggtctcagagaccttattcgttgttatctggacaaggatatttatttaaattttgatcatttgacgggaaagatgtttgaattgatattgaatcatatctactcgagctactggccaacagaggatggtgagaaaaaaataaggtgtaaaaaatgattctttttaataactccataaatatcatatttagatattgactgtatacagcaaagtttgggacctgcgaatcctcaacagcgaactcgcacctgcgagatgttcctacctcacctggagaagtttcaactagtcgagctgaccaagtacgtacagagctacgtgcgtgaccatcaatttccactgcccaatgcccgaaaacttttcaatcgcttgtatcgctccgatcatccagagttgtacgatgtgagaattgtctgcaaggacggaaaagtactaggggctcataaatgtatgttagtggcacgtttggagtactttgagatgatgtttatgcacttgtgggcggaacgctcgtctgtcaccatggaaggtgtacccgcggagtatatggagccggttctcgattacctgtacagtctggataacgaggctttttgcaagcagggttatctggagacattcctctacaatatgataaccatttgtgaccagtactttattgagtcgctgcagaatgtgtgcgagtctctaatcctggataaaatcagcataaggaagtgcggcgaaatgctcgagtttgccgccatgtacaactgcaaaatactacagaagggctgtatggatttcatttgccaaaacttgtcccgcgtgctttgctatcgcagcattgaacaatgtgatggagagactctaaaatgcctaaatgatcactatcgaaagatgttcaaaagggtgttcgactacagacaaataactccattctcagaggctatagaagatgagctgctgctcagctttgtggacgggtgtgatgtggacttaaattatagaatggatgcggtttgtgcttaacaattctatcattgatctcggtttaaagacattttctttctttgtaggaatcaaagcttaagcaggccgccaaacacaaacagaaggatttgcgcaagcaagatgcccggcaccagtatgaacagcaggccatatcaagcatgatgagatctcttagcataagcgaatcgactcaagggacagaagtgccctcatcaccccaggatagcgctcgcagcgaggacaaaaactggtctcgtgtggtcgacaaaaaagatcaaaagcgaaaactggctgaaaccgcattaaaagtgaacaacacacttaaacatgaggatccaccgactcaagaactggtacccattgaaaggaagcccctgaaagagcaaacacctccgccgccatcgcacgaaactgaacccacaacaccattaagcaaaagctacaacctcgattttagctccttgactcctcagtcgcagaaactttcgcagaagcaacggaagcgtctttcctccgagtcaaagagttggcggactaataacccacccctagtggaacaatcctccactccagtggctgttccgaatgcctggggcgtaacaaccacgccatcgggttcgttcaatgactcatttacttctccaaccactggaagcagcacggatcccacttcatttgccaatatgatgaggggacatgccacatcctccaccacacccacggaccaaagccaaagcttctcgcgcatcttggcggatgaaaaaagacagagggaatcctatgagcgcatgcggaacaaatctttggtacacacgcagattgaggagagggcaattgccgaattgagggagttctacaacgtggacaacattgatgatgagactataaccattgcccgagtgtccagacccagtgatatcaactttagcatatggctgaggcagtaaattggtacaggtagcttagttgtgtgaagtgtttgtcctatagtttttgtttttattagagtgttcggactgtttgtgtttttaaagcgatttactgcgaccggggcatcaaatgtagaactcggatccgcctgcaaagaagctcttgctatttatttatattcaaaaccaaatgcaataggatattggacggcacattgggtaacaaactttattgcatgagcatatagataatacagatagatatagatatttacaagctgggggacacacactcaacaatgaggcaacaagacaagtgacgaataaatagccatctaagcttagctaaaccgaaccgaacccgaaataaacccgttgcttatgcaaatgagaacacgatgaacgaaggggattgacacagagcgagtggtgtggagatgaaactggacgagaagatgtgggcgatggatgtggcggcttgttcagaagcactccttacgaaaggcaaatccgtactggtcgcacttgtatctcaacgttttggccaactgtggtgggccgcagtagaagacggtgacctttcccttttgctgggcctgcagctgcttgaacaccttatcccagttgggcctgccggcattggtgcgggttttcagacccgtgatcagatcccgcttgccctggtaagaaaattcatgaagagtttagaatagcactgatattgaggcatatgttttgcgcctaccttttcgtgcagtaagtccaaagctagttggagacccactgccttcatgtcggttctttgcagcgcacttgttatgtacatgtgcatgtccaggaatctgtggaaaattcattgacaatcttcgcacaatacatgctaacagctaacactcaccgctccatggcaccgcccagctctgcctgctcgatctccagctgggacagcagattgacgaaccactcgaaggatctttgatccctgttgatccagaagaagtctaccttccgcagattc

SEQ ID NO: 17798 - DNA, 3624 bp, DROSOPHILA
caaaacaaaataatccacgtaaaaaacgtaatatcccggcgtttatttttaaaatatccgatgtcagccgccaggacgcaggaatacgattgcaccgccaagtgcagactccgccagcatggaaacgccatcaccgccgcgctgacaaagcgctccattgacaaccagaagctggcgtcttttattttcaagacttgcggaaacttcgccaatattttagacgatctgggccgctcggcggtgcacatgtccgcctccacggccaggtacgagattttggagtggctgctgaaccacggagcctacatcaatggccaggactacgaatcgggaagcagtccgttacacagagccctctactacggctctatagattgcgccgtactgctgcttcgttacggggccagtttggaactgctggacgaggacacaaggtgtccactgcaggcaatctgccggaagtgcgatgacgatgacctcgccacggattcacaaaacgatgtcctagtgtggggctcgaacaaaaactacaatctgggcattggcaacgagcagaacaccaatactccgcaggcggtggacttctttcgaaagtctaacctttggctggaacaggtggcacttggagcttaccacagtctgttctgcgacaagaaaggccacctgtatgctgtgggtcatggaaaaggcggtcgcctgggcattggattggaaaacagtcttcctgcacccaagagagttaaggtttcgtccaagctgagcggcgactccattcagtgcatcagcgtgtcccgccagcactcactggtgctcacgcatcaatcgctggttttcgcctgcggccttaacacagaccatcaattgggcgtgcgtgatgccgccgagcagctcacgcagtttaaggaagtggtcgcgttgcgtgacaaaggtgccagcgatctggtgcgcgtgatcgcctgcgatcagcactctatcgcctacggcagcaggtgtgtctacgtctggggggccaaccagggccagtttggcatcaattccaacacgccatccatcacggtgcccacattgcttcctgcgaaaactacaatacgctttgtagaagccaacaatgcagccacggtaatttacaacgaggaaaagatcattaccctttgctatgcagacaaaactagatacataaagacccccaactacgaagatctcaagagcatttcggtgatgggcggcaaccttaagaactccacgaagggctccgcggcagctctcaagctgttgatgctcactgaaactaacgtggtgtatttatggtacgagaacactcaacaattttacagatgtaatttttcaccgattcgtctgcaccagataaagaaaatactctacaagtgcaatcaggttatggtgctttccgaggatggctgcgtttatcgaggaaagtgcaatcagatcgccttgccatcctcagcactgcaggaaaagtctcggggcagcctggacaactggcaggacaacgatcaaaacaaaacggaaatctcccgggaacatgttatccggatcgagctgcagcgagttccgaacatcgaccgtgccacatacattttttgcgatgagggcttctcgtcttttgccgttctgcaggagtcacacaccaagtactttcggaagccatcactgccacgcagggagcacagcttcaagaagctgctgcacgagactagcgactgtgatgctgtccacgatgtggttttccatgtggacggagagaagttcgcggcccacaagtttatcatttacagtcgagcgccaggtctcagagaccttattcgttgttatctggacaaggatatttatttaaattttgatcatttgacgggaaagatgtttgaattgatattgaatcatatctactcgagctactggccaacagaggatgatattgactgtatacagcaaagtttgggacctgcgaatcctcaacagcgaactcgcacctgcgagatgttcctacctcacctggagaagtttcaactagtcgagctgaccaagtacgtacagagctacgtgcgtgaccatcaatttccactgcccaatgcccgaaaacttttcaatcgcttgtatcgctccgatcatccagagttgtacgatgtgagaattgtctgcaaggacggaaaagtactaggggctcataaatgtatgttagtggcacgtttggagtactttgagatgatgtttatgcacttgtgggcggaacgctcgtctgtcaccatggaaggtgtacccgcggagtatatggagccggttctcgattacctgtacagtctggataacgaggctttttgcaagcagggttatctggagacattcctctacaatatgataaccatttgtgaccagtactttattgagtcgctgcagaatgtgtgcgagtctctaatcctggataaaatcagcataaggaagtgcggcgaaatgctcgagtttgccgccatgtacaactgcaaaatactacagaagggctgtatggatttcatttgccaaaacttgtcccgcgtgctttgctatcgcagcattgaacaatgtgatggagagactctaaaatgcctaaatgatcactatcgaaagatgttcaaaagggtgttcgactacagacaaataactccattctcagaggctatagaagatgagctgctgctcagctttgtggacgggtgtgatgtggacttaaattatagaatggatgcggaatcaaagcttaagcaggccgccaaacacaaacagaaggatttgcgcaagcaagatgcccggcaccagtatgaacagcaggccatatcaagcatgatgagatctcttagcataagcgaatcgactcaagggacagaagtgccctcatcaccccaggatagcgctcgcagcgaggacaaaaactggtctcgtgtggtcgacaaaaaagatcaaaagcgaaaactggctgaaaccgcattaaaagtgaacaacacacttaaacatgaggatccaccgactcaagaactggtacccattgaaaggaagcccctgaaagagcaaacacctccgccgccatcgcacgaaactgaacccacaacaccattaagcaaaagctacaacctcgattttagctccttgactcctcagtcgcagaaactttcgcagaagcaacggaagcgtctttcctccgagtcaaagagttggcggactaataacccacccctagtggaacaatcctccactccagtggctgttccgaatgcctggggcgtaacaaccacgccatcgggttcgttcaatgactcatttacttctccaaccactggaagcagcacggatcccacttcatttgccaatatgatgaggggacatgccacatcctccaccacacccacggaccaaagccaaagcttctcgcgcatcttggcggatgaaaaaagacagagggaatcctatgagcgcatgcggaacaaatctttggtacacacgcagattgaggagagggcaattgccgaattgagggagttctacaacgtggacaacattgatgatgagactataaccattgcccgagtgtccagacccagtgatatcaactttagcatatggctgaggcagtaa

SEQ ID NO: 17799 - protein, 1187 aa, DROSOPHILA
MSAARTQEYDCTAKCRLRQHGNAITAALTKRSIDNQKLASFIFKTCGNFANILDDLGRSAVHMSASTARYEILEWLLNHGAYINGQDYESGSSPLHRALYYGSIDCAVLLLRYGASLELLDEDTRCPLQAICRKCDDDDLATDSQNDVLVWGSNKNYNLGIGNEQNTNTPQAVDFFRKSNLWLEQVALGAYHSLFCDKKGHLYAVGHGKGGRLGIGLENSLPAPKRVKVSSKLSGDSIQCISVSRQHSLVLTHQSLVFACGLNTDHQLGVRDAAEQLTQFKEVVALRDKGASDLVRVIACDQHSIAYGSRCVYVWGANQGQFGINSNTPSITVPTLLPAKTTIRFVEANNAATVIYNEEKIITLCYADKTRYIKTPNYEDLKSISVMGGNLKNSTKGSAAALKLLMLTETNVVYLWYENTQQFYRCNFSPIRLHQIKKILYKCNQVMVLSEDGCVYRGKCNQIALPSSALQEKSRGSLDNWQDNDQNKTEISREHVIRIELQRVPNIDRATYIFCDEGFSSFAVLQESHTKYFRKPSLPRREHSFKKLLHETSDCDAVHDVVFHVDGEKFAAHKFIIYSRAPGLRDLIRCYLDKDIYLNFDHLTGKMFELILNHIYSSYWPTEDDIDCIQQSLGPANPQQRTRTCEMFLPHLEKFQLVELTKYVQSYVRDHQFPLPNARKLFNRLYRSDHPELYDVRIVCKDGKVLGAHKCMLVARLEYFEMMFMHLWAERSSVTMEGVPAEYMEPVLDYLYSLDNEAFCKQGYLETFLYNMITICDQYFIESLQNVCESLILDKISIRKCGEMLEFAAMYNCKILQKGCMDFICQNLSRVLCYRSIEQCDGETLKCLNDHYRKMFKRVFDYRQITPFSEAIEDELLLSFVDGCDVDLNYRMDAESKLKQAAKHKQKDLRKQDARHQYEQQAISSMMRSLSISESTQGTEVPSSPQDSARSEDKNWSRVVDKKDQKRKLAETALKVNNTLKHEDPPTQELVPIERKPLKEQTPPPPSHETEPTTPLSKSYNLDFSSLTPQSQKLSQKQRKRLSSESKSWRTNNPPLVEQSSTPVAVPNAWGVTTTPSGSFNDSFTSPTTGSSTDPTSFANMMRGHATSSTTPTDQSQSFSRILADEKRQRESYERMRNKSLVHTQIEERAIAELREFYNVDNIDDETITIARVSRPSDINFSIWLRQ

SEQ ID NO: 17800 - DNA, 2482 bp, DROSOPHILA
cccgagtgaggttctggttattgatagttctgatgatgggccagtcaagtcttggatcgatggcatagagagcctattgtatttttccattgttgatctcccactgagatggcaggtataaaatgggccacatcgccgggtgttcatcagttctctcagagtcgtcgagcgagcaacatgaacgtagtaaaatctttgtgtattttgggtctggttctcgtcagcttgattgccacccaagcagccgatgagcaggtggtaggcggtgtcagccagttggagggaaacagcaggaaggaggctctggaacttctggatgccactctcgcacagttggccaccggagatggtcccagctacaagtgagttagaactgagttccgaatttaaaattcatactaattgatctgctgatcttagggcaatcaatgtgacctctgtgacgggtcaggtcgtagctggaagtcttaacacctacgaggtggaacttgacaatggatccgacaaaaagcagtgcaccgtgaagatctggactcagccatggctcaaggagaacggcaccaacatcaagatcaagtgctctggtgacgatggcgaactggaccgcacctggtagaagattcttcgtgagaattgccctgaaagaaataataataaaaaaaaaaacaagatacacgtgatttaaaaaatgatttttgattaattttcggggaactattgttgcaaagtatccaatatattgttgggaaaaataataggagtgtataaatacttgatttgctttgtttacgttccgtgctaaccaattcccatcgctaggcaattacacacatactatacatatacatatataagatactatatatttattgagataacaaccatagaagctttcactccaacaaaagctccagaagctgactcacaatcggaacggaacagagtgatatcatttcatgttttggttttggttttgttgagttttgctactatcgccgccatgtccaacgttccaattgtaggcgggatcagtcagctggaggggaatgagaggaaggaggctctggaactcctcgatgccaccctcgcacagttggccaacggagatggacccagctacaagtgagttaaggctaaactcggtctagagcttgccacttattaattgattttactccaattgaagggcacttaatgtaacctctgtgacgggtcaggtcgtagctggaagactcaacacctacgaggtgcagctggacaatggatccgagataaaacagggcactgtgcagatctggagtcgcgcatggctaaaggagaacggcaccaacatcaagatcaagttcccgggtgaggacgaactggaccacacctggtagaaggttttaccttagacctacatacagtttaactcttatcttaaatgttatacatatgttatatactggacttaattatagatacccttaggggggaaccatattcttgcgacctcaggtagcgtacagaagagagccttacctttactatctgggaggatttgtgtacatttggttacattaaaacatgatccgatggaaaaggttctcttgggtttcaggtacaagccggtgaagtaggttataaaactgttccgatgttggttaaccagttctgttggcataaccagtttgtttatatctcaatatatatatctcaataggtgaatcgtattatcttttctctcaactattgtgtgtgtttaattagtcagcgtgggcgtcatcagcggtgtcagtggatgttacaaataataattccccctttcttgctgataataagcttgttttttttaaataatcagaagacctttcgaaaacaatagacattagtaatttatcagaaacacaactggcaactggtaactaaactaaaagcgtcagtaaactccaccccctaaagtcatatattcattcttatcaaccttcattgaataatcattatctctcgaaaagtagaaatgaaaactttaaacatttgctaacgactgactcaaataaaggtgtactcacacagaatgattagtccatacaatgttaatgctcctgacctgggcaaacaattaaaatgatatcacaaaacgacaggcctgtgcaaaaccaaagtaaaatattaaccaataaactgaagattaagtaaaaaaaaagattcaaaacaagcggtttcaggtttgagtgcacactacttggcgcctctccttctttgggggccggttggcgttgatcgcgaataaataaatatacatacaatatattctcggcgagcaatccgatgatctcggtttcctctataaaagcggtcttctatgcgccgtgtttgctcagtttggaacaagtgtttcgagggaaatgcagtccgtgaaagtgatctttgttctgtctgtgaccctggcggttgcctttgctaacgtgagttcgagctgatattgttattatttgatatt

SEQ ID NO: 17801 - DNA, 418 bp, DROSOPHILA
atgtccaacgttccaattgtaggcgggatcagtcagctggaggggaatgagaggaaggaggctctggaactcctcgatgccaccctcgcacagttggccaacggagatggacccagctacaaggcacttaatgtaacctctgtgacgggtcaggtcgtagctggaagactcaacacctacgaggtgcagctggacaatggatccgagataaaacagggcactgtgcagatctggagtcgcgcatggctaaaggagaacggcaccaacatcaagatcaagttcccgggtgaggacgaactggaccacacctggtagaaggttttaccttagacctacatacagtttaactcttatcttaaatgttatacatatgttatatactggacttaattatagatacccttaggggggaaccata

SEQ ID NO: 17802 - protein, 104 aa, DROSOPHILA
MSNVPIVGGISQLEGNERKEALELLDATLAQLANGDGPSYKALNVTSVTGQVVAGRLNTYEVQLDNGSEIKQGTVQIWSRAWLKENGTNIKIKFPGEDELDHTW

SEQ ID NO: 17803 - DNA, 4877 bp, DROSOPHILA
tttcgtgtcatgtcttttgtttttattatacacctgcgttatattttgatggttttccatatagcaatatccaaatcattttccaaacgccccattttcttttttgctgtccatgcattcagttttcccttttcagtttagttgtagtctaattcgaaccaaacaaaaaacaatggatgtgtaaaaagtgatgagactattgatttttgtaatgagttgaactccaataaatggcgttgattaacccgaatgcaaaacagcacacgttccaaggctttttcactttttgatagtaaaattcatgctacaatttattattaaatgcagaaactcgtacataattgtgtgtaagcggaaaaccgccatcgaatttggcatcgtttacagctcctcgtggcgcgaagggaacttcttgagtatggcatggtagagactgtagaaggcgtacaccgaaaccgtgatgatcaccagcagagctccgccgaacgcgatgctcaggaagtttccatcgatgatgcccgccgagcggtggcgcttggtggagaatatctcctccgtggtcgccgggttgttttgctgctgggacgtccgctcggccatcagccgcttcatggtgctcagccgctcccgcagaacttccacggactcggtgtccaggtcagaggttcctagagcgattttgtttactttctgttctcattaaaatgaatatatgttattaatacctgtcgactgggatgcggaagcactgggataggtagacatatttggatctctgttctgtgctatttgtgaaaaaactgcagcttgagctggccaaaaacagagttatcttaaacgttttggggtgggtttgttagattttcgagttttaaaagcgcaggcgcgtaacggaaatcgcgcggcgttgccacccaatcgcgctgccaactgctttgatttgcgaagaacaaatcgatagaaacggctggcaatcgattgggaaccatctccaaacacgtgaaacgcgatttttgatttaccttatgtgttttgaatgctgcaatgggtttaactaaacaatatttggcctaccgggctatagacagctttaatatcatcacctccggccgcgccaatgtgaactttgccgttgtggacaagacagagggtcgatatgtggccgctccagctgctgaaaatgtgatcgtgtgggatttgcggtaaggctatttaagcttttcctttacttcgtttttaaactgacatgaatttatatttccccagaatgggcgatcgcaagctgacgctgcgccgcgaaaagttcgaggtcacctccctgagggtctcgccagatcacctgcacattgccgttggctatgcggatggcatggtgcagatcttcgatctcagctcggacaggtactacgatcccatctgtacgctggcactccacaagaacgctgttagcatcctgcggtacgatttgcagggcatgcgtctggtgagcggaggcctggacaccgaattggtggtcgtcgatgtggtggagcaggcgggaagagctcgattgagtggccacaatgccgccatcacggacgcccatttcctgcagcgtctggtagacgagagcatagtggtaagctgttcgaaggacacgcagatcaagttctggaacctggagacgcagttctgcttcaagacaatcgtggataaccgcaccgaagtctgggcactggcctttattgggaatctaatggtagctggcgccggcgaaagcggcatgaatgtctaccgcctgagaaagcacgacggtgccatcactgaaactctggagtctgcagttgaaggcctgtctattgatgacgaggacaccatcagccccattagcgtgagcaactgcggcaccatccagcgcgctggaaagggccgcaccgtcaacctggtgaccgatcccagtgaacgcgtgatcagctgccacggcactaatgatctaatcgagaacttctacatctgcacgccggacgaggtaaagaaacgactggctaagcgtctaaagaaggagaaaaaggtcgccgaagatgagggatcagacgaagcaaaactgtccacggaacaatcgctgagcgatgaaatcaagcgactggaaagcattcgtgccaagcaaaagatcaagtccatagatgtggttttgggccagaaccaggagctgcgtgtccttgttagtttggccaacaacagtctgtgcttgtactcgctggaggcgtctatcaaaacgcgcaaagcaaccgatcccagcgcgaaactacttaggtcacttactcgtctggggcaccagtccgaagtgcgatccgtatgcttcagcaacgattccctggccattggttccggagctggagaatcctttaagttctgggatcgagatgccatgcagtgcctgcgtactgtgccaacggactacatcctctgttcgaagtttgttcccggcgatcgctacgtccttctgggcatgaagagtggcaaattgctcattgtggacgtggcagcggctgatatagtggaggagattccggctcacgaaggcgaactttggtccattgccatactgcccgatcaaaagggttgcgtcactggcagcggcgataccacggttaagatctggacattcgagctgatcgatgccggcgagggtgctgcccaaaccaaggtgctgtccctgctgcacaaaaacacactgaagctggaggagaccgtgctctgtttggccgttagtccggacatgaagtacctggctgtgggcttgttggacgccaccgtgaaggttttcttcctggacacctttaagttctacctatcactgtacggccacaagttacctgtgatctgcctggacatctcctacgactccaatctcattgtaacaggatcagcagatcgtaacgtaaaagtttggggcttaaatttcggagactgtcatcgttccatttttgcacacgacgattcggtaatgagtgtacagtttatacccaggacgcacatgttcttcacgtgtggaaaggatggaaaggtgaagcagtgggatggcgataacttcgagaagattcttaccttacctggacacataggcgaagcgtattgtctgtccgtttctccgaatggccgatatttggtcacctgcggatcagatcgaactcttagaatgttcgagcgaacagatgagactattgtgttgaaggatgtgcaggaggaggagcgagagcaaatggagaatgagcaactggccacgggcgaggacaacacagttcccttgcttccgggtctgaagatgccgtcacgcaaaacagtgggttccgagcagtctgctgaatcgatactcgaatgtctggagatatccaaacagttcgagctcgaggcggaggagaaacccgagttacatcctctgatgcaggctttgcaggttaagaatcccgaagacttcctggtcagcaccctgatgaggatacgtgcgtccgatctggaggaggcacttcttctactccccttctccactgtgtgcgaagtcctcgaacgcctgcccactctgctgacccagcgacccgaccaactggagctgctttgccgcgtcaccatcttcctgttcaaggtgcacatgaagcccatttcggcggctaagaacatgaagccgctgctcgtcaagctgctctcgatgctcaagcgggacgttggtcagctgcgcgatgtcttaggatggaacctgcacggtctggccctgctgcaaacggaagtggagcagcgcgatggtgtccagctcttcagggaggccacacagacccgcaagaaacgggataagaagcggagagaagccagcaagcggaggctgcagattcaaatggtttgagacgcaataccctagacttagttgtataaatccaattaaaacgattagttattccgtgatttactggatttctatatttctgtgaacagagtttaatttgacaatgaggaatacaccataattcataagccatgtattggatcaccggcaattttctgtatatgcatatgggattgacaaaatcggataaaagcgatggtgcagcgaagcaaacggatagcgccgctcgattaatggatgcagttcgcaaagcgaaccctttgacaagcatttacaacagaaaacaacatatctctttagaagacgtggactgaaagatttagcttgaacataaaacgtagaactcgggatgagcttgggagacggattcttcagagcaaccataatgtatttccaggctaacaaatgccggctttgggaaaggtgccatcgttagcgccagttccacaaggacctgtttgggattatgcatttttttttataaatgctaggaagtaaatctggtgataacctacctccgcagcgctggaaggcacctggcggtccgtagctaagtttctggatggtacacttctcaataggtccggttggccggcagtaggatgtgtacctggcccacggcagtggctccttgggcggcacacagttcggcaagtagctgagtttgtatgtggtgcacttttccatgggtccctcgttccggcagaatccctgtcgtggtcggacggactcggcgcgtgggaaacaggtgacatccaccggcatgtacgacaacttgttcaccgtgcagcgctccatggctccagtgggccggcagaaggccgttctcggcatgatcggagccctcctcacgtggggcttggccacaaaatcgtgtttctgagtggtcatcgcatacatgggcccgtcgaatcgcagaccattttccatcgggcgaatcggaggagtgcgctccgtgcagttcggttgataggacagctaaaaagggagagattacgtg

SEQ ID NO: 17804 - DNA, 2813 bp, DROSOPHILA
tgaaacgcgatttttgatttaccttatgtgttttgaatgctgcaatgggtttaactaaacaatatttggcctaccgggctatagacagctttaatatcatcacctccggccgcgccaatgtgaactttgccgttgtggacaagacagagggtcgatatgtggccgctccagctgctgaaaatgtgatcgtgtgggatttgcgaatgggcgatcgcaagctgacgctgcgccgcgaaaagttcgaggtcacctccctgagggtctcgccagatcacctgcacattgccgttggctatgcggatggcatggtgcagatcttcgatctcagctcggacaggtactacgatcccatctgtacgctggcactccacaagaacgctgttagcatcctgcggtacgatttgcagggcatgcgtctggtgagcggaggcctggacaccgaattggtggtcgtcgatgtggtggagcaggcgggaagagctcgattgagtggccacaatgccgccatcacggacgcccatttcctgcagcgtctggtagacgagagcatagtggtaagctgttcgaaggacacgcagatcaagttctggaacctggagacgcagttctgcttcaagacaatcgtggataaccgcaccgaagtctgggcactggcctttattgggaatctaatggtagctggcgccggcgaaagcggcatgaatgtctaccgcctgagaaagcacgacggtgccatcactgaaactctggagtctgcagttgaaggcctgtctattgatgacgaggacaccatcagccccattagcgtgagcaactgcggcaccatccagcgcgctggaaagggccgcaccgtcaacctggtgaccgatcccagtgaacgcgtgatcagctgccacggcactaatgatctaatcgagaacttctacatctgcacgccggacgaggtaaagaaacgactggctaagcgtctaaagaaggagaaaaaggtcgccgaagatgagggatcagacgaagcaaaactgtccacggaacaatcgctgagcgatgaaatcaagcgactggaaagcattcgtgccaagcaaaagatcaagtccatagatgtggttttgggccagaaccaggagctgcgtgtccttgttagtttggccaacaacagtctgtgcttgtactcgctggaggcgtctatcaaaacgcgcaaagcaaccgatcccagcgcgaaactacttaggtcacttactcgtctggggcaccagtccgaagtgcgatccgtatgcttcagcaacgattccctggccattggttccggagctggagaatcctttaagttctgggatcgagatgccatgcagtgcctgcgtactgtgccaacggactacatcctctgttcgaagtttgttcccggcgatcgctacgtccttctgggcatgaagagtggcaaattgctcattgtggacgtggcagcggctgatatagtggaggagattccggctcacgaaggcgaactttggtccattgccatactgcccgatcaaaagggttgcgtcactggcagcggcgataccacggttaagatctggacattcgagctgatcgatgccggcgagggtgctgcccaaaccaaggtgctgtccctgctgcacaaaaacacactgaagctggaggagaccgtgctctgtttggccgttagtccggacatgaagtacctggctgtgggcttgttggacgccaccgtgaaggttttcttcctggacacctttaagttctacctatcactgtacggccacaagttacctgtgatctgcctggacatctcctacgactccaatctcattgtaacaggatcagcagatcgtaacgtaaaagtttggggcttaaatttcggagactgtcatcgttccatttttgcacacgacgattcggtaatgagtgtacagtttatacccaggacgcacatgttcttcacgtgtggaaaggatggaaaggtgaagcagtgggatggcgataacttcgagaagattcttaccttacctggacacataggcgaagcgtattgtctgtccgtttctccgaatggccgatatttggtcacctgcggatcagatcgaactcttagaatgttcgagcgaacagatgagactattgtgttgaaggatgtgcaggaggaggagcgagagcaaatggagaatgagcaactggccacgggcgaggacaacacagttcccttgcttccgggtctgaagatgccgtcacgcaaaacagtgggttccgagcagtctgctgaatcgatactcgaatgtctggagatatccaaacagttcgagctcgaggcggaggagaaacccgagttacatcctctgatgcaggctttgcaggttaagaatcccgaagacttcctggtcagcaccctgatgaggatacgtgcgtccgatctggaggaggcacttcttctactccccttctccactgtgtgcgaagtcctcgaacgcctgcccactctgctgacccagcgacccgaccaactggagctgctttgccgcgtcaccatcttcctgttcaaggtgcacatgaagcccatttcggcggctaagaacatgaagccgctgctcgtcaagctgctctcgatgctcaagcgggacgttggtcagctgcgcgatgtcttaggatggaacctgcacggtctggccctgctgcaaacggaagtggagcagcgcgatggtgtccagctcttcagggaggccacacagacccgcaagaaacgggataagaagcggagagaagccagcaagcggaggctgcagattcaaatggtttga

SEQ ID NO: 17805 - protein, 922 aa, DROSOPHILA
MGLTKQYLAYRAIDSFNIITSGRANVNFAVVDKTEGRYVAAPAAENVIVWDLRMGDRKLTLRREKFEVTSLRVSPDHLHIAVGYADGMVQIFDLSSDRYYDPICTLALHKNAVSILRYDLQGMRLVSGGLDTELVVVDVVEQAGRARLSGHNAAITDAHFLQRLVDESIVVSCSKDTQIKFWNLETQFCFKTIVDNRTEVWALAFIGNLMVAGAGESGMNVYRLRKHDGAITETLESAVEGLSIDDEDTISPISVSNCGTIQRAGKGRTVNLVTDPSERVISCHGTNDLIENFYICTPDEVKKRLAKRLKKEKKVAEDEGSDEAKLSTEQSLSDEIKRLESIRAKQKIKSIDVVLGQNQELRVLVSLANNSLCLYSLEASIKTRKATDPSAKLLRSLTRLGHQSEVRSVCFSNDSLAIGSGAGESFKFWDRDAMQCLRTVPTDYILCSKFVPGDRYVLLGMKSGKLLIVDVAAADIVEEIPAHEGELWSIAILPDQKGCVTGSGDTTVKIWTFELIDAGEGAAQTKVLSLLHKNTLKLEETVLCLAVSPDMKYLAVGLLDATVKVFFLDTFKFYLSLYGHKLPVICLDISYDSNLIVTGSADRNVKVWGLNFGDCHRSIFAHDDSVMSVQFIPRTHMFFTCGKDGKVKQWDGDNFEKILTLPGHIGEAYCLSVSPNGRYLVTCGSDRTLRMFERTDETIVLKDVQEEEREQMENEQLATGEDNTVPLLPGLKMPSRKTVGSEQSAESILECLEISKQFELEAEEKPELHPLMQALQVKNPEDFLVSTLMRIRASDLEEALLLLPFSTVCEVLERLPTLLTQRPDQLELLCRVTIFLFKVHMKPISAAKNMKPLLVKLLSMLKRDVGQLRDVLGWNLHGLALLQTEVEQRDGVQLFREATQTRKKRDKKRREASKRRLQIQMV

SEQ ID NO: 17806 - DNA, 3726 bp, DROSOPHILA
tgccctcagtagaggttcaatatacttataactaccaatttaaatcatatttttttcatcatctattatcacagtagtagtcacattcatattcctgattgtaaaacgcatttgtgccaccagttgagatgcaataaatcaatatccaccgaatgctggactgcagtttctgttgtgggtaccgcttcgctccgctgactgactggacatccgccccaggatccttggagaagcctccgtaaatcacagacaattggatgaccatgagggcaaaacttttagctagccaaagtatttggccaactgttgtaaaacaataaaacggaaggcatgcgatgggcaaaatgggagtggcagtgagggcgactggggcggaaaaccgatgccgagattttcaaatacttaacaccacttaagcgaacagttggacaatgacaatgacgggggattcggattgcgattgggaattccaaagagtccaaggtggggatttgattgttaagcgtaatttagcgcaagaatttttattaaaatttccaatttgtttgcagataaacttttatgctggccgcaatgagttgactgggtgatcgatggactgtgctgctaaatggtataatggttgggcacgcagttgaatgaaacctaagactatatgaagatgacaagggagttatgaatgtctgagctttcccttttagaacagagcaagtttccgtggtctcgaactccctaactgcgttcatttgactatgagcccaactatatgagaaggctgcagggtcagaggtttgagcaagtggcgcacaagtattccaggtattcaaacgggcaacaaaagaacaatggacccgagaagttggcaaccaggacatgtgcagccaatgcgcaatatcgggaataaagggcgtaacacggcgtatccttgctcaacagctgccataaaagttttactccaacgaggcctccaagcaccttcaacacttggggaggccactaattaaattaaattttcggcttcacattcgctcgatgaattaagtgtcatgtcaaaggtgaaaggtaagggctccatgggcagaagactttcgtgcggaaagcatttccttgcgagtcctgtggacacggtccgttcaattaatttggccacaaactttgctcgggctgttgtttgcccaatttgatggctgaaattttcggcccggaaggagtttcgttcatgacaaacttgttgctcccgttctttggggaaattcccaggtctaccgagttctgaacccttgtcaaacgaaaaatgaagctccgctaaggtgtcaaagacattctggccatcaatttcatcagatcggaacccctttcgacagctcaatactctcgtaaaatgaattcaaattctaattcaaatttggtgcccatgcatttggtggttttcccatttttatttttgcatttcagttgaagtggccactgcacactaaaattttgtcggttaattacgttcacggctaattgcatttctgtggcttaaaatgccgcaaaatttgttaacaaaatatttgcaaaaacatttttgcacaattagcccgatcattgtgtgttttatgccgcatgtccgtgtgcgtattcattatgcgcatttttgcacccgtaaaatgcgaaactaggatgcccgtttaaattacaatattggcgtttttgtggttgactgcatttttaattatctcaatcggaaatatcgacagcgggggtgtatttttcctgcttcgccaaaggagcagcccaggcgaacttgaaggatcttcgctccttttcaattgagctcctgcgcttggtcacctgggtgctcttgtccagcagcaacgatagctccgatatagatggaagttccatggtatcaaagttcttcaatgtcagcgcttcgtccaccttctgggtgtacttcaatagctccccgtggcatttcagtagcgttttccgggatttactcagagcgcttaccaagtcattataatcctgcttattgcatataagaggggccttgaggttggatgatagaattagtatttataaatagtatgcttagagagttgccaatacctttgatgcgaaacagaacttcatgttggtttggatgggtcggacgaagttgtcactgtagtcgaggtagtttcctcgggaaatgtccaggtcattatatcgctccaaacacaatcccgtgttgtgcttcagttcctccttccacttgggcacttcgagcagcctcttggacaactttctgatgcatcggatgtttttccgtgccttttcgtccagtccagtcagagagtcagttgtctccttgagttggcgatttacgtcgatgatctgctgtaaagctcgtactgtgtcctgttgtactactctcagttcgtcgttgtccgagctagactgctcgatgtccagtctcatctggtcactttctggaggacattcgactttgtttacttgtactggatgaattaggaggctcttcaaatatagcacacgttctctcatcctttccagcttatcgaaagtctttgaaagttccaactccgatggacactcctcttcttgaattggtatgttatctagagcggagatgctgcagtgggtcagttcagattcactaggagtttctagcagtccaggagccttgcagtccatatttttaatttttttttagcttactaatatatgttctgtgtagtgtgaatgtgtactaagtcatggagtgctctgataaaaatatgctatattacttttgaattttttttattcaataaactttgtgtgttgcatatgaatgaaactaagaaagtaaagaataccttccataaagttttacgttttaacggttctttaaattcttaatttatttacctaataaaattacttattaccaggatgttaagatcattgtttccagttttggtatttatgccttcagcgttttaatgaaaatgcctggccagagtgccacaaagtatgtagctcgcacaatgttgcatgcagtagagattcttctacttcggaaaagggcacacacctgaaatttggccaaaaggggctgaaattccctgctgctaatgatttttaatagccaaattgcaagaagctgatgctgcagtgggtctcagctgccttcgtcctggaaatgcctcttaaaagcgtatttgtggtaagactccaggcacacacacacacacacacacaaattctctccatgcggtcaataaagtatgcaaagtggtagcggcaggtgagggtaaatgtgggcggaaatgtgggtggagtgaccatgctgaccttaaaaacaaattagtggcgcttactcaacaagattgagtggctcgtgtatcgctgtcatcgccgtcgtcatcattggtattctgctttttgatcaggggcaaaatcagaaaggggggttggattttattaaccagatgttattaaaccctcaatttcataataatatggatttaaatatgttagctagataaatcatttgtaaataatagtcatctaaaatgagatctaaatattaacatatttactttagctagtgtataactgtattttacttatttgattaccaaatcaattaaaataaagtcaattaaattgcaagcattgatgaaaccaaaatccatattaatgaatctaattatgaaccccttaattcatattttttcgcgccactgtcca

SEQ ID NO: 17807 - DNA, 1184 bp, DROSOPHILA
acacagaacatatattagtaagctaaaaaaaaattaaaaatatggactgcaaggctcctggactgctagaaactcctagtgaatctgaactgacccactgcagcatctccgctctagataacataccaattcaagaagaggagtgtccatcggagttggaactttcaaagactttcgataagctggaaaggatgagagaacgtgtgctatatttgaagagcctcctaattcatccagtacaagtaaacaaagtcgaatgtcctccagaaagtgaccagatgagactggacatcgagcagtctagctcggacaacgacgaactgagagtagtacaacaggacacagtacgagctttacagcagatcatcgacgtaaatcgccaactcaaggagacaactgactctctgactggactggacgaaaaggcacggaaaaacatccgatgcatcagaaagttgtccaagaggctgctcgaagtgcccaagtggaaggaggaactgaagcacaacacgggattgtgtttggagcgatataatgacctggacatttcccgaggaaactacctcgactacagtgacaacttcgtccgacccatccaaaccaacatgaagttctgtttcgcatcaaaggcccctcttatatgcaataagcaggattataatgacttggtaagcgctctgagtaaatcccggaaaacgctactgaaatgccacggggagctattgaagtacacccagaaggtggacgaagcgctgacattgaagaactttgataccatggaacttccatctatatcggagctatcgttgctgctggacaagagcacccaggggttccgatctgatgaaattgatggccagaatgtctttgacaccttagcggagcttcatttttcgtttgacaagggttcagaactcggtagacctgggaatttccccaaagaacgggagcaacaagtttgtcatgaacgaaactccttccgggccgaaaatttcagccatcaaattgggcaaacaacagcccgagcaaagtttgtggccaaattaattgaacggaccgtgtccacaggactcgcaaggaaatgctttccgcacgaaagtcttctgcccatggagcccttacctttcacctttgacatgacacttaattcatcgagcgaatgtgaagccgaaaatttaatttaa

SEQ ID NO: 17808 - protein, 380 aa, DROSOPHILA
MDCKAPGLLETPSESELTHCSISALDNIPIQEEECPSELELSKTFDKLERMRERVLYLKSLLIHPVQVNKVECPPESDQMRLDIEQSSSDNDELRVVQQDTVRALQQIIDVNRQLKETTDSLTGLDEKARKNIRCIRKLSKRLLEVPKWKEELKHNTGLCLERYNDLDISRGNYLDYSDNFVRPIQTNMKFCFASKAPLICNKQDYNDLVSALSKSRKTLLKCHGELLKYTQKVDEALTLKNFDTMELPSISELSLLLDKSTQGFRSDEIDGQNVFDTLAELHFSFDKGSELGRPGNFPKEREQQVCHERNSFRAENFSHQIGQTTARAKFVAKLIERTVSTGLARKCFPHESLLPMEPLPFTFDMTLNSSSECEAENLI

SEQ ID NO: 17809 - DNA, 2642 bp, DROSOPHILA
caactggtttgcagggaagccaacaaaccactgcccaagaaactcaggcacacaatgagactaaataagtcggccaagcgaaagggatacgagttctacatgagcgacgaggacaggaggtaaggaagtcatattgtggtcttgaccagaaactgtagggatgaagatgacgggttgaaatgatgaaccttttaagatttcgagtgtataaaaaatgaaatactcagcgaggtaatagataaattacactacctttttgattaaaaaaattgagtgaaaacgaacgtgagtgaaaggaatgattaggaatatataaaaatacgctaatacttaaaataagtagtttcgttaagatatgccttttgtagtttggtgcaaattatgtaaaattatcttttcaaggttttcttacattgtgaaattaaatatttattagtagatttatctttagagcccgttataaagactatctttctaccgccgattagatacaagagccgatgggtgaggtagcataatagcttgtggctgggggttatccatgggatgtgtcaggaggggcatgctccattgtgacgcttccaattagaaaggccgagtaattgtgtcgctgacattgaccaattgacacactggccactgaacgcactgaacaagttagccttttgtgtgcactaatttaatttgaccgccaagattataagaagtcggaaaaagagaacattctcataaagttcactttaagttttatttttaaattcccttcaatcaaattataccgtaaccgaaaaagtctttagtttgaatggtgcttctttgttttggttgtatgttttattgtatgcatgtatcatttaattttataacaatttaagccactcatttctattgagaatggatattgatgagtattatatttgcaggagactggatgagtatacctaccggaattccgaactgtccgcgcggattggagtaccttacgactatcgaccagcttttagttaagcaaaaggtcgagctgctcgaggccttcactggtttcgagaccaacaacaagttcacgatcaagaacgccctgggtcagaaggtctatttcgcggcggaggacaacgactgctgcacgcgcaattgctgtggtcctgcgcgtcccttcgacatgcgggtctttgataacttccagcaggaagtgatccacatgcaccgcccgctggcctgctcctcctgtctgtttccctgctgtctgcagagtatcgaggtctcggcaccacccggcaatgttatcggcaccattgagcaggagtggtccatctgttcgccatccttccgcatcctcaaccacgtgggtgacacggtgatgcgcatcgaaggacctttctgcaccttttcgctctgcggcgacgttgagttcaatgtatgtttataaaattcaaatgttctgtgtgattttactaatattttttgattctcaggttgtttcgctcactggtgagaagataggcaagatctcgaaacagtggtcgggcctggcacgtgaaattttcacggatgcggacttcttcggcatcaatttcccactggacttggatgtgcgcatgaaggccgttttgctgggtgccacattcctcatagtaagtgttttcttttcagcaaagatttattgtagttatttatcattggcctctgccaatcagttgtatagtgttcatttttatcggttcaagctgttaagacgtctgcaacgcagacttcgttggtgctgaggtaatgttgaccctccagcccattaaatcctccagcttagtttgagtaggctagtccagcactaagtccttcactcgtcaatgttttctgtctgttttctaaacgaatgctttctgtttgccccacaggatgccatgttctttgagaaagccggaaaccaagagaccgataggcccggaatgctttaggaatcgggtgctggcttgtgcgtgaattgtttatgcgttgcaaccgattgttgtggcgtttgtggcaattgcgaatgcgattgcgacgattaaatgttgtgcattatcttgagttgcaactttatccaaatatcttcccggtgaactgtcgcgtactagtcttctgtaccaaatgcttattgatgaaaatggatcgcactaatgaaactccttgttaattttgatgaacatactgaactcaggcttccttcgagaggacattgccagaatataaaactaactttaagttagcattttttgctattttgccacagcaattacttgtgtaaagtattcaacgacaaatcagctttatttatgaattttgtattgatgctctgaagcgacaactaactaacgaatgattcgttattgaaacatgtactttaaactgtatgttaagtgtcttatggaaagaaaaatatatttaacattgtatattgttaagcatcaggaaatttatatatatccctactgatattatggaacagaaggttttctttttatgtattacaacaaaagttaaataaattataaacttatatactggttaacgataaattgctggaacccctagataaattcatagtccgtaatactcgaatgtttctaaattattttgtttcacaacgaaaatgtatgtttttaaaa

SEQ ID NO: 17810 - DNA, 548 bp, DROSOPHILA
aaaacacttactatgaggaatgtggcacccagcaaaacggccttcatgcgcacatccaagtccagtgggaaattgatgccgaagaagtccgcatccgtgaaaatttcacgtgccaggcccgaccactgtttcgagatcttgcctatcttctcaccaagcgaaaaggtgcagaaaggtccttcgatgcgcatcaccgtgtcacccacgtggttgaggatgcggaaggatggcgaacagatggaccactcctgctcaatggtgccgataacattgccgggtggtgccgagacctcgatactctgcagacagcagggaaacagacaggaggagcaggccagcgggcggtgcatgtggatcacttcctgctggaagttatcaaagacccgcatgtcgaagggacgcgcaggaccacagcaattgcgcgtgcagcagtcgttgtcctccgccgcgaaatagaccttctgacccagggcgttcttgatcgtgaacttgttgttggtctcgaaaccagtgaaggcctcgagcagctcgaccttttgcttaactaa

SEQ ID NO: 17811 - protein, 147 aa, DROSOPHILA
MRNVAPSKTAFMRTSKSSGKLMPKKSASVKISRARPDHCFEILPIFSPSEKVQKGPSMRITVSPTWLRMRKDGEQMDHSCSMVPITLPGGAETSILCRQQGNRQEEQASGRCMWITSCWKLSKTRMSKGRAGPQQLRVQQSLSSAAK

SEQ ID NO: 17812 - DNA, 7124 bp, DROSOPHILA
agtgtgcaggagccattaaaccgaaattgccagacataaagctgaaacttaaccgcaggcagccgtcattaatgcgttcgcatcataaactttatattgcagcaggccgcgtgagctgtgcggacatcaagtgtgggccaaaggataactgcctggtggatctgcagacgcgccagccgagatgcgtgacctgtcgctacaagtgtccgcggaagcagcagcgaccggtgtgtacagattttttgtaaataaaacatttcctttcctattatgaattaattttgtaatattaggtacacaaaatatgcggctacaacaaccagacatacaactcgtggtgtgagatgcacaaacactcctgcgaatcccgctacttcatcggcgtcaagtcccagggtagctgctaggagatcggatgcatctctcgaccacatcggcctagggctttatgtagcgtgttcttccgtagctccaacatccaaagattctcgttgtgcgttttcgtgttgtaatcggtggatgggcctgcggctgttgcccaagcctaccgagcttacactacatattatccgatacacttaacatacaggcaaagtattatcaaccttacaacattacgtattgcagcaaatcttatccagcatgtatcgcaagagaaaccacatatcttaagaggcttttgtatttaacattaacattaggctacacgataattaatttaaacgatcggtttgtatgcccattaggctcgcaattagtttagaccaacgtgtgcgaagtcgtatttatttaacattaccttcccctattctttttgtttataagcgaagctaaattaattaattgactgatagcttaaccttatagcaagatttttgaattaatatatacatacatagaatctatgtgtatatacatacatatatatttacatacacttataaatatgtttgagtaattgttaattaaatgtgtttccaacatcattcaaaatgtctttctaatcactatcatccgattgtccaaacatatcactggcgcgctgatatcgcgcctgagtgatcttcaagttggccagcttccgtttgtcaatggttctggagctggacagcactgggtcactgtttcccagaccgctagtgccctcattggctaccacattgatctgcgaacgggttggtattagaagtagtgactagctttataagtctaaaacacttaccggctccaaaagtccagcactggcatttgttttgcccagtttttcgcccttttgccagcccaatttactcagcattttaaaacccttattagagctaccgatttcactaaaaacgaataacacattggtcaaccaattcaagttaagatgtgtaagctgatactcacgtgttcacacaagccacctcagtcttttctttatctgtactgctgcccacctggactctccttgttgcggcacgatcattgtagttggactgcccattgccgctagtatcaacgaattctaaaagtgaattaaggattgtcaaagtaaagtgagagtataagttgtcttgtatttactttcgttttctagtccatatttgcgctgcagtttttttaactgctccttgtgagataatacggatgcggtggatgaggcaacagcggccactaccggcggagaattctctatcaaaaggcccggctcgcacaaaccgcaggtactgttaccctcgtggacatgacacagtagtcttgtttggcccagagtgataacactgccgtgaacgagatccatggcgtcgctggacattggggatccattgagaatggtaccgtttcgggagcccagatcaagacattggtagattcccaacttgttctcatacttaaactttaagtggcacttgctgacgttcacgtccggaatgataacatcgtgagcgccctcccgtccaagagatccacctttgtatgtgattagatgcaggcttcccactttcagcgactctacgttagtctcctggacaatgatgcggagggagggtggatactttttagcaatgtctaagcaaagaagaaagcgttagttaaacaaacagggaagagcgcgataaaaacgcggataacttaaacaccttgaaagcgtccggcagccttgaaaactggaacactgctgtcttccgtgttgctgctgctatcctcgttgctagagtcggaactggagtcgctgctttgcgacagctcgccctcctcggcatcattagaccgctcatcatcagaatgcctgtgacgcttcttggacttgtgacggcgctccttcttggatctcttcttgctgtgctttttactcttctttttcttggctttgcgcttggatttttcagcttgatctttggccttttgcttctcggccttaatcttcttcagcgtttcgtggtccgtaatgacgcctcccagctcatcgaactgcacctccaaatcctcgtcctccgattccggtttggccgcatcgttcgcctgcaaccaagttaagaaaagaaatccgcgtttttatcgcacattctggaccttgactcttacctaatgcattgctacgcattcggtctatgcggagtttgtgaaaccccgctaaaagactactataggcgcagtcgctcaaaggctgcgcagcgaggaggagaagaacagtggttaatgtggtcgtatggcattgaaatccgcaactacacccactcacctgtacctgggcctgagagtggaactcgtacgagtctttggcgtgatcatagctgtagtagcagccgttgttaccatcgtagtacagcccgtactcctgcgaggaagagaaaagcaggtgtagattaacaacaatccgagccattgatgtaggtttgccagcgcgataacccctgaaagtcatcgcggtgcagtcactgcatcgcggaatagaacgggacgtcataaagattgcgtccgctgtttatagcttatttaccgcgttatagtagtatcccgtcttgggatcgtagtacatgccagaggtgtgctcgtaaacgaagttgttcaggttttcggcgtgcttggctgcctgcctcatttcgtccacaaaactgaaggcgtccgtcgccgatactgcaaatataaattattttccaaacatgacttgtaatgttttgatggttattgataaggttttataaatatttaagacaatatagaaataaaaacagaaacctgtggtgaacgacacgaaaatgagcaatgttatcagcagttttgaaaaacatttccttatttcaactttaaaaatagtcggaaatgggttgtagttatctttacattcataaattaatgtttatagttatatgtatttagacgaactataaagtagctatttaagtgttagtataagaattctaattatttttctaatcccctgagttttgcgtaatcatattaattctattaagagtagtgtcaagggctgctcggatttttgtcaggggcagtggcgttagcccatgcgacacttcagtgcttatctcgggcattaccggcatggaatgtttgacgtactcgacctaggaccccgccaatactcctcaatagatagacaagtgggtgggttgcgcttgtaagatgcggtccttgaaacggccttatctcatcgtaactaagaaggcgtgttgcagctaatatcgccctgtgacaatttatggcttttagaaagtaaaaaagtgaaatacggccttggccattttttccggaaatatggcactctacgaaaagttatacaacaatttagtacaacggaggacaccttatttgtagatactgaaacactttttaatagtaatctcttaatggattcttgtgccatgcgatcggtgtccatccgggatttattcgcagagttaattgtgacatatttcctcctttccaatagtcggctaaagacgatctacaattaatttgtagggtgccgaatctgaagctattgccaccaattgacaagcggcaaacgagacaacgagcgattagcatgtcgcgcagttgtagtttcagattcggaatccgcaaatcagctacttaggtgtgttttcgtttttaatttgctacgcagcgcccatattgcagcggcagcagttgtttccaaggcgcactgcatctcaacgcctggctcttatcaggcacccagggcaactccaaatcgccgtgggctcgccaggcgcctggttagtcgttactcatcgttcgaggcggttacaactaagacagatagattagccaagcaaaatgctggacgcggaggtgcgagaacttatgcaaccctttgtgttgagtgattaccaggtgcaggaagtgtacagtcgcttttgcctggaagtggcccgtggacttaagcggtccacgcatccacaggccaacgtcaagtgttttcccacgtacgtgcaggatctgcccacgggcgacgagatgggcaagtacctggccctggatctcggcggtaccaacttccgagtactgctcgtctcgctgaaaggtcaccacgacgccacggtggattctcagatctatgccgtgccaaaggacctgatggtggggcccggtgtggacctattcgatcacattgcgggctgcctggccaaatttgtggagaaacacgacatgaagaccgcatatctgccactgggcttcactttttccttcccttgcgtgcaactaggccttaaggagggcatcctggtacgctggactaagggattcgattgtgctggggttgagggcgaggatgtgggccgcatgctgcacgaggccattcagcggcgcggagatgccgacattgccgtggtggctatactcaacgataccactggcaccttgatgtcctgcgcccatcgtaatgcagattgccgggtgggtgtcattgtgggaactggctgcaatgcctgctacgttgaagatgttgagaatgtggacctattgcgcgcagactttaaaaaaacgaagcggagtgtgattgtaaatgctgagtggggcgcctttggtgagggtggtcagttggactttgtgcgcaccgaatacgatcgcgaagttgacgaaaagtctctaaaccgatcggagcagctgttcgaaaagatgacggcgggcatgtacttgggcaacctggtgcgccttgtgctacttcgtgccctcgagcgcaagctgatctttaaacagagcagtcgacgtccagaattcgccagcgtgctgcagagaaacgaagaggttttcgagacgcgctacatttcggaaatcgaggacgactccttcccagagtttgccagcacaaggaagattgtgaaaaatctgtttggtctagagaaggcctccgtggaggactgccagactctgagatacatctgcgagtgcgtagctaagcgagcggctacattagtagccatcggagtcagtgggctggtgaacaggacttccaaccgccgcgtgatagtcggcatggatggctccgtctaccgataccatccaaagttcgatgcctacatgaggcaaacactccaaaagctggtgaaagcagacaaggagtgggacatcatgctctcggaggacggatccggacgtggagctgcgctggtggccgcggtggccagtaaaacaaagtaggaactcactactattgtagcaataatagaaggactcagtgtaataaaacaaattttaactcacaatcgttgggctggtcttttttgttagtatcctcatcgttttccatggaatactggcattcttgtaattccgattcagttgcttggctggctttgtcacacgaaaccttttcttcccggcttacctttaaaatagatcaaaaattaagaccattttagctcaacctttaattgggactcacgtagtgtaggagtttttgtttataggacgccagtttggtgtcgtatttgcggataatcccgtgcagcttttcgacgtactgcagtagttgttgctgctcgcaggtttccaggtcctgtatgctcttcaattcgatggaatcgtacttggcgacagtgtccgccaaatcctcctcttcagccggtaacgacattgtttaacaaccgtcgaatctaaatcaactttttatagggatcacaagccgatttggggagtttcagctagagatggagaaacatcgatgctagcatggatgtcatcaatgttttcaaaaaatcgcattcatcgatgttttcgaggaatcatcgatgtttttccatctctacatcgcatctgaggagaaaagcgtataaattgtaagtacaaattaattttccatatcttctaatacaattattaataccatattgtggcgtcgtgatagacatggaaaatatctgagaagaaagtttttaacacccgaaaaaggcttgcacatatgaatgcatgtcatatgcacgtctaaatgtatatacatgtatgtatgtaaacgtgcatttgtcttataggagcaattactggaccagcggaggatgaaaaggtggacaccaaatactgacgttttatttaagcaacattaaaataaaaagcaattatttttatttaaagcatcgatgtttaaaacgtcgatgttattcgccaaaaacatcgacatccgccaacatctagtttcatttcaactaacagtcgttttaagcactggtggctgcaaagttaatcgatttattaagagatggttgcttttacacataaaaaaaatatgcctagtttttgaaaaaaaaaacaacttagttcttatcaagataaaataaatatggcaacggcctaaaagaaaaaaaactttttcggtatttttaaaaaaacaagtagtttaatagcaaattggcttccaatacatttccaactgggattaattgtctatcgaaaaaagtgtcatctctacccaaccaaacagctgttccctcatctacatttgttatttaaccattttggtcgccgaaaaacgaaataagaatgaataattgtattaaagtagtgcccattgccctaaggtgccagcagaggaccatcagtacttcatccgtgctggagggcaagcggaacttccgtaaatttaacgcatacaacaagcgcggtacgcgcgtggtaaagga

SEQ ID NO: 17813 - DNA, 1845 bp, DROSOPHILA
cctataaaaagttgatttagattcgacggttgttaaacaatgtcgttaccggctgaagaggaggatttggcggacactgtcgccaagtacgattccatcgaattgaagagcatacaggacctggaaacctgcgagcagcaacaactactgcagtacgtcgaaaagctgcacgggattatccgcaaatacgacaccaaactggcgtcctataaacaaaaactcctacactacgtaagccgggaagaaaaggtttcgtgtgacaaagccagccaagcaactgaatcggaattacaagaatgccagtattccatggaaaacgatgaggatactaacaaaaaagaccagcccaacgatttatcggcgacggacgccttcagttttgtggacgaaatgaggcaggcagccaagcacgccgaaaacctgaacaacttcgtttacgagcacacctctggcatgtactacgatcccaagacgggatactactataacgcggagtacgggctgtactacgatggtaacaacggctgctactacagctatgatcacgccaaagactcgtacgagttccactctcaggcccaggtacaggcgaacgatgcggccaaaccggaatcggaggacgaggatttggaggtgcagttcgatgagctgggaggcgtcattacggaccacgaaacgctgaagaagattaaggccgagaagcaaaaggccaaagatcaagctgaaaaatccaagcgcaaagccaagaaaaagaagagtaaaaagcacagcaagaagagatccaagaaggagcgccgtcacaagtccaagaagcgtcacaggcattctgatgatgagcggtctaatgatgccgaggagggcgagctgtcgcaaagcagcgactccagttccgactctagcaacgaggatagcagcagcaacacggaagacagcagtgttccagttttcaaggctgccggacgctttcaagacattgctaaaaagtatccaccctccctccgcatcattgtccaggagactaacgtagagtcgctgaaagtgggaagcctgcatctaatcacatacaaaggtggatctcttggacgggagggcgctcacgatgttatcattccggacgtgaacgtcagcaagtgccacttaaagtttaagtatgagaacaagttgggaatctaccaatgtcttgatctgggctcccgaaacggtaccattctcaatggatccccaatgtccagcgacgccatggatctcgttcacggcagtgttatcactctgggccaaacaagactactgtgtcatgtccacgagggtaacagtacctgcggtttgtgcgagccgggccttttgatagagaattctccgccggtagtggccgctgttgcctcatccaccgcatccgtattatctcacaaggagcagttaaaaaaactgcagcgcaaatatggactagaaaacgaaaaattcgttgatactagcggcaatgggcagtccaactacaatgatcgtgccgcaacaaggagagtccaggtgggcagcagtacagataaagaaaagactgaggtggcttgtgtgaacactgaaatcggtagctctaataagggttttaaaatgctgagtaaattgggctggcaaaagggcgaaaaactgggcaaaacaaatgccagtgctggacttttggagccgatcaatgtggtagccaatgagggcactagcggtctgggaaacagtgacccagtgctgtccagctccagaaccattgacaaacggaagctggccaacttgaagatcactcaggcgcgatatcagcgcgccagtgatatgtttggacaatcggatgatagtgattag

SEQ ID NO: 17814 - protein, 601 aa, DROSOPHILA
MSLPAEEEDLADTVAKYDSIELKSIQDLETCEQQQLLQYVEKLHGIIRKYDTKLASYKQKLLHYVSREEKVSCDKASQATESELQECQYSMENDEDTNKKDQPNDLSATDAFSFVDEMRQAAKHAENLNNFVYEHTSGMYYDPKTGYYYNAEYGLYYDGNNGCYYSYDHAKDSYEFHSQAQVQANDAAKPESEDEDLEVQFDELGGVITDHETLKKIKAEKQKAKDQAEKSKRKAKKKKSKKHSKKRSKKERRHKSKKRHRHSDDERSNDAEEGELSQSSDSSSDSSNEDSSSNTEDSSVPVFKAAGRFQDIAKKYPPSLRIIVQETNVESLKVGSLHLITYKGGSLGREGAHDVIIPDVNVSKCHLKFKYENKLGIYQCLDLGSRNGTILNGSPMSSDAMDLVHGSVITLGQTRLLCHVHEGNSTCGLCEPGLLIENSPPVVAAVASSTASVLSHKEQLKKLQRKYGLENEKFVDTSGNGQSNYNDRAATRRVQVGSSTDKEKTEVACVNTEIGSSNKGFKMLSKLGWQKGEKLGKTNASAGLLEPINVVANEGTSGLGNSDPVLSSSRTIDKRKLANLKITQARYQRASDMFGQSDDSD

SEQ ID NO: 17815 - DNA, 6671 bp, DROSOPHILA
ccctaatccctcctcaccgccccccccccaactccccccctttcatccaccagtgaattttctttggcattttacaaaagtgacttctccattttcccgccgccatcgatgtgtacaaaatgaactttaaaggctcggcgagactttaataaactggttttgtattcacaaacctcaatatttccccaaaaaccccacccacactattttcagatacacacaagcaggtgggcggcaggactttagcttatgatttttgggcctaaaaatgtgcgtttcgctttttttccttctaataataaataataaataataaataaagtcttgattcagttacggctgtggaatatgtcgtggttgtgcttaacttaaatggtaatcaaaagcagatatttcgcaagtaatttatcacacagtcaattgattaattaggcattaactaactatatataccagctaacacactcttacatatagtatatattttctaacaatttgcttctcgattcgcgttgttctaacaaagagagctaacttatttttgtataatgtacatcattttgcttattgtattaaaatcttacctaatcttacctaaaaaataaagtctcagctacagaagcttttgatatttgtatctttaaaatgtacaattacttcatcatactatactattcaataactaaatgcttgctagatatgagatcaaaatagtaccgtgatatatcagaatcagaatggaaaatgggaaaatgggaaaatgggtgcactgaaaagcattgaagttggccgaacaaaaaaacacacctacactatatctccgtttatgcgtgttcgattaggaactaggttaagagaaatttgaacaaatcgaatactttttacaagtttgtgtaatttttgtgtccttctaggaacttatttcaattgcattatgtttatggtggcctcatcagttgtgtcaaccatacttatcctcaattatcatcatagaaatccagatacgcatgaaatgagtgaatgggtaatatttttatattcaaattaactttactactttcatacattgtaaaaaaacaaaaaaaaaaagaaacaaaaaaaaaaaaagaacgaaaccaatgcaatataattttctttccacatatatatcacaacataccgattatgtttcgaatttttgcattattccactgctaaacatatgtatatttattgtttgttacaaacgttttttggcttaccaaaaataaaccgatcattttaaatcaatcaatttaattgtaaatatctaggataccaataataaaaacatcagtttgcatcaacccatacttttcgcccattaaatacaccaaactcaatctcacccgtccacaaaaattcattcacccaatgacttgcaagatatactcaagtaaagcatgagagaccaaaaattgacttccccctccgtatatacatacatgtatgtcttctaaacaactacctacttaacttccttaacttaactaactaaataaatacattttttccgcaatgttttccaaaactaaagatcacaaacctatatacttaagagttttaaacacacactataatcggttaactagcatttcaatttaaacgtctcgatttaaattgtctcaaattcacacaaagtgattgaaatgattttcacttcgagtttacacttttggtacacaattgatacttgattgttagctgactgccttcaagctgaatttaagcttcataagcaactaataacaactaaccaatttggcccataaaacatacaatttcttatctcagctataggaaagtgtttaattgtgattttgattatttgcaaaataggaagacaaatgcagagacatactattaattcgttttaattcaaaatcaaatgatatataggtttttacacaagctcactaataacttcacgaaaaaataatttctttacactttagtagttttaaacacaaacacaaaggccgctcgaagatcgaatttaatctccaacataattatttttattttttttgtgtcctaaaaatcaaagtgtatctctatctttcagaactaaatgtaaattaaatctttaaccttaaaattggcaacatttttttcttttaatttctggcgacttgtaattaagtagtgccaacaactaaacgttaactatttatcctcaaaattaatcaatggattacaggtatgttcgtataatgtaagattcgatatattgccatgctaaatccgaagcgaatgctgattatggtaatcgatttccggatcaaagcatatttgtttcaactccatcgagcggattttcaattctaaaatttattctgtaatttagcaatttgtaagtaaagtctgagtgtaatccttagacttaaatatttactgtaactaacaactaaaaaggataaatcaatgcggaacatatttatataaatttcaaaaataatttagcaaaatcgatgcaattaaaacgaattttggaattcaagataaatcataaataataacttactaattaccaaaaattcaaccctgcttcaaagtggagtccgacttataaactacttttggataaaccttgacagagattattaaagattaggtattcccctggagttatactccccctatagagctgttgatttaaaactcttaagcatttaacccttaataaacaaaaaaaaagaaaagctcacccatataacgttcatatggcgagtaaatgcagtacccattatttaagacctaaattcatagaagcttagaacatgaaatatggatgaaatcgtatgtttttacccataattagttcctaagactattgacttgtactttcgagagtactgaatacaagtttttttttttttttgcaaatgtttagatccacttcattcatattccttgatttccgttttttgtttaatgttcatgttcacatgtttttccacatactaacttacatacttaagaaatcgtctaacaacaacagcatcaataatcacacaaaaatgtttatttttcaattaaaactctggccaacaactacaactacgcaaaccggcaactcaactactttcaacgcaaatgactcaactcaattgcctcttcaattgtttctctctctatatatatatatatatatcttcctctttctacatgtgtatctctctatctctctctgttactttaactatttaccaaaaaaaaaaaaaaaaaccaaaaaaaaatatatattcaaatatcaacatggcgaccacaacaacgacgacaattgcacgtgtcaataaactatacaacaaacaacaaaaaccaaattcaatcggtacacactcatcatcgctgtcccacgaaaaaaaaaaaaataaatttaaaaaaaattttgttatttcccaacaacgaacaacgttttaaaaaaaacaatcgataaatatctgtacgacgaactgttaaataatctcgaaacttaaataaccatctttttgttcatcctcgttttcatgctaattcaacaaaactttaaaaaattcaaccaaacttacaaccaacaacaacaacaaacaaacaaacgcacctgagaaaacaacgataaaacaaaacttaaaacactaatcatgaatttaaaaaaaaaaaaaaaaaaaaaaaaattactaacataaacctaaatggcattcatgtttaaaaaaaaaatactaaaaattcgtattgctattatttttaaacgcattacccaactacactccgtctctctgtcgaactcgcacacacagataagagtaatattcctttattggttaccttgcatattgcgcatgcaaagacccggacaggttggctacgaatgtccgccgccgccctcttcttcgagttcctccgcatccggcgagaagaagcaacagatccaaaacgttgagctcaaggagaggtacggtcgccatgtggcacctcgaagcccaatgcccccttaccaccccccaccccccacaacactttaggtccccaaaaatgcttctaaaaaactatctgtgtactaacccgaaatagatcctccaagtctctgctggccaatgtgctcgatatagacgatgatttccgatgcaatcatcgatgtgccagcgcgactttgccccaccagcccacatattacaggacgatgtacaggtgagtggcagtgcaacgctgcttgcaccatgaatcagcgatgaatcggcgatgcatcagcaatgaatccgtaaacttgaagtacgtgttctgacactttctactgattcgccagctgtttcatcgtctatctcctcaagctacgaacgaaactatattttatttatttttttataaaaaaaaatatatatatattaaatctattccaactttatttaatgccaattttattgcgttcactatcattcaatactgtgtttattttgcaagaaatgtgtatttttatataaaacatttatggtaaatgtaacgattttatatttttttttttggcatatactatatactatagcagtcgtaatatgaaatatttgaaccttggatctaatttaatattttcatatttaatatacccgttactcgtagagtaaaagggtatactcgattcgttgtaaagtatgtaacagacagaaagaagcgttttctactatataaagtatatgtatgtatgtatatactcttgatcaggatcaatagtcgagtcgatgaacgtcgagatcttacgaattataaaagtaacgggtatctgatagtcggtaaactcgactgtagtattctctcttgttcttattcaattttttaatacgaaatttgccagtgtaataacttttcgctgcacataagggctgttttctttaagtttggataggatgccacagaagaaatctaaagaaatttattctgaattcaatatgctagttatttctgtgaaatcgtctttatttttattatacatatgtaaaaagcgaaaggagaaatgaattcccaatggcagatttgtttaaaactgcaagtttttgtctgtacgtttttgtgtgagaaagaatgcagacaattacatttggattagcccgttttcaatggcggaaaaggcagttgatggcaggtttctgaacttgattgcccaatctaaaacattaccataactcatacacaggcaaggggatgacggcagcgtgggacccgtgggaccagctggtccagttgtggacgggcgtttgcacgaggccatttcccacacctgtctgacatcctctgcggagtacgaactggcgctgatactcaaggagctgcgttggataacagaacaggtgggtcgctctctagtctctaaaaggtagtttggtgggcagctttcaagaagaatatatcgaataccctcttgaaaagtatgcaacttgctttattttcatttcattacttttcggtaaaattaaactaatcccttaaccatgccactcacttttcaccattccagctcaaaaaagaggacgaaacaagcgacattacgcgagattggaaatttgctgccatggtcgtcgatcgtttgtgccttattattttcaccttgtttactattatagcaaccctcgctgtactcttctcagcgccgcatttcattgtgagtggagtccgtggatgagtttcccatttcccaggccataagcatgtttactttcgttcattgcagttcccgtaagcgaaggagcgatgctgggaaaagcggggaaaagcgggaaaagtggaaaataggtggagaaatggagcggaaagtgacaggtgctggtcggccagaggagttttgcggttgtattgtgaaatatatgaagccaatcaaaatattaggaacagaagagaacacaaattcaacagcccgaatctaagcttttcaaactgaaatactttgacagtcaaagagttttgctattcaacatttttatacttttaaagatgtgtctgatggttataaaaatattacaatgaattgagatagtaacgtatgtacgtatgtgaatgcattttgtattgaaaacaaaaaaagaaaacaaaaaaaaaacaccaaaaacaccaaacgaaaagcaaataaaagtcgatataatacaataaatttccgggcaaacataaatgtacgttgccgtgtacattcaacttgccccttagatacaaagcagaggtttctatatctaaaacgaaaatcgaaaattgcaaaacgctcgtagaattgcaatccacctgccccctcatttaaccgatttgaacagataaaatgacatttaaggatatatacatatagatatgtatgtgtatatatacagcttcacactgttgttcaactgaattatagtatctaaatactataaaaaaaaaaaatatatagtctgtatgtagaattcgaggcattttgaaacttatgttcactttgtactgcatattggttttatcaagttttacccctactttcgatcccatgctattacattttgatagacaaagaactgtatacacagatgtggtgtgttgctatgatataaaaattataaaagacaaaagactagcaatacgcaaatcaatcacaagcaaatcaaatgcaaattgaacgcaagcaaaagtgaatagtggatagtggatagtggatagtgaat

SEQ ID NO: 17816 - DNA, 666 bp, DROSOPHILA
cttctaggaacttatttcaattgcattatgtttatggtggcctcatcagttgtgtcaaccatacttatcctcaattatcatcatagaaatccagatacgcatgaaatgagtgaatggatgcaaagacccggacaggttggctacgaatgtccgccgccgccctcttcttcgagttcctccgcatccggcgagaagaagcaacagatccaaaacgttgagctcaaggagagatcctccaagtctctgctggccaatgtgctcgatatagacgatgatttccgatgcaatcatcgatgtgccagcgcgactttgccccaccagcccacatattacaggacgatgtacaggcaaggggatgacggcagcgtgggacccgtgggaccagctggtccagttgtggacgggcgtttgcacgaggccatttcccacacctgtctgacatcctctgcggagtacgaactggcgctgatactcaaggagctgcgttggataacagaacagctcaaaaaagaggacgaaacaagcgacattacgcgagattggaaatttgctgccatggtcgtcgatcgtttgtgccttattattttcaccttgtttactattatagcaaccctcgctgtactcttctcagcgccgcatttcattgtgagtggagtccgtggatga

SEQ ID NO: 17817 - protein, 212 aa, DROSOPHILA
MFMVASSVVSTILILNYHHRNPDTHEMSEWMQRPGQVGYECPPPPSSSSSSASGEKKQQIQNVELKERSSKSLLANVLDIDDDFRCNHRCASATLPHQPTYYRTMYRQGDDGSVGPVGPAGPVVDGRLHEAISHTCLTSSAEYELALILKELRWITEQLKKEDETSDITRDWKFAAMVVDRLCLIIFTLFTIIATLAVLFSAPHFIVSGVRG

SEQ ID NO: 17818 - DNA, 3155 bp, DROSOPHILA
cagcgcgagatgctcctgggcacctgacgtcaactgccgcccgcgtccgtcgcggcgcaggcagctgcagagaatcgccaaacactcaccacagccacctctgcgggattagcagtagcaggagcaacggaagctagccccacatcctcaccgagagctacgcccacaccgccgcccgtgccgccgagatctccgctgtcgctgggatgactagcaaagcaaaaggcggcggccaaccggagcgggatcacctagttcctggtactagccgtcgtctgcctttgattagccttaagtcttcaagccctgccaccgctgcaaacactagagctaggccttccatgggtgcagccaatagcaatcaccaagcttcgagagaatgagaccacacacacacacactttgtacatacaccgcgggaagcttggggcacgacttggtagtgacttagatgcgccaaattaaatttacaacagttacgagttaaacaattgataaaagcaatcgagaattacataaaatacataaaaactgctaatggaacaatatttaagcaagagcaaatcgtatctaatacaactacaaagcggttagaagtctatttaattgcaaattgaattcaactcaagcatatatattatagaaattgttgtaaattgtacttgtatatacgtaccaaacaaaatacaaagcaacgttaaaaagttacgtccatgaaatgcaaacgaatgtaaaggcgaaaggcaaccaaatattaattgaaaactatagataacagaatcgtacgattacgctagatttatgtatagttataccctcatagcagtacacgaaccgagcaaactgacaaatgaattgagtatttaccattaatttcatgattaaactttacacaaacatgaatcactagtttaagtttctcagcaaaaggaattatgtatattttaatttaaattatgttcaacaacgtctccaaataaaactgtcaactgaagctaagctaatctcccgctttggtgtccagcttgccgcccttttcgataatcgaccctagatccttgagcgacacctcaccggttcctctttccagaggctgtggctgattgggaccgggtttccagcccacaaagtagatgatttggaaggttgcaggtatccccttctcgttgggctttgcatacagctcctggtagatggcactggccgcgagcatcgtttctcgactaagatgagcgggtcgattgaatgcagcattgttctctgccatacccttgagatcccacatcagttcgaacatgctgggatagccgatgaccagttcatcggtgtctattgtcagcatggtgaagccggcgcgattaagcagggaaccaatatccctaatctgagtgaagggcgagatgtgcggagatatgccacctttgcgctccagctcggccaattggagcgaggagcgcagctcgtagagggtgtctccaccaaacatggaggctataaagaccccatccggtttcagactctgcttaattctgacaaagcagcccggcagatcattcacccagtgcagacttaggctagagatgaccagatccagtgaattgtcctcaaactgaaagggattctcatttagacttgcaactttggtctaagtagattaattacccacatccagctgctcttcgtccttaactagtttcaccattttcagacccggagtgccctgtgcctgctccagcatcgtagcactggtgtccgtgagcgtcagctgctccacactctccgccagaatgtgtctggacagatagccgcgactgcatccgatatccgccgccgccttgaactcccgcttaatgtcgaatactctgtcagccaggcggaagccgatctcctccttcaagtaatcgtatagtccaacgtcttcgctgtatacgtatattgtttactaattgaatatatactctaatcctggcgagaagatctcacctgagtgcggccctttccttctgtaatctcttggcattgcggtcaaatatatgttgcgatgtttgggtgagtgaggatagggcgcggagttcacatttgacctttaaggtcgatagttttgttaattttcttaacatattccgacttttgatcagagcagtgctgtaataagcaaccggctgcgggaaaatgaaaatattacatttttaaaatggaaagtcgaagtatgtataccctacatgtcttatatcttgtggattcttaaatttttctatttatgaaagtaataccaatgttgtttaaacaattgaaacgtcatgtgtgactatttacaaattatgtatacaatgtttcacgtattattgaatttaaattattaacgggaacgtggtgatatattttttttaatatttaaaaagaaagagtattgaacgaacagctgttggccagtgctggaaaagagcgacatcaagacattcccattcggccgttggcttacactgttaggtagtgcctatttgttttggcgccaaaagtgacgggaggtcatcgcgagagatcaattgaaattaagcattaaatcacatcatgagcttcttgcgcagtgccctgcgctatgcccacaccaatggctacacgggactcctttacactccgcgcggcgagttcatcatcacgtgcggcacagatggagacatccggcactggacctgcattagtgacgacgatccacgctcaagttgcctgggcgagttcgtcatgtgcatagcccacacgggaacccgtttgctggcctcgacggatcggaatacgatccatgcctacacctttcccgagatggacagcgatggcatcctcatgcgattcacggcaccggctacgtgcctcaaggtatccggtggctatactgctgccggcagcgaggataccactataaaggtgcttaagggagatacagctggcaacgaaacggtgctggaggggcacactggtcccattctggcactggacttgtttgcggagcgaaagctgctggtttccgtggccggggatggccaactgaaggtgtggaacttcgaggagggcaaggagctgaagaccattgggggcttgccaaaggtcaacagtttcgagagcgccagcctgtatggcactccgcatttcgagccaca

SEQ ID NO: 17819 - DNA, 1037 bp, DROSOPHILA
cttattacagcactgctctgatcaaaagtcggaatatgttaagaaaattaacaaaactatcgaccttaaaggtcaaatgtgaactccgcgccctatcctcactcacccaaacatcgcaacatatatttgaccgcaatgccaagagattacagaaggaaagggccgcactcagcgaagacgttggactatacgattacttgaaggaggagatcggcttccgcctggctgacagagtattcgacattaagcgggagttcaaggcggcggcggatatcggatgcagtcgcggctatctgtccagacacattctggcggagagtgtggagcagctgacgctcacggacaccagtgctacgatgctggagcaggcacagggcactccgggtctgaaaatggtgaaactagttaaggacgaagagcagctggattttgaggacaattcactggatctggtcatctctagcctaagtctgcactgggtgaatgatctgccgggctgctttgtcagaattaagcagagtctgaaaccggatggggtctttatagcctccatgtttggtggagacaccctctacgagctgcgctcctcgctccaattggccgagctggagcgcaaaggtggcatatctccgcacatctcgcccttcactcagattagggatattggttccctgcttaatcgcgccggcttcaccatgctgacaatagacaccgatgaactggtcatcggctatcccagcatgttcgaactgatgtgggatctcaagggtatggcagagaacaatgctgcattcaatcgacccgctcatcttagtcgagaaacgatgctcgcggccagtgccatctaccaggagctgtatgcaaagcccaacgagaaggggatacctgcaaccttccaaatcatctactttgtgggctggaaacccggtcccaatcagccacagcctctggaaagaggaaccggtgaggtgtcgctcaaggatctagggtcgattatcgaaaagggcggcaagctggacaccaaagcgggagattag

SEQ ID NO: 17820 - protein, 333 aa, DROSOPHILA
MLRKLTKLSTLKVKCELRALSSLTQTSQHIFDRNAKRLQKERAALSEDVGLYDYLKEEIGFRLADRVFDIKREFKAAADIGCSRGYLSRHILAESVEQLTLTDTSATMLEQAQGTPGLKMVKLVKDEEQLDFEDNSLDLVISSLSLHWVNDLPGCFVRIKQSLKPDGVFIASMFGGDTLYELRSSLQLAELERKGGISPHISPFTQIRDIGSLLNRAGFTMLTIDTDELVIGYPSMFELMWDLKGMAENNAAFNRPAHLSRETMLAASAIYQELYAKPNEKGIPATFQIIYFVGWKPGPNQPQPLERGTGEVSLKDLGSIIEKGGKLDTKAGD

SEQ ID NO: 17821 - DNA, 2793 bp, DROSOPHILA
gagcagacctgatagacgccgagaccagcgatataatgcagcagtattataacgatgacgccttctatatagccgagaatcgggtgtaccagtccagtaacgatgagttcgccggcatgtttggacccatccagacagttgcgggttagtcctggtgaaccctcgtgatccagccatccactgttctcgtagcacacttatttttttggccgagtgacaaagtccaaccgcagataggggaaaaattaggtgccagacggagatgagagctctgctcgagggctgccatgcatgcatattattttttaatattttacaacattttttcgtggcagctgaggggcaggatgaggagctgctagatggtcggcaggatgcggggtgtttgtggagtcaagtgcgctgggcgcccggagcaagcacttttctggctcatgacgaacaaattgctttccaacaagcttttacccactaactttgccagcttgttacggttactgttactcctccacctattattttctaccttttcgcaatttcccggtctccttactgtagtgttgccgcaatttgagagccagatgattgccacattcgcaaataaagcaacttgaattgctatgaaaagtagaattaaaattgtttaaaaacagtgatgtatataataacaaacgtactcctaattaaaaattctaataagaaagaaaactaacaacatgtttcttcattattgatgattataaaagtagttattttaatcgcttattcatatagtattaacaaatgttttattatgtgtactttttaatttttttgaagtatttttgttgcacgattaaatactactgtaattttgtcttttttggctagatgctcatcgcttcctataaagaaagccaaaagttcagcactgcctttactccatttatggccaagtggttcgcacatttaattatacccaaagcctttgcaatatttattttgtcggagattcaggttcttagtcattcagggtcagtgttttgcaaaggttgggatattcatcactttgtccattgggacatagggtggcattgaaaatgccttcttcgtataggtttccctcgacaggtggtcctgagctataatagcaaacgagcacaaagtgtatattccacagatcgtaatcctggccagcagcacagcccatataggaactgcgatcgttgatgatattcctgatttcaccttccgcactatatgtggctatatcatccagatcgtagagctcgtccagccattgttcagccaagatggtcatttcccgaacattcgattgtcgaatcactggtcttggatagaaatcctcggcgtagttgaaatgcggttctgagaaatcatcggtggccacgcaggagtcatcgggcagatccatttggcagcgtttcaggtgatattcggcaaccaccgacaggtaattgtcccacaccaattcgggcattttctgcgcaggtggcaagtcgacaaacaagttgctggccacctcttggcgatatccgttgtggagacccagcaaatactcacggaaataggccatgttcaccaggccatgaaaacgcaggcagctctcatcgaacatctaaaaggagctgtttgaacagttcttataggatgtggaccttactcaccatattgttgtcacagccaatgtgccgcttgccatgacacgacttaatatcacaaaagtctatggccaaaattgatctgagaaacagaattttacacagaaaaagtgtcaactgcaatcgttgcatttctgtttagaactaaaaactgtatgagaaatatgaaggtgttataagagctataaacaaaaaacctcaattgccaaatggcaaacaaaacgaactaattaaacaaattgttaagcacaaccaaggtacaactaaagaatttattttattggcatttaaataagtgtagcaaaacgttttttccgtgttggtaaatagcttgaaaaaaataatagtgctggattaaatatccttttaatttatatgattatattcctgttctaccatattacattttgtcagaaatttaatagtttaccaaagcctcgattctcatgccacaaacagagagattctcaaacccaatgaaaattgtaagttccacgatagatcccaagtagcataaaattgagttgtaacccaacttgaaatcactttcaactttgtgcagccttgtccttttcaaagtttgcctttctgtccgcctgacgggcggtaatcgattatttaacgtgctgactttgactggcacgccagttttccgctcccagcactctgctccggactatggaaattggcacaaaagccgagctggaccggattggcctggccagaagttggggacgtgggaacatgggtacgtggggcacatgtcactggtcgccggcgatgtgctggaaattgggaaaacaaaccatttcgcaatttcacaactcgtcagagatgggggagatgtgaacggcgctgattaggcgacgtaacacagtgattagcagagctcgggaatttccggatttataaagggaatagcagagggattgcataatggatggtgcatagccagtaaatatctcatcccctcacacattttccatttgcagtgcccacggccaccattctgggaggacccgatctgtatgtggacaagggcagcaccataaatctcacttgcatcatcaagttcagcccggagccaccgacccatatcttctggtatcatcaggataaggtaaatatctct

SEQ ID NO: 17822 - DNA, 744 bp, DROSOPHILA
atgcaacgattgcagttgacactttttctgtgtaaaattctgtttctcagatcaattttggccatagacttttgtgatattaagtcgtgtcatggcaagcggcacattggctgtgacaacaatatgatgttcgatgagagctgcctgcgttttcatggcctggtgaacatggcctatttccgtgagtatttgctgggtctccacaacggatatcgccaagaggtggccagcaacttgtttgtcgacttgccacctgcgcagaaaatgcccgaattggtgtgggacaattacctgtcggtggttgccgaatatcacctgaaacgctgccaaatggatctgcccgatgactcctgcgtggccaccgatgatttctcagaaccgcatttcaactacgccgaggatttctatccaagaccagtgattcgacaatcgaatgttcgggaaatgaccatcttggctgaacaatggctggacgagctctacgatctggatgatatagccacatatagtgcggaaggtgaaatcaggaatatcatcaacgatcgcagttcctatatgggctgtgctgctggccaggattacgatctgtggaatatacactttgtgctcgtttgctattatagctcaggaccacctgtcgagggaaacctatacgaagaaggcattttcaatgccaccctatgtcccaatggacaaagtgatgaatatcccaacctttgcaaaacactgaccctgaatgactaa

SEQ ID NO: 17823 - protein, 247 aa, DROSOPHILA
MQRLQLTLFLCKILFLRSILAIDFCDIKSCHGKRHIGCDNNMMFDESCLRFHGLVNMAYFREYLLGLHNGYRQEVASNLFVDLPPAQKMPELVWDNYLSVVAEYHLKRCQMDLPDDSCVATDDFSEPHFNYAEDFYPRPVIRQSNVREMTILAEQWLDELYDLDDIATYSAEGEIRNIINDRSSYMGCAAGQDYDLWNIHFVLVCYYSSGPPVEGNLYEEGIFNATLCPNGQSDEYPNLCKTLTLND

SEQ ID NO: 17824 - DNA, 2645 bp, DROSOPHILA
aaacagttaaaagttaaagagagtgactaatgccgcacgcacacagtcgcactcaatttgttgtcatacacacacagagagacaagcgcacactcgcgggcatcaactttgcactcttctcaccccctctcgctcgttcactcgcattcaaggtggttaacgagaggtgagccaacaaaaacaacaacagcagcagccgcggagcgcactcacacacacgcgctaaatagctgaacagcagctgcaaaagtagtagcacgtatccgcagagacaaaaacgaagaaagcaggagatggagaaggaagtgcgcctgcagctgcgacaattatcacccgattatttcgcagcgtgtattgcgaaatgtgcgccttcgatttgctaaatacttttgcttaattatacgcacgcacacacacaccaaggcactttcccataacgaatttaattcaattcaacgacgtgctgcacgaatcgctttcagctgtgcatttaatagcgatatttgtcggccttgatatgcgtcgatgtttttcaatggtgtcgcagaagagttatggaataatttaattatttttcgtttttattgcgccgcgaacgcgtccgttatgttgattctgccagagtgaccgtggcttgcagtcgaaataatccagcgattaaaagtttaattttcccgcggttttcagcactgttttctatcgattaatttaaatgcttagatgtgtttccactggcatcatggttataataggttttaacttgtttggttccttttgaaagtacttaatctaattatactctccttgactaattgctttggaaaatgttgatagcgaaacctttgtttttaataaaagacaactgtttcttctcttgaaatctctagtgtgaagatgctgaaatgacccacgatgtaaccgtttctccggttaaattgcaacacagtctgaccagatcaaggtgcccaagaaaatacttccaaattaaaagcaaactttgctttccgcatcccttagaaaaatagaatcccgatatatattatttggactgctcgaacgccgccgacgagcccaaaaacgcgcgcacatttacaacgacaacaatacaaacttgagctcagtacgtaaacttttttgaccagctgccgttagaagcaaatcaaagctgcgacgatggatgactcacgcgaagaaagccagttcattgtggacgacgtgagcaagacgattaaagaggccatcgagacgaccatcggcggtaacgcctaccagcacgacaaggtgaacaactggaccggccaggtggtggagaactgcctgacggtgctcaccaaggagcagaagccctacaagtacattgtgaccgccatgatcatgcaaaagaacggtgctggactccacaccgccagctcctgctactggaacaacgacaccgacggatcgtgcacagtacgctgggagaacaagaccatgtactgcatcgtttcggtcttcggactggccgtctagagtggaggaatggcaggactgccggaattcgcgatgaagatgacttaaaagggggagggactaacaagattgccgtcgtacaccagcacacaccaacaacacaaataccatacttttttgatcggccatccatcctgctgtaataacaaaatttattatggagcacttgaaaaccttgtcgtcacttccaagcaattagcaagcaactattccgttgccagtgtactcgcctaatgttattcttgattttcaatctaaaaacgtaaataaaaagtgtataataccgtagcataataagttaatcattgcaaactgttttcaatgggtcatcattttttgggtcgtgggaatatttttcgtttccatggcagcaattggccattggtctaaaatcgatttaaattcccaggcatttgttaaaattaaactttaatggtctttctcttatttctttatttattttagtttatcaaaaccttctatcgtttagaataataatattccttctggcattgcccaaaataacaaaatcagaagtacctggatgcaataaatgtaattggcgcgccagggtttgttaaatcgatggcgggcgcggtgtccttgaagatactcctacttcttgcgctggaagcgacggcccgactttagagccggaaccttgctgggcaggcgcaggctaaggatgtccgaattggattttggcagagcgttcacaatgtgggcgtactgcttgatccgagccttggtggtggccaaagcacgggagaggacattgatgtccacttcgaacttctcactgaggagcagggccatcacaataaagtgtgtcagtgccttttcactgctgaaattggtgcgagttcccttctttgccacattgggatccgcaaaacgatggcgtatatcattctcgatcttctccgtgataccagagagctcagccttttgcatttgacgcgaacgaagggaaattagcgactgcaaggcgtccatgtagatgataagtttaatgtgcaagaagtctcgcttggatgaaacgggattttcctgaattttggccaaacatgacttgaggtattccgatttaatgctgcaaggaacagaaattttaacatttaaatgttactgctttt

SEQ ID NO: 17825 - DNA, 645 bp, DROSOPHILA
ctttccgcatcccttagaaaaatagaatcccgatatatattatttggactgctcgaacgccgccgacgagcccaaaaacgcgcgcacatttacaacgacaacaatacaaacttgagctcagtacgtaaacttttttgaccagctgccgttagaagcaaatcaaagctgcgacgatggatgactcacgcgaagaaagccagttcattgtggacgacgtgagcaagacgattaaagaggccatcgagacgaccatcggcggtaacgcctaccagcacgacaaggtgaacaactggaccggccaggtggtggagaactgcctgacggtgctcaccaaggagcagaagccctacaagtacattgtgaccgccatgatcatgcaaaagaacggtgctggactccacaccgccagctcctgctactggaacaacgacaccgacggatcgtgcacagtacgctgggagaacaagaccatgtactgcatcgtttcggtcttcggactggccgtctagagtggaggaatggcaggactgccggaattcgcgatgaagatgacttaaaagggggagggactaacaagattgccgtcgtacaccagcacacaccaacaacacaaataccatacttttttgatcggccatccatcct

SEQ ID NO: 17826 - protein, 111 aa, DROSOPHILA
MDDSREESQFIVDDVSKTIKEAIETTIGGNAYQHDKVNNWTGQVVENCLTVLTKEQKPYKYIVTAMIMQKNGAGLHTASSCYWNNDTDGSCTVRWENKTMYCIVSVFGLAV

SEQ ID NO: 17827 - DNA, 5016 bp, DROSOPHILA
aaaaaggacgctgttgagggttgcattttatgttaaacataatattaattatttgcttacttttatctcacaatgcactcttagaaatttccactgttatgttattcatgtgtttgcataaaactggagaaattaaacacggtatctcaacaaaaataaaagaaagccgccaacaaaatcggttatgtttgacttcttttcactttgatatacaccttaattcatttgcttgttcaattagcatgcactccttagttatttggtacagtgtattttttacgagagttctcgacaattttcgagcgctaaaacaaagaaaccgcgctcgatgataaaaaccgcgtccgactgccgctgtttttttgttgttttgagaggcgctagtggtggaacgatggctgggaaaacatcgataacgctatcgatcaagcgattacttatccttctgttgctgacgatgttttccagttgaatgtatggcagcactgcttatttagtcacaaaaattatatttgaattaaaaagccgattttgttatcaagaaataaattttgaagtgaaaatgttttccacaaatgttttaattcattaagtgccacttgtcgcaattaagtaactgaataggttttaaataataagtaaataaatatcattgttaaatatttataaatgagcattcatttgcagctttaaatagataaacattttacatatttgtacattgacatcacaaacatttcaactaaaatttaaactcgtataacattacgctaaagtatcgcttaaatattggctcgcatccctggtactcttgttacgttacgttattcggcaattacatcagtctggcaactctggccctcacacacactcagtcgccccccaaatgtatcggaaacatgcagccgagataaaatagtgaaaaactagttaccaaacataaccgatcagtgcggataataagaattggcaattcaaaattaaatggtaaacgaacgtcggcgcgattaattaaactcaaccataggaacgcggagagagtggccagtgaaagccagaacactctctttcgtcggagcgtctgtgtgtgtgtgtgttacgtgtgtgcgtatgtgtctgtgttgacaaaatacaacaaatcgcagcgaaaacaggaagtgtacgaacgataaagcataagattgcacatttcgcattaaaataggcgacaaaaacccgggggcgcatgcagatccacacatttctggcccactcacactcacacaacgcagatcagggggcgtttttctagatcagtgaccaagtcttatatggctttatgttttgatgctgcactaaatatgggtgaaacatcacgtcatttatgccacgctccttctccaaaaacaaagatcatgttgatttcactgcatttgaatatatatatatatatatacaatagttaatgttcgtgtgcgtcattcgctcatcagctatatagtatacgagtgttgttattgtggatcgctttcgcatgttaatgcttttgtgtgttattttttccattccattttttttttatcaaagtttcgcgctatcgcccagtcagctcagaagcagccgctccccaactgagagcacagagaaaccagctctggccacttgctcctccggatccggctcctgctcctgtccccgatcccctcccccacccgccaaatcctgatcctgctccaaatgactgacggcgaacagcaggaggcgctggtcaagcgggccgaggacgagcgcgaggacatcttccggcgctacgaactcgggctggatcccagcaatgtggtggactcctgggagaatcccaccttcgagatctaccacaggacagacaagtgagtaatattaatcattcgccagaaaaaatcccaataatgccattgatgctcccacagatatggcttcttgcacgactcgcggctgccgtcgacgcgtgatgcccaggaggtgcatcgcaacaagattgaaatggagcgggacaaaaagtggatgaagatgctaaatcagtggccgccgccccaggataagctgcacaagcgcgtctacaagggcataccggatcgcgtgcgtatggtggcctggaataagctgctcgacatccagcaatcgataaacaacaatgctggcgtctacctccgaatgctgcagctggccaggaagtactccacggagacgcgacaaatcgatgccgatgtgaatcgtcagtttcgcgacaatcttgcctttcgcgagcgctacagcgtaaagcagtgctcgctattcaatgtgctcaacgcctatagcatctacaactcggagctgggctactgccagggcatggcctgtgtggctggcgtgctgttgctttatttgcacgaggaggaggctttttgggcattaaataccctgataacagaccaaaaatacggcatgcacgggctgtttatcgagggattcccgaagctgacgcgattcatcgatcaccacgaccgcatcatgtcgaaaataatgcgaaaactacacaagcactttaccaaacacaacgttgacgccctgctgtacgctattaagtggttctttgtcgtcttcgtggaacgcgtatgtaaaccacaaggtgtatttattacaaaaatacttaatagatctgttttttgcaggttccttttagtttgagtctgcgcgtgtgggatatattcatgttagacggcgatcgcgtcatactgtccatggccatcaccattctgtaccttcacaaagacgaactattgcgcctgaaggacatggacgccatcattgagtacttgcaagtacggctgcacaagaactttggctacagcgacgatgatgccattcaggctctggaacgcgtgatgaagaagctgaaggacctcaagttggatgtgccgccgccagccaagtcaaacgagttccccacccgcaaactaggtgacttcgtggaggcggatatggagaagaagatcgggcgcagacgcaatgattatacagacgcggagaagcaagtcataacagatgtgatatcaaggtgggatctcttggcgttgttaacgttaacatatttataataattttttaactttattagacaagaacaaaacgcgatcgacgttcagtccacagtgtcctacgagacttcggagtgcgcaacgggtgagtcatgcgtcacacacaagtccttacactgtttatctactaatcctaatgcttgctttaaacaatccacttaccccacttgctgactgtaactataatctgcaataataattgaaaatttatttcttattttgtattgtgtggtgcaagtttatcacaaattgtatgtatatatatcatgtatgtatgtatatgtaaaccgaaacacgagcagttcctcaaatcgaacttgaattggtgttgccctagacttaatcctatgtacaaagtcctgtttagttctagactatgatatatggcatatgtattatgtttgatttgagtagcgatgtatagttttccttttgagtatacgttaagatcgtagccactttcagcgagtcatcgttggcagtccaacccaaatgcgtcaccatctcgctggccgaagcattaaactaattgaataatatgctaatattgaccttttgcacgttggagggaactaagaagggaattcctattcctatttgtgtaatttgatggatggctcgaaacagtgggacgagtttaagtggttctggatggagtaccaagttttagacgtagcggatctaatgggcactaattctaactgtatatgtaaattattagcatttaagggccaaataaccaaggcagccacaaaaaccagttcatgcttattaaatacgcccctcgacgttcatgttatcggatgatccattttgtaaccattgtctaacattgtccgctgcgtgtacatatatatccgtttcgatcacaagccaccgcttctgcgtcttgccggcaatcggagctgcaaaaaaaaaaaaaaaaaaagaaaactcgaaatcagatctgacctaatttgcaatcgcttctgtaattctgttcctaggtgatggatactcaatgaaaacgtttgagagtatcactagcttagccacctcgccggcgaatagcagctactcgctgtacagcaatggatttgtggtgaccactatcgatagtgaacaagatcccgcccgcagccagagtatccacaatctcagctacctgcagacgcatccagctctgccgcccaacgggctgcagcatatgcggcacagctttagcagcgatagcgacagtcgcaatcgcatcgatctggatcaggcactggaagtgctccagcgacagcagctgcccctccatccgaagactcccagcagccaggtggtgtatatcgtgcaaaatggaggcggaggcggcaggtatatggacgggcatcgggatgctgcggatgatgatgacgatgatgcgctgagcgtggagaacacacgcctttaatcttagttgattcgtatttcgtattctttctttatgtagttaatgtttgttttgcccacttggtttgtaaaacgcatatgccaataacgaattccttaccccccccccccccctcaaaaatccccttaaacattcggtagtaatatccacatgtacttagctttaatttttgtattgtcgaaccgacagaaacctgaaattgttattcatttgctagcattcatcgatgtgtgtatttagtgtttcttccacactctttcttttcccctcgctctccgatattatccaaccgagagtctcaacttaatattccaaatacttataactcctaagactccaactattccgtttgaaactacgtacaacgattaatatttattgctaaccgcctaacttcttacccacaattccacaatacctactagcataaaccaactgattaggtaacttaagctttgctcttgcatttactttatatttgcattacaaacaaaactcaacttt

SEQ ID NO: 17828 - DNA, 2971 bp, DROSOPHILA
cacactcagtcgccccccaaatgtatcggaaacatgcagccgagataaaatagtgaaaaactagttaccaaacataaccgatcagtgcggataataagaattggcaattcaaaattaaatggtaaacgaacgtcggcgcgattaattaaactcaaccataggaacgcggagagagtggccagtgaaagccagaacactctctttcgtcggagcgtctgtgtgtgtgtgtgttacgtgtgtgcgtatgtgtctgtgttgacaaaatacaacaaatcgcagcgaaaacaggaagtgtacgaacgataaagcataagattgcacatttcgcattaaaataggcgacaaaaacccgggggcgcatgcagatccacacatttctggcccactcacactcacacaacgcagatcagggggcgtttttctagatcagtgaccaagtcttatatggctttatgttttgatgctgcactaaatatgggtgaaacatcacgtcatttatgccacgctccttctccaaaaacaaagatcatgttgatttcactgcatttgaatatatatatatatatatacaatagttaatgttcgtgtgcgtcattcgctcatcagctatatagtatacgagtgttgttattgtggatcgctttcgcatgttaatgcttttgtgtgttattttttccattccattttttttttatcaaagtttcgcgctatcgcccagtcagctcagaagcagccgctccccaactgagagcacagagaaaccagctctggccacttgctcctccggatccggctcctgctcctgtccccgatcccctcccccacccgccaaatcctgatcctgctccaaatgactgacggcgaacagcaggaggcgctggtcaagcgggccgaggacgagcgcgaggacatcttccggcgctacgaactcgggctggatcccagcaatgtggtggactcctgggagaatcccaccttcgagatctaccacaggacagacaaatatggcttcttgcacgactcgcggctgccgtcgacgcgtgatgcccaggaggtgcatcgcaacaagattgaaatggagcgggacaaaaagtggatgaagatgctaaatcagtggccgccgccccaggataagctgcacaagcgcgtctacaagggcataccggatcgcgtgcgtatggtggcctggaataagctgctcgacatccagcaatcgataaacaacaatgctggcgtctacctccgaatgctgcagctggccaggaagtactccacggagacgcgacaaatcgatgccgatgtgaatcgtcagtttcgcgacaatcttgcctttcgcgagcgctacagcgtaaagcagtgctcgctattcaatgtgctcaacgcctatagcatctacaactcggagctgggctactgccagggcatggcctgtgtggctggcgtgctgttgctttatttgcacgaggaggaggctttttgggcattaaataccctgataacagaccaaaaatacggcatgcacgggctgtttatcgagggattcccgaagctgacgcgattcatcgatcaccacgaccgcatcatgtcgaaaataatgcgaaaactacacaagcactttaccaaacacaacgttgacgccctgctgtacgctattaagtggttctttgtcgtcttcgtggaacgcgttccttttagtttgagtctgcgcgtgtgggatatattcatgttagacggcgatcgcgtcatactgtccatggccatcaccattctgtaccttcacaaagacgaactattgcgcctgaaggacatggacgccatcattgagtacttgcaagtacggctgcacaagaactttggctacagcgacgatgatgccattcaggctctggaacgcgtgatgaagaagctgaaggacctcaagttggatgtgccgccgccagccaagtcaaacgagttccccacccgcaaactaggtgacttcgtggaggcggatatggagaagaagatcgggcgcagacgcaatgattatacagacgcggagaagcaagtcataacagatgtgatatcaagacaagaacaaaacgcgatcgacgttcagtccacagtgtcctacgagacttcggagtgcgcaacgggtgagtcatgcgtcacacacaagtccttacactgtttatctactaatcctaatgcttgctttaaacaatccacttaccccacttgctgactgtaactataatctgcaataataattgaaaatttatttcttattttgtattgtgtggtgcaagtttatcacaaattgtatgtatatatatcatgtatgtatgtatatgtaaaccgaaacacgagcagttcctcaaatcgaacttgaattggtgttgccctagacttaatcctatgtacaaagtcctgtttagttctagactatgatatatggcatatgtattatgtttgatttgagtagcgatgtatagttttccttttgagtatacgttaagatcgtagccactttcagcgagtcatcgttggcagtccaacccaaatgcgtcaccatctcgctggccgaagcattaaactaattgaataatatgctaatattgaccttttgcacgttggagggaactaagaagggaattcctattcctatttgtgtaatttgatggatggctcgaaacagtgggacgagtttaagtggttctggatggagtaccaagttttagacgtagcggatctaatgggcactaattctaactgtatatgtaaattattagcatttaagggccaaataaccaaggcagccacaaaaaccagttcatgcttattaaatacgcccctcgacgttcatgttatcggatgatccattttgtaaccattgtctaacattgtccgctgcgtgtacatatatatccgtttcgatcacaagccaccgcttctgcgtcttgccggcaatcggagctgcaaaaaaaaaaaa

SEQ ID NO: 17829 - protein, 457 aa, DROSOPHILA
MTDGEQQEALVKRAEDEREDIFRRYELGLDPSNVVDSWENPTFEIYHRTDKYGFLHDSRLPSTRDAQEVHRNKIEMERDKKWMKMLNQWPPPQDKLHKRVYKGIPDRVRMVAWNKLLDIQQSINNNAGVYLRMLQLARKYSTETRQIDADVNRQFRDNLAFRERYSVKQCSLFNVLNAYSIYNSELGYCQGMACVAGVLLLYLHEEEAFWALNTLITDQKYGMHGLFIEGFPKLTRFIDHHDRIMSKIMRKLHKHFTKHNVDALLYAIKWFFVVFVERVPFSLSLRVWDIFMLDGDRVILSMAITILYLHKDELLRLKDMDAIIEYLQVRLHKNFGYSDDDAIQALERVMKKLKDLKLDVPPPAKSNEFPTRKLGDFVEADMEKKIGRRRNDYTDAEKQVITDVISRQEQNAIDVQSTVSYETSECATGESCVTHKSLHCLSTNPNACFKQSTYPTC

SEQ ID NO: 17830 - DNA, 2557 bp, DROSOPHILA
tctgaccagatcaaggtgcccaagaaaatacttccaaattaaaagcaaactttgctttccgcatcccttagaaaaatagaatcccgatatatattatttggactgctcgaacgccgccgacgagcccaaaaacgcgcgcacatttacaacgacaacaatacaaacttgagctcagtacgtaaacttttttgaccagctgccgttagaagcaaatcaaagctgcgacgatggatgactcacgcgaagaaagccagttcattgtggacgacgtgagcaagacgattaaagaggccatcgagacgaccatcggcggtaacgcctaccagcacgacaaggtgaacaactggaccggccaggtggtggagaactgcctgacggtgctcaccaaggagcagaagccctacaagtacattgtgaccgccatgatcatgcaaaagaacggtgctggactccacaccgccagctcctgctactggaacaacgacaccgacggatcgtgcacagtacgctgggagaacaagaccatgtactgcatcgtttcggtcttcggactggccgtctagagtggaggaatggcaggactgccggaattcgcgatgaagatgacttaaaagggggagggactaacaagattgccgtcgtacaccagcacacaccaacaacacaaataccatacttttttgatcggccatccatcctgctgtaataacaaaatttattatggagcacttgaaaaccttgtcgtcacttccaagcaattagcaagcaactattccgttgccagtgtactcgcctaatgttattcttgattttcaatctaaaaacgtaaataaaaagtgtataataccgtagcataataagttaatcattgcaaactgttttcaatgggtcatcattttttgggtcgtgggaatatttttcgtttccatggcagcaattggccattggtctaaaatcgatttaaattcccaggcatttgttaaaattaaactttaatggtctttctcttatttctttatttattttagtttatcaaaaccttctatcgtttagaataataatattccttctggcattgcccaaaataacaaaatcagaagtacctggatgcaataaatgtaattggcgcgccagggtttgttaaatcgatggcgggcgcggtgtccttgaagatactcctacttcttgcgctggaagcgacggcccgactttagagccggaaccttgctgggcaggcgcaggctaaggatgtccgaattggattttggcagagcgttcacaatgtgggcgtactgcttgatccgagccttggtggtggccaaagcacgggagaggacattgatgtccacttcgaacttctcactgaggagcagggccatcacaataaagtgtgtcagtgccttttcactgctgaaattggtgcgagttcccttctttgccacattgggatccgcaaaacgatggcgtatatcattctcgatcttctccgtgataccagagagctcagccttttgcatttgacgcgaacgaagggaaattagcgactgcaaggcgtccatgtagatgataagtttaatgtgcaagaagtctcgcttggatgaaacgggattttcctgaattttggccaaacatgacttgaggtattccgatttaatgctgcaaggaacagaaattttaacatttaaatgttactgcttttaccaaactacatacggtagagtctgcacaggcgtggagaacaccactttggcctcctcctcgagacgttcgagcagagagctcgggatcaaactttccacagcgtagacttcgtccactttggttgcctccttgttgaactcgggcacaatgctggccaggtactcctcattgttgatgctcacatcacccagggtgccgtcctcttcgtcttcgttgagcatgctcgaattcaccgtttcgtccagatcctgacgcatcacctccacgttgaccatcatctgttcgcggttgtccacgaagcgggatgccttgcgccctccaaactccttgagcagcttcttgttggcgtgctcccggctcatcgtgggacccgttctcttctgtcgctccagtttcttgtaaacgtgattgtacatcaatgcctcttgcactggcacgactttaactttgttggttaatttgttccttatgaaaatgtaggtatcgacttcctcgctatccttcacctcgcccgtgtacacctggtcacccgcgtatactaaggcatgctttttgccatctacggtgctctctaccatgctgaaatctgcgtcgcccaaaagagatccattctggaatttcactatggatggaaggtgagattgtatattttcttcctaattgatggctgcacttgttaacttacgtatggtaggtatgttctcgtctcttttatgatcgcatacggattctattataattttatcttccattgttactgcgttatatttgaatttttctggcttttagaaacaattcaaatgttgcacgtgtggaaaacaaaacagatgacatgcgatggacgaaagctgagtga

SEQ ID NO: 17831 - DNA, 557 bp, DROSOPHILA
ctttctcttatttctttatttattttagtttatcaaaaccttctatcgtttagaataataatattccttctggcattgcccaaaataacaaaatcagaagtacctggatgcaataaatgtaattggcgcgccagggtttgttaaatcgatggcgggcgcggtgtccttgaagatactcctacttcttgcgctggaagcgacggcccgactttagagccggaaccttgctgggcaggcgcaggctaaggatgtccgaattggattttggcagagcgttcacaatgtgggcgtactgcttgatccgagccttggtggtggccaaagcacgggagaggacattgatgtccacttcgaacttctcactgaggagcagggccatcacaataaagtgtgtcagtgccttttcactgctgaaattggtgcgagttcccttctttgccacattgggatccgcaaaacgatggcgtatatcattctcgatcttctccgtgataccagagagctcagccttttgcatttgacgcgaacgaagggaaattagcgactgcaaggcgtcc

SEQ ID NO: 17832 - protein, 90 aa, DROSOPHILA
MSELDFGRAFTMWAYCLIRALVVAKARERTLMSTSNFSLRSRAITIKCVSAFSLLKLVRVPFFATLGSAKRWRISFSIFSVIPESSAFCI

SEQ ID NO: 17833 - DNA, 2461 bp, DROSOPHILA
tgcccaaataccacgcgaattagacaaaaagcttttatttaataaattcgttctttcgttcctattaagacattggttagccaaatacaggcggcatcgcgtatttcatatcggacaacatcaagatctagtacaatatcgcgttgatcgaaagctgatcggtacacaactaagaagttagttagtagaatggcgctgttttcacagctggattttaggcgctttttaaaataggcttctattaattaattctcaatactcaatatttggcaaaacggtcatgaaatttttgattattatttttcttgccatttcctatggattaggaccgcattccaaactgtcaaaatgatggctaagcagaaaagagtttctaaccaaattgccaaaggacaatttgtagttgttgttgttaattcattataactgcgtaaattcatgactatttttaaaataaaaagaaattaataaataaagatttattctccttttaaagagtcgttatcaatcaatttttctgccccataggtggcgctgtaccactgttcttcttttagctgagtaacgagtatctgttagtcgagaaaatttagtatagtccaccatgttcttttaaattatttcgtgattcccaatatactctggaaatccgtaatagttaaaaaaatttgtattcctaaaaataattgcatttattaaattcggtatttgaacttatttcattcagatttgtaaagccaaaatcgttatacgcagttatgttgtatgtatcattaatacatgtatcattaatacatctgtacgaagtataagagtgtattgctccagcccatcgtttgtgcgaatttttcgcaaacaatatgggaaaataatgcaaaatgtataggaaccagctgcgtaaatttgccaataatctttgagtacaaaagtcgcgtggaattaactgcctataaaagccactgccgccaaccatctgcaatccaaaatctgaaagtctaagatgaaggccactactattctagccgttgtttccgtgctcaccgcttgtcttttgaggagcagcgaggcggtgacctgcaccgccgatgccactgtcacaggatgcattgactgcaccaccaatccaaccgattccgagtgcgtggccgaggcagccgccgatacaaccagtacaactgtagcaacgcccaccaccaccgccaccacaacatcagcgacggcgaccaccactgcggcctccagcacaaacacttcctccggacggcgaaagatcgtgcgcatcaccaatctgcgctacaccaacgttcggcgcatccgcgtcaaccggaatggatcggggagcaccaccgtccggaatcggaggcgcaggaacaactccagacgtgtcaacgtgaggcgggccaatggaaacgttattgttgtcggctaagtacgcggaattcaataaaatgctcaacaagatatggatttgaagaagtaaattttattttatatccaattttctgggaagtattcaatttttggctgggtataacagggatttagcttctaacaaaatcttaccaattttaaaatgcgttatgttacagagaaatttccagtgcatatagagcatttaaaattatagacggtacatttgggtacgttataatattaaggagttattgacgatttcttcaccttaacccaatgaaataacacatcacacatacagaactttgaactttattgagcaggggaaaccaaaaatttaaaaacattaaaaaaaaactataaaaactttttaaaaattggtaatttaactattatataactctgttgtcttacaaatagaaggtcaagataggtattattttgtagaaacagtgttatgaaagttaagaaaaacggtaacattgggtttaaatgtatttacctgttggagaagtagataatgctctcttctaataacaaagctttatagccaaaaaaaaaaatgtaagaccatatttttctaaattctcatcaaacaacaggagaaaacaatgcaaaaagtcgaaacagctgtgtcaataattcgatttaattgatatgctatatgatatatatatatatattatatatatacatatataatgtcgatgctaacacttaaatcaactacattgcaagagtagctttgatcttctattctggagtcttgatcctggcagcttgcctgctggaaagcatcttagcggtcccaccgtcgtgggatgcatcgactgcaccatgatgcatgaccttctccaccaacaacgtggaaggcttagccgagggattcagctccaaagtcgtttgaatcgcgaatcccttgaactcggaatgcgtggctggtggtaccactttgaagtcccccaccgcaaatggtggtcagtgaacgtttccctggaaaaaggtcaagtgttgttcattttcaaatagattacagctttgattgtta

SEQ ID NO: 17834 - DNA, 461 bp, DROSOPHILA
atgaaggccactactattctagccgttgtttccgtgctcaccgcttgtcttttgaggagcagcgaggcggtgacctgcaccgccgatgccactgtcacaggatgcattgactgcaccaccaatccaaccgattccgagtgcgtggccgaggcagccgccgatacaaccagtacaactgtagcaacgcccaccaccaccgccaccacaacatcagcgacggcgaccaccactgcggcctccagcacaaacacttcctccggacggcgaaagatcgtgcgcatcaccaatctgcgctacaccaacgttcggcgcatccgcgtcaaccggaatggatcggggagcaccaccgtccggaatcggaggcgcaggaacaactccagacgtgtcaacgtgaggcgggccaatggaaacgttattgttgtcggctaagtacgcggaattcaataaaatgctcaacaaga

SEQ ID NO: 17835 - protein, 142 aa, DROSOPHILA
MKATTILAVVSVLTACLLRSSEAVTCTADATVTGCIDCTTNPTDSECVAEAAADTTSTTVATPTTTATTTSATATTTAASSTNTSSGRRKIVRITNLRYTNVRRIRVNRNGSGSTTVRNRRRRNNSRRVNVRRANGNVIVVG

SEQ ID NO: 17836 - DNA, 4587 bp, DROSOPHILA
aaaatactgcacgttactaaaatactagatgaaaatacaaaacggtaactgtgaaaacagctgatttgcagcaaacaaagttacctctgcaaacacaacgcatttaagcaaatgccatttgtgcagtttaactaagtaaaatgcaggaattttcagccaaacgagacgctcttttcgcatgtctcgacgatgcgagcaaagagttgcggggaactgccttggatcagagcaaggccaaggcgttttccatcaatgccctcgatcgaggaaacaaatccggaaacgaatccggacaggtgatgaactaccgccagggtcgcagcattgttactggcctcgatgcggaggatggaagactgcgacgaatgcgcggcaaggagagcattttcaagaagcccgaactccccattggacgctgtttgaagccaagaaaaacgccagattaccaggtgacagaccatccctctgcaattagttgtccccaccctaaacgtttgacctactctctaggtaaacccgcacaaatggaagaagtactccctgtctgatgtggacatttccgaacagagcaactccgccgccgccttgtccttcctgcgacaaatggatgcacagcgcgaggctgagggcgtcgataacgaatctccacctacagatggcaagatcgagttcaagaggaccagcaaactcagccgcaagctcaagagcctcaaacagcaggaggtggatgatgtggagctggataagccgcagttaagaggttccaagctggtgatgcctgagtatgtaattggccaaaagccgcataagccaaagaaatgcaaaaccaaatcggaacagagccgtgcagcgggaaaactacaactgtcccacttggcggaggaggatgagcaggatgattaggttaaaatgtatgatcctaagattatattatataataattagtgtcccaatgaaattttagaaatgtaaatagattttaattatatacaaactgcggtttgttgtgaaatatcatcgtttattttgtaagtgtacacactcaaaaatcagactggaaaattgctttacattttgcctaaatgttcgatttcaaaaatctggctgtgtatatactggaactctgtattataatatttgtagatttctggcagttatcacataaattacataatttcgtacctttaaatgaggtatgcaatacgtattagaagaatacttgaatgagtatttgttacaatataaacattttatagcacgcgagcacagaacacataatctaaaagacatactaaatgcgacgataagaacataaatgcggttaaaaatgcatccggaatgataaaatgtccagtggcggcaactattcgttgaaaaacccgggattgaagtagagtttcttattaaagccaagattatcataggcacctgtctgcatggaacccttcttggtgcgcttattacccacggcttcgctcgtcttctttaggatatcctcaaggtctgtgtcgtgggcatgatcggccatcacttggcaaaacttctggatgtaccagctgcccgtgtcgagatcgcggtgggtaacatagcccggcgtattagcatagcagaccagagtgtcggcaagacttggcacattggtgctcgggctgggtatgccctccgtctgggtgtcaggccacttctcctcttgcgccgtatacactggctccatgagattgccttgattctttggatggcccaaatcatattcatcgccgcggcaaaagggaaacataagcaccttcggcttgttcaccaaataaggacatttggccgtctggaaatggtccttgatcttctgcatatcgaccacagatccatcgcaaaactccaccttctcttttccctccacactgttgccgtgtgtcatcagtaccattacgaaacactcggtattctgcacatacgacgaggaggtcaccattgtcagaagtttaaagaactgatcctgattcacgttcccataggggaaaatcgtaaaattcagttcttgaaacaagtgtatcaacgacttgctgtccttttcggctccgatccgtcgacggttttgatccggatagtccattatgttaaccattagcaaaacgcctcggttgaaacgtgattgcatcttatatgtgcccaatatggcactatccccaccatgtatctttttcgatttttttacctcgggaccgtcaacgacacccacataaggggtgagtgctcccagcggctcattccggagctttggtaggagagagaaagaaagaacaaattacaataaagataagattttcaatatatatattatattttcattgcacggttaatgtggcagacaaagaagtaatcaacattcgtgctatataaacacagctgccagcaatattgcgataagattctggttaaaaacaaatcctactaaaagaataattgggataggtaagtagaatggatgtgattcatgcttccaaaaaaaatggaaaacaagaatctcatacacgaactaacttctgaaagagaagcaaataatactgtgcacatgtaccaaagtagtattcatcattgagtccatttacaattcttaaagataccttttctaatctcattccaataggaataactcaattaacaaacctaaaaaaaaaaatgcaaataaattgtgccataaaccggttttttgtagaaatcagggtcaatgacctgagctgcaatttcaccatcaaagctttcgtatgattttattttcattaccttgctaacgcagggtccttcggaggcttcgggtgagggtgtgtccacaatatcggccgacttccggctggttctccgttcgtttagcgagataaagggtggccttgaatcggactcatcgacggattccaatagaacggccgcatccagacaattgatattgcgcagtgcattgatcagcaggttataggcggtgggaccacgctgggtgatcttcaataggagcctacgatgctgctccacacgcacatccttctcgtccatgttgaatggcttgccattgagatcctgcgtatttcttagcatctgaacggttaggatgccctgttgcacgcactccatggccagacgctcgtagttcgtccattcaaccagtatattcagattcttgcgtatatgctcgcgatgcctcttcggcattccaatctcgagctccggcggctgcattccggatatggcttccacgcgttccggtgactccgcttattgggcgcgccaaggatggctgccgtgatcagtctccaattggcagtggtattggcagtgaatcacccgtctccaaggttttcccgggaatgatttcgtttatcgctacttgtcgattctttgtctccgctttgttgttgtcgtcgttgtttttgttttgcgactttcaagaaaggggcacaaatcggcggccctgctggtgtccttatttttccaaaagtaaattaactagtctatatattgcactagatgatcctagcaaggatcggggatcttcgaataggatttctttcgaaacaaaaggaccaacgagcgtttcgcgccgccaaactcgccactaaactaataaatgaaactttgggattggtgtggctgcttgtgggtgcgccattttaaccagagaacgcgtccgggataaatccatgacatgaaccgtctccatgttccacttattccaccattccttcattgccgcatcaaatgattcaatttaatactaaataccaaataccatatggggtcagcctaacaaaccgtaaacataaacaaaagaaatggaggaggagcaacaatttacgccggaaccgaaaaactccgcgcaaaaaggcgcagaaaagcctgcaaggattccgagagaggtgaaagttaagctgcaaaggcaactaaacagactgggctactcacagcaaatcctgctcgaagcagccaagcagcaaaatcaaaataattcgaatggcattctccgtgagttttcttaaaacatgcataatgcaataaaagtacattgtcccccaatcccttttctagagtatgtggccgacatgattggcaagggcgaggaaatggtgaaaaactgcgactccgttagcttaaacaacattaaccagtggctggagctcatgaaaagttcgcaactcgctgaactctgcgaattcgaagcagccgtcgttgtgaactccataatccaaaatgagacaaagccatcgccaacggaactgaacggcattgacttgaagtaggaatggttttgataaactacatttgtatttagcattgtggtactttcagtgaggcctacaagtttctggaaaacgctttgatgggccagccgcaaaagaagatgagcgatgcgaccaaagaatttttgtccaaggaaattgaggtgagcagaaggctgcatcaactttccaaaatagttaaaaaaaaaggaaatcctaatgccaacagctgctcatagagaaggcaaacaccgacgaatccgacgatgtggcacgcagcatggggcagcgtttatttgaccaccagtttttggattacatggaa

SEQ ID NO: 17837 - DNA, 2078 bp, DROSOPHILA
gcgcgaaacgctcgttggtccttttgtttcgaaagaaatcctattcgaagatccccgatccttgctaggatcatctagtgcaatatatagactagttaatttacttttggaaaaataaggacaccagcagggccgccgatttgtgcccctttcttgaaagtcgcaaaacaaaaacaacgacgacaacaacaaagcggagacaaagaatcgacaagtagcgataaacgaaatcattcccgggaaaaccttggagacgggtgattcactgccaataccactgccaattggagactgatcacggcagccatccttggcgcgcccaataagcggagtcaccggaacgcgtggaagccatatccggaatgcagccgccggagctcgagattggaatgccgaagaggcatcgcgagcatatacgcaagaatctgaatatactggttgaatggacgaactacgagcgtctggccatggagtgcgtgcaacagggcatcctaaccgttcagatgctaagaaatacgcaggatctcaatggcaagccattcaacatggacgagaaggatgtgcgtgtggagcagcatcgtaggctcctattgaagatcacccagcgtggtcccaccgcctataacctgctgatcaatgcactgcgcaatatcaattgtctggatgcggccgttctattggaatccgtcgatgagtccgattcaaggccaccctttatctcgctaaacgaacggagaaccagccggaagtcggccgatattgtggacacaccctcacccgaagcctccgaaggaccctgcgttagcaagctccggaatgagccgctgggagcactcaccccttatgtgggtgtcgttgacggtcccgaggtaaaaaaatcgaaaaagatacatggtggggatagtgccatattgggcacatataagatgcaatcacgtttcaaccgaggcgttttgctaatggttaacataatggactatccggatcaaaaccgtcgacggatcggagccgaaaaggacagcaagtcgttgatacacttgtttcaagaactgaattttacgattttcccctatgggaacgtgaatcaggatcagttctttaaacttctgacaatggtgacctcctcgtcgtatgtgcagaataccgagtgtttcgtaatggtactgatgacacacggcaacagtgtggagggaaaagagaaggtggagttttgcgatggatctgtggtcgatatgcagaagatcaaggaccatttccagacggccaaatgtccttatttggtgaacaagccgaaggtgcttatgtttcccttttgccgcggcgatgaatatgatttgggccatccaaagaatcaaggcaatctcatggagccagtgtatacggcgcaagaggagaagtggcctgacacccagacggagggcatacccagcccgagcaccaatgtgccaagtcttgccgacactctggtctgctatgctaatacgccgggctatgttacccaccgcgatctcgacacgggcagctggtacatccagaagttttgccaagtgatggccgatcatgcccacgacacagaccttgaggatatcctaaagaagacgagcgaagccgtgggtaataagcgcaccaagaagggttccatgcagacaggtgcctatgataatcttggctttaataagaaactctacttcaatcccgggtttttcaacgaatagttgccgccactggacattttatcattccggatgcatttttaaccgcatttatgttcttatcgtcgcatttagtatgtcttttagattatgtgttctgtgctcgcgtgctataaaatgtttatattgtaacaaatactcattcaagtattcttctaatacgtattgcatacctcatttaaaggtacgaaattatgtaatttatgtgataactgccagaaatctacaaatattataatacagagttccagtatatacacagccagatttttgaaatcgaacatttaggcaaaatgtaaagcaattttccagtctgatttttgagtgtgtacacttacaaaataaacgatgatatttcacaacaaa

SEQ ID NO: 17838 - protein, 450 aa, DROSOPHILA
MQPPELEIGMPKRHREHIRKNLNILVEWTNYERLAMECVQQGILTVQMLRNTQDLNGKPFNMDEKDVRVEQHRRLLLKITQRGPTAYNLLINALRNINCLDAAVLLESVDESDSRPPFISLNERRTSRKSADIVDTPSPEASEGPCVSKLRNEPLGALTPYVGVVDGPEVKKSKKIHGGDSAILGTYKMQSRFNRGVLLMVNIMDYPDQNRRRIGAEKDSKSLIHLFQELNFTIFPYGNVNQDQFFKLLTMVTSSSYVQNTECFVMVLMTHGNSVEGKEKVEFCDGSVVDMQKIKDHFQTAKCPYLVNKPKVLMFPFCRGDEYDLGHPKNQGNLMEPVYTAQEEKWPDTQTEGIPSPSTNVPSLADTLVCYANTPGYVTHRDLDTGSWYIQKFCQVMADHAHDTDLEDILKKTSEAVGNKRTKKGSMQTGAYDNLGFNKKLYFNPGFFNE

SEQ ID NO: 17839 - DNA, 5096 bp, DROSOPHILA
actcgtgttgtgtttgtaattgcgtggtccaaaatccttgtacagtgaaaacatgtggtaataggttgcaaaatgtgcgagatttaataaaatatttaactaactgtgcgccgccatgcaaagtaaattggaactgtgacacaatataatgctttcaaattaaagccaatttaaatgtagcaatttaaatgagaaataatcgaaatgattaacttaatttaattaatttatttatacagacgtatatactacatggaatcaatctttttgattttaatgaaaaacgaaacgaattatcaaaattgattgatagtgaataaaaacatttaaaaccaattacagttgcaattaactgttttaaaatataattattgttactaaattttcaatgatttggaaagtgattatcaatatcagatattagcttattaagctgaatgttaattttccgctgaatttttttttgcataaactaagtactctaaccgaaatttcaataccctgaacaaatggaaaaggttcccaaattcacattttttataatgaaataataacacattgaacaacatgcttagcataaacgttagcataaattcgaaaagcatgcctgtgtagttctttgaactccctacttgtttcagtgtatgtacttatgatagtgcttggtagggggattcatcaatcaagggctaacaagatgattatatggattcttttatttttgggaagctaaattttagccctttatgtgtgccccaattcacagagaaatataatttcttgataagaaaggcaaaacataaattcagtgatggtttatttcaacgctgagacgccaaagctgtgcggaaagaagagtcttggatgattgattgctgaatgagtagttgagagtagtgcgttagtttagaaacttagtcagacgtagatttgaattgagattgagattgagattgagattgagattgagattgagattgatattgtgactggccacgatctacttaccgagcagcggtaccgcatcggaggtcgccggcattgtttcggccaccatgttgaggaagactgtaagcgataatagaattgtaactcctgaatgtggtcagcagcaggacgggattaaaagcgccactcaatcaatcaatatgtttcagttgatattgcggcgattcacagtattcattgtatttacagtattcgaagttatcgcgatagaatgatggcggcatggaattaaacgaaagttcatttgttagtcaatgaatatgttgaatgcgctgccacgattattacacattaaatgcgtgcactattacgattacgttaacaaaatagtttattgtaataaccagtgatcctgctgattccgctcctcatgatcctgaatttgcgactgccgctttgcatgtccaatgtcttggccaggtttattggatggtcgccatttccattatgacctttctttcgttgccttcaataaaaaactactaccgtattttctgcactgaacctcaccccctttctagcaattcaaattgaaaaagctttcagttttccagatcccgtccgaaactcagtacacataatattcgtggaaatatgtataacaattgattatgattattgcatatgatcttaagtaattcaggtttaaaaaacagagagaactgtttttgagttggtgtttcgagttttcaatttaataaatatttaatatatggttaaatttgtttttttgtatgaatcaaatttgtatattatcttgcacaagaaactaatcaaccaaaaactaatcaacagaatttgatcaaacaagggcacatagtgacgaaggcttttatatcgcacagtgcgcttcgtcactacgtgacttctgtcacacatattgccacgaatatatatatcgaataccgagtgcagcaaattaaaaggctattcacactggcttaagtggttctgcattagcatgaagaaatattctaagatggaaacagtgggaagaattctttagagcaagtttttagctagaatgagttacagagttgcatgcaaaagatctacatttaaattccaatagatactccagatgcattagcatgtctaagaacaaaagcaaacaagaagtaaatgaaggtagcattgtaatttacacaatctcgactactaggtaattaagttcgtttcgttctaagctcgaatcggttatcggctatcgtttatcatttatcgcttatcgattatcggtatagtttgtagtttttgtatttagttggtagtttgtgaaaaattcgtgagcacagagatagaagggcagggagatcaggccagaacatctggacgacacttaccaagcgaaagcttttcaccagaatctggtggcagtgtaaaccctagcagtgccatggaggcgatcagtacgcacggcacaatcagattgaaaaaatagtacaacgttttgcgccttatcaaaatggcgaatgttatgtcaatataaggttctgggcagcaattatagtagatttcatttcgtttaccgggcacacctgtcagttgaagttcgaatcattgaaacgtgtggtgttttttttttgttttttttttttgagcaaatggtattgataatttttttttttttttttaaatgacacatgatttgttgatggagtagagaagaaggagatattatttacgaaattaataagatacatttcatacgcatcgttctgaataaatcagatgggagatagaagtgtgtgctcagcttgcggggagcacatgacctacctaacaagtcccattcgccattggttataaagctagaaatgtcgccaccagcttcgtcctgcaactgcaggtccaactgggaaatgcacgaagtagatcttattcgttagtagctagcttagtaactgtgtagttacctgaaacccatcgtaggtccacgaaccaaatttcatttcacatctctgatcgtcgaatggaaaccacgtaatgtcgatcttacacgttgacttaaatatacctggcggtacgtacagacagctcccattattgcgaaccaccacatttgtggcgtacgttccatcgaagccctcgtcggcactggaaagtgtcgttagagaaggaggcttcactgtagcaactcacaaggcatatacatacatatacatatgtaagcatgcattatataggaatatataactatgtgtttagttaagcgaattaatcacctgttgtacatcagtacatccggtttccataggcgatgtggcggaattcgcagatcccgcacaccaccgaactcactcgaattccatcgaagattcatatcgttccattcctaatagtagacaacattggattcattcccccgtggaattttcctatggcataataacttaccaatttgagccaaatattcgttataagcagttgattcttttcgtcctgaaaaataagaaaaaaatacaaacttattgtagtctctacttagtcaatcgtagtctgattaacagtccaacaatgatattattcaaatcgaatgatataaactttttttccaattgtcttaagctgtttaaacgtcatggatttcccaacatctactagtattcacttaccacatcgataatctgcatgagtgttagtccgaagctcagttgcaatggatcggattcattgaccaccggacgctccaggctgttgtagttgtccagaagggcgtggagtagccgcttctcatggggtccagccgcacaagctggttagatggtagatgaagcaaatggtggttaaaaggcgcctcaacaaggactccctaaggatttgtggccgaaggtgcattatgaaaatattatgttaaatatgtactgatgtgattgattgatctattgtatagatcactggaacgtattttgctagctatgtactgtagatataccacttttttttttttggacatggagagatgggatggattgaactggatttggcactcacccggtatcataattaaaagtcccaggccatagaccagcattctgccaccgtttgcagtggcctccggcaatgagtgcggttgtgggaagctcatggatctcgttctatcctgaccagggcaggatggattgtctggccgactgcgtgatggcttcttcataactcgcttgagtcttggagttcgaatattctatatcctatattcgcaatctagatcttttggaggagggggggggtggtggtgttggtgttgtggcgcagttggtagttagtagtagttagtggcactcagcctcctttaagttcacttccatagttttgcattttgattgtgatgccgtccggtgtgttttggtgtttcgatgttttgattggtgttgataatcgataatcgttagtcgataatcgataatcgcttatcgaatttcgctttccggtctactactgttcgtgcgcattcgagccactttttgcatccattgactttcttctaatcccacgcttttcgttagctttccaattttgatcgacttctcatattgtatcgccttacacgtctaatattcctcagctttgattgtattgatatactttcttaattgttaattgcaaccgttttgtgcgcttcctacaggccgatccatttttgacaggctgtaaggaaatgaatagttgcaaacaaattttagttcgcgaatggaaataatgatttaatctaagtaaaatatttattctaatttttagaccttcgtttcggacattgaataattcagttcccccttattcagaagcttaaatttcgttttctaaacaatattttcaaagaaatgactaaaactagttatgtgctcatatggcaaaatgttcacaaagacacaaatgtatgcatagaatataatttttaagatgtacatttatttcaaacactatttatattatttaatatcaaacaattttgtttgtccacgactatttccggtgatttggcatcatttcatcagccgcatattaggggcattgtgatttccgtgatccggaaaatccattaaatgcaaattcgtggtcatgtttattcgcatcaaactttgagttta

SEQ ID NO: 17840 - DNA, 936 bp, DROSOPHILA
atgagcttcccacaaccgcactcattgccggaggccactgcaaacggtggcagaatgctggtctatggcctgggacttttaattatgataccggcttgtgcggctggaccccatgagaagcggctactccacgcccttctggacaactacaacagcctggagcgtccggtggtcaatgaatccgatccattgcaactgagcttcggactaacactcatgcagattatcgatgtggacgaaaagaatcaactgcttataacgaatatttggctcaaattggaatggaacgatatgaatcttcgatggaattcgagtgagttcggtggtgtgcgggatctgcgaattccgccacatcgcctatggaaaccggatgtactgatgtacaacagtgccgacgagggcttcgatggaacgtacgccacaaatgtggtggttcgcaataatgggagctgtctgtacgtaccgccaggtatatttaagtcaacgtgtaagatcgacattacgtggtttccattcgacgatcagagatgtgaaatgaaatttggttcgtggacctacgatgggtttcagttggacctgcagttgcaggacgaagctggtggcgacatttctagctttataaccaatggcgaatgggacttgttaggtgtgcccggtaaacgaaatgaaatctactataattgctgcccagaaccttatattgacataacattcgccattttgataaggcgcaaaacgttgtactattttttcaatctgattgtgccgtgcgtactgatcgcctccatggcactgctagggtttacactgccaccagattctggtgaaaagctttcgcttggagttacaattctattatcgcttacagtcttcctcaacatggtggccgaaacaatgccggcgacctccgatgcggtaccgctgctcggtaagtag

SEQ ID NO: 17841 - protein, 311 aa, DROSOPHILA
MSFPQPHSLPEATANGGRMLVYGLGLLIMIPACAAGPHEKRLLHALLDNYNSLERPVVNESDPLQLSFGLTLMQIIDVDEKNQLLITNIWLKLEWNDMNLRWNSSEFGGVRDLRIPPHRLWKPDVLMYNSADEGFDGTYATNVVVRNNGSCLYVPPGIFKSTCKIDITWFPFDDQRCEMKFGSWTYDGFQLDLQLQDEAGGDISSFITNGEWDLLGVPGKRNEIYYNCCPEPYIDITFAILIRRKTLYYFFNLIVPCVLIASMALLGFTLPPDSGEKLSLGVTILLSLTVFLNMVAETMPATSDAVPLLGK

SEQ ID NO: 17842 - DNA, 5383 bp, DROSOPHILA
tgtttttctcagccggcggcaattttcagagcgggctccaacacacacatatatatataaacaatcacttgtgcgattcatgcgtgactgtagctatttgtacagttttaactttggtttcgctttgcgattatcagcgattattaatgcaaaacaatgggcgaaaattctaatgggttttgttcacattttaggattatgacaaagttagcaagaacttgtcaaagcgattaaaatagtgtatatattttggcgtgaccagttattactcagaatacatatgtatggtgtacagtgtacacctagtggggtcgcctccacttagtgtcgtcgcatttgtatgacttcatcccgagtctagctacagacatgtgtctggtcccattttcatttgttggggatggttagggtagagattatctttaagatagtatgaagcccagtgtagcccaacaacaccacttcaatataagataccaaaattatttggcaatctttcaaagtccgcagcgggtactcgcgatgttaccataatcacttagctgtgcatattttagacagcgcgtgtactttgccttccatgtgccgaaagtcacgagatgtgaatgtgtggcatgcttacgtccatccgatataattagacatatatactatatcggtagatggttcgaccaaatctctttgactttgcagcgactgaaaagttcactctatcaattgacatcaatcgccgggtccgaaaatgatgcataatgcaaggggagaattttccatcgtctcacttaattagtcgaaatctgaacactaaaactgatgtaatcacccaacggcggcggagagagcgacgccggcgcagaataataccgcaccgcacctcactcgttctatatccgaatccgaacccaatagccgcagatacactcatatgcgatatacccacagcgatggccgcagtttataaatgaaggcggcgcaacagttggcgctcagtagaaaaagctgaaagcagctggcggttgcaaaaagtacccactcagttgaccgttcaacgtcggtggcagaacatacactcgcactagacccagcgataaattgtcgctcaagttttcccctcaagcgaaccctttgagttttcccagtgcgcgatatgttacggtcttcagccgaccaagtcgatagatagacaatgaaatggtttaagcgtgtgcgcaaaaagtcttgaactcgagtaaaacgcgtgctagataaaatttagataatttatttaagttaaggccaaaatcgaacactatgccctttcgacgcagcagtctgaatcatcggcatcgcgatggccatgttttggtatggaatcagaggaatctccacgaatctctggagcaacagccgcagagtaagtctgaaatgcaaaaggataagctagcacaagttggtcctttttgttttcttcgccagtttctgtctttattttgtgaccacgctgcgtatgcgttatattgaggaaagtattttcctatttagaccggttttcttccccttggactcatttcgcgtgatatacacgtgcttttcctcatcgccagatagctagctgccaacgaaagcaaactcggcaattgtgcaacacgagacgttggtggaaatatgtggggaaaccaggggaaaagcgagcacacttttcgatttagtgctgcgtaagcaaaagtacacggcgagcgaataacaatgtttttaaaatcaaatttgaatcagcataattgcggattcgaacgattgtttatttccaaatttattttgctagttatgggcaactgaattccaatgaaatccaccgggttattgaacacaaattgcttatcatttcacttttcgattggctacaggtggccaaagttcattggttttgaaagtaaattggcttaatttgttctgctcgcttacagccttgaactttctatgcgtcaccccttaattaaaccagaaatatccgagcccattcgcaaatcctagaaagtaagcgcaactgtacatgaaataggaattctaggtaagctcacgtgtcccatgtggccgtgaaaattgctggaattgcggcgattcacgtttgacaaatgacacaaacggcactaaaaattacaaacactcatccagccaaatgtaaacaattgctttcgtcgtagttacaaaacgcgatcacgaaatatgactattgggcaataaaatcaaataaggagagtagagctctcaattgcaaaagtttattgtgaaatttaagaagaaatcggttgattctcagttattgtaatgcgataagtaatcagttctaaaataataagcaactagacgtatataacagcataacagaaacatttgtgggcccgatatcttaaatgattcacttagcaaacctagaatccgagaatcttatctccgagcaacgaaccttgaagctgaacaaaccgcagacgagattatatcttcatatatcgcttttagccgcgatatatttgggttatttctgcatttccgaagcatttaattggttagctagcaataatagttgtcgacaagacatccgcttgccgcagataaattatttattttggctttttctgacgcatttcattttgccatactctctgagaggaatattttggtaatcacttggctaattctctcggttttcttggcattttttaggatgctttgccacccggtactttgtgacctttatgcttttcctgggcatggccaatgcctatgtgatgcgcaccaacatgtcggtggccattgtggccatggtgaaccacacggccatcaagtctggagaggcagaggagtacgatgatgagtgcggagatcgggatattcctattgtaagttggcattatataaaaagaaaactcaatttatgctgatgaattctcttcaattcccaatttcaggatgactctcaggatggcgagttcgcctggagctcagctctgcagggctacatcttgtcgtccttcttctatggctatgtcatcacccagattccctttggcatattggccaagaagtacggttccctgcgcttcctcggctacggcatgttgatcaactccgtgtttgccttcctggttccggtggctgcccgcggtggaggtgtttggggtctgtgcgccgtgcgtttcatccaaggtctaggtgagggtcccatcgtgccctgcacccacgccatgttggccaaatggattccgcccaacgaaaggtcacgaatgggtgccgccgtgtatgcgggtgcacagtttggaaccatcatctctatgccactttccggcctgctggctgaatacggattcgatggcggctggccgtcgatcttctatgtgtttggaattgtgggtaccgtctggtccatcgccttcctgatcttcgtgcacgaggatccctcttcgcatcccactattgatgagcgcgagaagaagtacattaacgattccctctggggaactgatgttgttaaggtgggatttggagataattaacaattttagattgaaattataatattctattcttactttttagagccctcccattcccttcaaggctatcatcaagtcgctgcccttctacgccattctgttcgcccacatgggtcacaactacggctatgagactctgatgaccgagctgcccacctacatgaagcaggtgctccgcttctccctgaagtcgaacggtctgctcagctccctgccctacttggccatgtggctcttctccatgttcatctcggtggtcgccgattggatgattagctcgaagagattctcgcacacggccaccaggaagctgatcaacagtattggccagtatggaccgggagtcgccctaatcgccgcctcctacacgggctgcgacagagcactgaccttggccatcctcaccatcggagtgggtcttaatggaggtatctactccggcttcaagatcaaccacttggacctcacaccgcgtttcgccggcttcctaatgtcgatcactaactgctctgccaatttggctggtctcttagcgcccattgctgcaggtcacctcatttctgatcccagcaaggtgagttcggaagtccatttgagttggaaaacagatactataacaatttatttccatttttagcccatgatgggtcagtggcagatcgtgttcttcatcgctgcctttgtgtacatcatttgcggtaccttctacaacatcttcggatccggtgagcgtcagtactgggacaatccggaggacgatgagcagaagccggccctccagacgaccgtcaccacctccccagcgaggctgagcaacggcagcacggcaccagcggccatctcgagttcctaggactccaaatggaagtagtattagccgtagtcgtgcgtcattaaccattaatccgtacactatacgatatgcgtagcttagtccttgttttagtctaattatttgataagccaaaagttgttaatattgatagttagcctttgatttattcctacatctgcataaataccgctaaaaagacactaatcttccaattgtaaataaattgggaactgaaaccgaaaccacaccaagtcgagcacaaaacgtcaactttagttagtgaaatcgaggtctaccattgcaaatgtgtagttttcttattttattgtgatagcgaaagagtttacttctctcactgatttgttttgaaattaaatgaaccgctcaagcgaacattgttaagcaaacaaccaaatgtatgaaaaccattaaaaactactagtttaagaaacaaaaaacatttaaacatttattggaagagggcagaaaaaggaccaattacgtgtattgggaatgaatgttgcttaaagaagttgtttaaagaataaccaataatcatattctcttaaagccaacaataagctttcctaacaacgttggttactctttcacccttgatggctaattcgtaaataataagcagttgtcaggatatcaagtgcaaccatctcctctatcagctacttaaatgctagcactaaagcagaaggatttagttagcagttacaatgggccatcaggaggagctgaagccggagcaagtggatctgaaagtaaccccctttgtgggctatctgcgacgcacatggagtgacttctgtgccaccagcagtatccatggattgaaatacactcgtgacgaggatacgaataagattgtgcacctggtgtggctcttaatatcggtggtgatgttcatttgtgctgttgttatggcgcgcaccttctacatggactatcgcagcagtccgacgcgtatgaatgtggaaagtgataacacaccggttaatagactcta

SEQ ID NO: 17843 - DNA, 1880 bp, DROSOPHILA
tgaaagcagctggcggttgcaaaaagtacccactcagttgaccgttcaacgtcggtggcagaacatacactcgcactagacccagcgataaattgtcgctcaagttttcccctcaagcgaaccctttgagttttcccagtgcgcgatatgttacggtcttcagccgaccaagtcgatagatagacaatgaaatggtttaagcgtgtgcgcaaaaagtcttgaactcgagtaaaacgcgtgctagataaaatttagataatttatttaagttaaggccaaaatcgaacactatgccctttcgacgcagcagtctgaatcatcggcatcgcgatggccatgttttggtatggaatcagaggaatctccacgaatctctggagcaacagccgcagagatgctttgccacccggtactttgtgacctttatgcttttcctgggcatggccaatgcctatgtgatgcgcaccaacatgtcggtggccattgtggccatggtgaaccacacggccatcaagtctggagaggcagaggagtacgatgatgagtgcggagatcgggatattcctattgatgactctcaggatggcgagttcgcctggagctcagctctgcagggctacatcttgtcgtccttcttctatggctatgtcatcacccagattccctttggcatattggccaagaagtacggttccctgcgcttcctcggctacggcatgttgatcaactccgtgtttgccttcctggttccggtggctgcccgcggtggaggtgtttggggtctgtgcgccgtgcgtttcatccaaggtctaggtgagggtcccatcgtgccctgcacccacgccatgttggccaaatggattccgcccaacgaaaggtcacgaatgggtgccgccgtgtatgcgggtgcacagtttggaaccatcatctctatgccactttccggcctgctggctgaatacggattcgatggcggctggccgtcgatcttctatgtgtttggaattgtgggtaccgtctggtccatcgccttcctgatcttcgtgcacgaggatccctcttcgcatcccactattgatgagcgcgagaagaagtacattaacgattccctctggggaactgatgttgttaagagccctcccattcccttcaaggctatcatcaagtcgctgcccttctacgccattctgttcgcccacatgggtcacaactacggctatgagactctgatgaccgagctgcccacctacatgaagcaggtgctccgcttctccctgaagtcgaacggtctgctcagctccctgccctacttggccatgtggctcttctccatgttcatctcggtggtcgccgattggatgattagctcgaagagattctcgcacacggccaccaggaagctgatcaacagtattggccagtatggaccgggagtcgccctaatcgccgcctcctacacgggctgcgacagagcactgaccttggccatcctcaccatcggagtgggtcttaatggaggtatctactccggcttcaagatcaaccacttggacctcacaccgcgtttcgccggcttcctaatgtcgatcactaactgctctgccaatttggctggtctcttagcgcccattgctgcaggtcacctcatttctgatcccagcaagcccatgatgggtcagtggcagatcgtgttcttcatcgctgcctttgtgtacatcatttgcggtaccttctacaacatcttcggatccggtgagcgtcagtactgggacaatccggaggacgatgagcagaagccggccctccagacgaccgtcaccacctccccagcgaggctgagcaacggcagcacggcaccagcggccatctcgagttcctag

SEQ ID NO: 17844 - protein, 529 aa, DROSOPHILA
MPFRRSSLNHRHRDGHVLVWNQRNLHESLEQQPQRCFATRYFVTFMLFLGMANAYVMRTNMSVAIVAMVNHTAIKSGEAEEYDDECGDRDIPIDDSQDGEFAWSSALQGYILSSFFYGYVITQIPFGILAKKYGSLRFLGYGMLINSVFAFLVPVAARGGGVWGLCAVRFIQGLGEGPIVPCTHAMLAKWIPPNERSRMGAAVYAGAQFGTIISMPLSGLLAEYGFDGGWPSIFYVFGIVGTVWSIAFLIFVHEDPSSHPTIDEREKKYINDSLWGTDVVKSPPIPFKAIIKSLPFYAILFAHMGHNYGYETLMTELPTYMKQVLRFSLKSNGLLSSLPYLAMWLFSMFISVVADWMISSKRFSHTATRKLINSIGQYGPGVALIAASYTGCDRALTLAILTIGVGLNGGIYSGFKINHLDLTPRFAGFLMSITNCSANLAGLLAPIAAGHLISDPSKPMMGQWQIVFFIAAFVYIICGTFYNIFGSGERQYWDNPEDDEQKPALQTTVTTSPARLSNGSTAPAAISSS

SEQ ID NO: 17845 - DNA, 16200 bp, DROSOPHILA
atgtgatacattcacattttctgaattgaaacccaagcgaaaaggtctcttaggacttgaatggaaaaatctagatttgaaattcaaattggcagcgaactgtgaaatttatgtttccggcatttttatcttagataaaagtatttggcctacaggaatttgtaatatggtgttagttatcgatcaggattttcttttttaaaatccttagttaacgtggaatacgtttaataataatgactgttaaacgcattaaaatttagcaaagtcagtgaaagtgcaaggacgaactactctggaaaatctcacgtaaagtccctaccaacttcccggcaactcattaatttttaagcaactgataaggagctagtaggtggggaggtccttcggctctcctccgcgtttcgcactcaatgttaatggcttggttaggccacgccctgctcatctagaatttcgaaagcgattcccgtaatggcagcgagccattagcctcaagtggcaatgtggcaaagttgcgtctaaactttccatttgttccgtttaagctggcccctaatccgctatcaaatagtaactttctccgctcttttttttcaggtttcttcaatcaaagggaaaaatcaactgttaaccgacgagtggacgcatttaaagctatcgcaaaagacaaacaacaaggcagacgtgcatgaaaggaaatctggcggctaaccggccgatgagtctgggccatcatcaattaccccatcgcctcgcacctggccattaaagccaaggcgtgtggagattgtgcggattgtggagagcaacaagttggccggacaagtccttggggacgccaagacgaagccaccagtccccgcataagtgggcgagtacgtgacttaatcagcgggcgcagctggattctgagcctggctaacgaggcgaccacaacgatcacaaatagaagctggagaagaaggaggtgtgcccccgttttgccagcaatgatttcatgcacggcccagtgagcaggagcagcagcagcagcaacatgacagatgtgtcatcgccagctggtggcgccgcatctccggttgaaatgtccaccaccagcagctcttcagccgccactacgtcggcgtcctcgtccaaaccgctgaccaatggcgccaacaagacggctatatcaacggcagctggaggagtgacaccgggtgctgttcctggacccgggtccggagcaatccccgccagcagttcgagtggcaatcaggtcaaactggagcatcatcaccgccagagcaataacaatcgacctgcggttaccaatcgcagttcggaaaccaagctgatgacacctaccggcagttcctcatccccatcgcaatctccatcccaaacccaagccagtatacaaacccaaacgagtcagcaggacaggctggccaaggcgagcaccacggcatcccagcaggatgtcgatgaggtggcccgccttttcgaggagaagccggaagcattcgagaagtggctgacggaaagggctcctccagaggcactcagccgactgcaggagttcattgagaatcgcaagccgcacaagcgaccctcggtcacctccgatctcttccagcagtggatggccgcatcgcccaccgtgcagcaggtaactacttaacataagaatttgccattatgttaaattatttgttttacgatttcaaatttaatgttagcttgtattcagagatgtaattttaattagaagaacaagctagaaaagtttagtgcaatgaattttattccgagcccattaaaactatttttggaaaatgtgattacgccacttaagtcgcagtcagtcgaaaacttgaatgaaagttgttttagcacttttcctttcgcccaaatttgtattcatggggcgtcatcattacacctccattgcatcctagcaatcctttttagcccacgaatttcgtaggacaaagcaaagtagcaagcgattgcaagtgcaaatgcagttggccaagtggcagtggcagttgcagtagcaagtgcagtgggtccccagcacttagcaaccatccaccagccaaccatccatccttttcacatagtcagtgctctatttgcccaccatggtggtatgtactaccgagaagcgactgtttgagctggtatttgtgtttgccctgctttgttttgccatgttttgttgtacttttggcactgctgcgctggatttccgcttttatttaactttgttcgccttctcgccgagcgaattaactaaattgatattttcacaaatttcctttggctggctttccgcttgtctttcatttggctgtctctggctgcgtgtgaagttccctaattggaaaaactcacacaactggcattttcacgacctttggcttatgtttaattcaggcaccaaaaatgaaattattcgattcgagcgaagcgatatgcagccgaaaagcatactatatacatgtatttatttatttattgcctttttattgacaacctccgccgccggcaggtttttaaatcgctaccgcacgacggcgtcaagtatttttcaattaacttttatttgatattttctgtaacagggaaaaataacataaaataaaacgctgtgatatacgagtatatgtgacctgacctttgtcgatggcgaatgctcgtttcgaataattcgtaaaataaatttcatgtgtgcgacgttatgggtataaattaatagcgacacttttaaatgatttttttttggtttcggcctttaaaattaaaatgtgacatctgatttttgaaatttgaatagtttaatttcaacatgtacatatatttgcttatcaaattttgtttaatgctttaattgacacctgtatttgcaaaaatacgcataaatttataagtgttaaacaatcagtataacttgtaaaggcaattcagtttaataggctattttacccataatttaactatttacttgtttatttggactgcacatgatggccatctgataagtgcttgaactcaaaaagtcgagcgcccaattgcactcttttgagccactcgatgccaatggcaactgtcgtcgagacccacttgtgcattgcgtttttgcgatgtttacctttctgaaatatccatctaaattatgctagatcaccactcgaactgcaaattgcacttgggctgcaattggttgagcaaaaacagagagactgaaaaatatcaaaacaagaagtgcgctcgagtccagcatggaaatcggcactcacctggggcacttgtgaatcaaaactaaaagtcagtggaaaattctttcagccagcgcagcagtgtgtgtgtacaagtacgtgtgtgtgtgtgtgtgtgtgtgtgtgtgggtgcttgcaaggggagggaaaatgggaaagaactaggtcagtgtcctgggcaaaacaagaagcagtcaacctttgagtcctttcagcgattgtctggcttagtgagtgaactttctatattttttttgcgtttgttcgccgcaggtgaacggcacgtgtgcctgcccctttttgttgtcgatattgtcaatttatttaagtgcatgttacgcaatgcaaactgcaatccccgctcatgaaattgacagttctcagacccagttgtttaaacgtatttgtatcgttggccatacgctgtgcagtactgaaattttcatgccatgcaggacgtttttcccattaagagtcatttcgttttcatttttcacttccttttgcaaggaaaaaaaaaatatatatatatataaaaaaatcgaaacagaaaagaacaataataaaagcagaacgagtgcccaacatcgtattgttgattttattgttgttttaaggggaacactcaatgccactggctgaagttcaaatttacttaacgctctgactggcttcgctttgttttcatttccctttatttgtctgcattttatttaatgaatttgcattgttcccgcccgaaacacaaatacaactgtttttctaacttccagttcaatccaaacaaggcggagattattttatgctctgttctcggttcccgagtcttttgtgagcttttcttttcttaagctggtgctaagacgagttttaatggcgtttaagtgcttttatataattcatgaagtgaaaacgaaaaacaaaggattatgctaaaaaggttattcgaaaaaaggtgacggatattgattacagcttatgcaaataaagccgtattgaatactatttatttcatagataatagcaaatgaatatatttacaattccgttctgcataaaaaatagcaaataagcagtaggcttacctcaaagtggcctacttatttttaaacacagtaattattgatatttctgaccgtgtgccaattggaaatgttagtacaagaaaaggcagtaccaacagtaaattgctttaatttgtcagtgaaaataatgggtgttgtgggtggcaggacttgtggaatgggatggcctgtttgcaggaccaggatgggaacaatacacgcaatataatcagctcccagttttcggctcgcagctcccagctcggttaattggccactcgcacgcacaggtcacaggatcgggcgattcggggccaaaagaagggaggcctttttcggtattcaattaccacattgccgcaggacggtggcctggagcggcgaggttgggcagccgcctgggggcacaactgccaactgctgctaatagtcgccctttgaaccggaccaagttaatttccaatgaaattcggggctcgggttaaatggccagaaatcgaaaacagaactaatgccatgtgcggagagacaatagccccaaatatcgccttaaatacaatgctgaatgtttaaaatacccccgctcgttgcgccgagtaataatgacagttaatatagctatttatatggcaaactaattaaatatcggaattattctgctttctcatgccaaacagcagaattcaattacagtccgagcacgtacttgcactgttcaaaaaaattgtcttacaattaggaaaaagaagatcaggaagttttacaaattccaaggtatacaatactctaaaatgtacgatttgcataacaaaaaaactaaattaaaaataatgtaggaatctaccatagtatagtggagttgttaagaagtattttatttaatttaatttagttcatattccaaattatattctaagcttaatacgcacacgaattaaggctcagtgtggagatttttttgttttcccaaactaatcccgctattaacctttatgtgtgtatttcctcatgccactttcgtccacagaaatcgccgaggagtctctcgaactcttcagcatcgtcacttccggagtgccggaggcatctgatggacctggacgagggcgagctgttcatggaactgattcgcgacgtggccaacgagctggacatcgatgtcctctgccacaagattctggtcaatgtcggactgctcacccacgcggatcgtggctccctgtttctggccaaggggacgcccaccaacaaatatctggtggccaagctattcgatgtcactcaaaagacaggtgagtctgcgaaacaaatgcaaaatgacctttgactcttgctctttttggtatgtgcagtaggtgttgttatctgtggcgggtaatcccgctttaattaaggtgaacaatgcagaaaaatgaactgcatctgcacaatggctgaaggaggctaaaatgaaaatgaaaaatgggctgcataagccgagtcaaatgtggttttcacaaatgcagtgggcataaattgagggactttctctgacaaaagccagatagtactcgggagaatagggtcaaataacatgaataagcccggaataggaaaaggctatcaggatagtaatttttgcattttaattgtttgcttttgtgaaatcgaatttccttaattgtttctaagtttccctgcatttatgtgataaaatgtcacccacaacaaagctgcttataaaaggtttatggcccacagaaaggggccaggccaaacccattggacgtaaacaaattgagactcattagcggccgggcaaatgattcgaggggtggccaaaagagatggctaacgcattagcgaaattaagctcgaatggaagggggcattaaaacttttggagacgccataaaactgaaaaggtcgccttcaaatgtgatatatcatgtatttctgagaacgtgatgccacaggttccgcccacaaaaaaaaaaaaaacaaacagctccacatattcataccaaagtgcgctacattcgtaatgaatccctagtgcagatccgtgagtaaaagccaccgcttccgctacataattcagtggggaaaatgcgagaaagattagagctgggaaatgccgggtggaaatgggcgctgctggttctggcctcagatacagatatatctaatgtttcggatacgatacggatacatgtgagcctctgtgtgcgcctctgagattatgattgaggcgggaccggcgagctcatgcaaattcacatttgacttcttgccctcggatttcgtggggtcttgtcattatttatttatatattatactctcttatttttttttggtgcttctgcccaggccgtgtccttatatcttttgcatggcagagtgaatattttgcctataaatttaatacgtattcagatgcacgtcgggccttatctgggtcctaatacgctttgcaacggttgaactaattttcaggccctcttcagcgtgtttaaatttgagttgcagccgaattaaaaagttataaaatattattggataaagaaacgtgttgcctaaaagcatttatagctagtctaaaggcaaacgtaaaagggtaaatttttatgcagcttattaaagagtacatttgaactacgtaccacaactaatatctttttaaaaacctaactgatgaaaagatgcaaaaattcggaacaaagccatcttaatgcgagaattttttcttgattgtttttgccttgattgactcaactttgaatctcgtttgattgcagcactcaaggacgcggtgactcgggccagtgccgaggagataatcattccctttggcattggaatcgcgggaatggtggcgcagacaaagcagatgattaacatcaaggaggcctacaaggatgctcgcttcaattgcgaaatcgatctgaagaccggctacaaaacgaacgccatcctctgcatgcccatttgcaattacgagggcgacatcataggcgtggcgcaaattattaacaaaacgaatggtggatatttaaaggatttgtcctcctcccaaatttattaacttatatccctcgtaggctgcatggagtttgacgagcacgatgtggaaatttttcgccgctatttgaccttttgtggaattggcatacagaatgcccagctctttgagatgtccgtccaggaataccggcgtaatcaaattctcctcaatttggcgcgcagtatcttcgaggagcagaataatcttgagtgcttagttaccaaaattatgacagaggcccgggaactactcaaatgcgaaaggtgctctgtgtttctagtggatctcgactgttgcgaggcggtaagtcagtttcagtaatatagtaatagcttttagtgggtctaattatttggaaaaagtattcatatcaatatctgaatattagatttaattattagtatttgttttattttctcagcagtaaaaatatttattttcgataatatcttattgtattattccctaattgttatagaaacctaaccgcgtcgttgaagtttaagtcgaggatactcagccagtttcatggtcatgttgtccacataaaccagatccttgtagagagtgcttgtgctaatcttgtagttcctgagtattctgcataaggcaaactttgaagacatcattgcatattttgaccctgagaaaatgacataaggaattgatttaatatatattccgagattacatggcggtgatcaacccaccaatgcaatttctctttcccctcgcaaatggaatgtaggcatatgggtgcttttgttccatgttttccgccaagaagttatccggattaaagttgtctgcatctggtccccagacttcgggatttctgtgagtgtgaaacatgtcgatgccgatgacgactcctttgggaatgagaactccattcgagagacgaacatcattctttgtttcccttgctgttattggaatagcaggtatcaggcgtagtgtctcctttatcacgcgctccaagtagtccagtttctgcatatctgggtatgttattccaaagtgtccggcatctgggaagacaccatttagctcctcaaagaccgcttcctggtgctcgggatgattggccagtaggaagagtgcgtgataaactgttagagctgatgtatcatagccggcggcaatcattatacaacattcgctcttcacatccatataggtgatatcgcctttacggtacagttccattgccctattgatcacaatgttcgattcgggatctgaatcagtctttggcaatggattgacttttttattaaccacctgaaaaaatatgattaaagtaaaaatatctcaagaccatcattacctacgttgtccaacattttttgaattctagaaaagttgtcagctcgtaacttatcataaccgcatatttttgaaatcatcctgttttgaaccaagggcatcaatatattgagagtcgaatgagatatgagcctataaaaatgaatgggattgtcgcattttaagtaaataaaattggtttcggtttgcttaaagtttctcttacgattcgaagctttccacgaggctgccatttttgaagtgctcatcatgtttaacttcagaacccattgtggtttcttagaacagggtaaaaaatcagaaaagcttatcaaacaataccttgattagatggcttacgggcggctattttaaaagaccatctaagcatctctggaaccacatctatttcgcctttgtcgacataagtatctagtaaattcatcaggactttcgtctcggcatcgaaaatgtgaaagaagctaagcaaaagatcctgtttaaacgatgggttaaagtgcttgcggcgatcaagccaatgaggatctattaaatgcttagattgttaattaaatttgattaactgttaagaatgctgcagtgtaggcaccttgttttcccagcaatccatttcccatacaagaagttatggcattcacaatatgctggctcttgttgtggcaatcaggagacgaaaagatatcctcaacgactttcggatctcgtgtcactataaatggcaccggacccatccacgttaaaatagtcgagccgtacttattcaaatactttgttcgaaagcttagtttacctattttcgagtaggttataataattcaatatttgtaatctttttattcgttcacttgggtttaagtctaaaatttacgtttataggtgatgatattttccagggagctacccaaaatgggtagtcctatgggtccgggaatctttagcatcaggaaatataaccttcggcgactccataagaaataaatccaaaaaagagctccgaccgccagtaacaaattgatagttaacataatagaactgtcacttcgatgaattatattcgctatagaatggttttgccgactgattcgtctcgagtctttggtaggggtttatatagatgtggtgcggtagtatcaggtcgtttatacgtaattataaaaaaattgtagttataatctaggttattgaaaagtattaaaacgtataatttctaagatatttcttacgacgaagttctggaatggggtcaattagataatacaatatataataatcagttaataattgtgcatatattataaaaacaagttactcgtttgagtaggttaatatggaatatattgtatttaccgtttgtattacgcccctgtctgcgtatctaagtcatttgaatcgatattgatattcaaattaattgatcgacatttctcagacaacaatagtgtgtccaagcaaaatggttagcgattggcgagtttttcccaaatatgctgcataaataataaagttaaatcctgtggtcaccacccaatgtccttcacagtttaatttacattttaaaaacggctcagcgtgaccattttgtttgtgtgttcgtcgtcaacccaaaatgaacttaaaatgttcaatctacaaggttttctttttgcgacataattgtgggcgtggctccacgtggctggaattcagtaatattcaagtgtcaggcatcgcgtgaaattctgacagttcggtggtaaaatgtccttgggggtttgtaaaataatgtccaagtctgggcaatttacatttgtgccgaagctttgctgattgcctgcctttaattaaattgactcgtgcctgaattattcaaattataataattgacaacgtaactagtctgggccaggtttgcatagagttgcggaagtatagaaaatactataaataaaaagaaagtttaacgacttctctgatctttcagcaattagatagatattgtctagatagcaattatcacacgataagacaggtattttaaaagcagtaacgagtatcttaatccgctctaattgctccgcatgttattcattgcattttataattatagggaacacattggttggctataaatcaagctcaatgagaaaaactttggacgccatgattgacgtcatgaaatgtatgcacttaacttaaaggcattcttttattgtcttcgatcttcgataattatttattcgaatcttgcttttgggtaaatgtatcgacatacacattactttgaaggaagaacacgtgcacaattgttttacatattccgccttggccaccagggcgtatgaataatgccgcatgatatgccgtcaggaataatgcattaaacaggcagcaggacagagcagtgaaacagatgtcgagcctcctggttcattcatacacgagagacattttgattggccaatttgatgtatgcatatcattaaattactgcatgctgcattaatttataaccagtggtggaaaatgaaggccttgcatatgaaatttaacgaactaaacaaatgctcttaatttcacacggcaacggttattaatttgatctgccatattaaatgttgtcgactacgatgattgttcaattcgggaaattgccatggccaaattagccattatctactgccagctgataatgcaatgcatgtgtaatggacaatttattagtccataaagctcaactggcccacaggggcaaaaacggtcgagttgcgccggacggactctgaaaacttggctgacatgcccgtcatgtgcaacatgtcagcttaattatgctcgggtgggtggcggtgggtggtggagtacgagcatgggaggttctggtcgactgtgtgcgaccacggatgcacagagagaaaagtatataacgtaaataatgtttgaaaattacaaaatgatagtttaaaaaacggcaaataaagttagagttaaaattactttattataataagaaaaaataccgaacatgttcataaaaatcaaattaaatgcagactttcaaagacttttctatttcaattcaattcactgtgataccaaaccttcatagattttttgtttctaattttccacttcaataccttagaaactataatttttttacgttttggctgggagcgcgcgcaatggtgcaatgcaatttatcaacaagctggcggcttggggaaaagccgttacgagctccattagtggcagccacttaatgtaccctctgcccttcttctcacccctctcgccacagagccatttggagaagataattgagaagcccaatcagccagccacccgcgccatcaagtccgccgatagcttcgaggagaaggtaagtgcacctgaagcttgactcgcttccaaatcattgattccggttttcgaaaacccttcaaccgatcggacagaaaatgcgcaatcgtttcacggtgctcttcgaactcggtggagaatatcaggctgccaatgtttcgaggccatctgtcagcgagttgagctcctcgacgctggcccagattgctcagtttgtggccaccaccgggcaaacggtgaacatctgcgatgtcatcgaatgggtcagggatcacaatcaaattcgagcggaggacgaaatagatagcacccaggccatcctctgcatgcccattatgaatgcacagaagaaggtcattggcgttgcccagcttatcaacaaggtaataatttttactacctctatttgcgtgctaactatttattaacaatttttgccattaaaaattaaggccaacggagttcccttcaccgattcggatgcctctattttcgaggcatttgccattttctgtggcttgggcattcacaacacccagatgtacgagaatgcctgcaagttgatggccaagcagaaggtggccctcgagtgcctcagttaccatgccaccgctagtcaggatcagacggagaagctcacccaggacgtgattgccgaggcggagtcctacaacctgtacagcttcacctttacgggtaagtgcatttaaaagtattctgtattctattctaaatatttcattgtattccagactttgagctggtcgacgatgacacctgtcgcgcagtgcttcgcatgtttatgcagtgcaatttggtctcgcagtttcagataccatatgatgtaagtcaattgctttaaagatgataaatatataatccatttctttgtataatattatatatgtaggtactttgccgctgggttttaagtgttcgcaagaattatcgtcctgttaaatatcacaattggaggcatgctctaaacgtggcccaaacgatgttcgccatgcttaaaactggaaagatggagcgctttatgacagatctggagattctgggtctgttggtggcctgtttgtgccatgacttggatcatcgtggcaccaacaatgcattccagaccaaaacggagtccccgctggccattttgtacaccactagcacgatggagcaccatcacttcgatcagtgcgtaatgattctcaattcggagggaaataatatatttcaggtaagcgcacagcattttaataagtatagtagtagtatataagtagtatataagccaattatgatttatgtataaatttcaaccatttattattaaaaatataattgcggctaacctaaccgcggaccacgcgtacattgcggttcttggacttcttgttgagttttcggttggcggccttcttggatcgtttagccgcatttagacgggccttgcgggacttggcgcgggaacttttggatctggtcgaggaactggtggtggatccaactctgattttcctggtgatcgagtacttcagattgctgagacgcacgattttcttgtttgagcccgaactagatgaagaggacgacgatgtggtagactctgtggtggattccgtggtggtgctatccgtggtgctggtactcgattccgtgcttgtgctgctgtcagcagctctgacatgggccacatacaaaaccatcgagaggacgaagagaacaagggacaacttcatgttggatgtttctattgagaactgatatgctttctgctggcaaaatacaacttttatagtgaaattgagattaggtagcgacccccaaatcaccaaaaatgtttgtttaacaaaatatctgcgagttgactcaaccttgacttcaatagggagtgaactttattttaagcacatgtctagtagtacggtgacgtcataggcacagatgtttttgaatagaagttgttgagtatgaaataactactaggagcggaattaacaaatgcacatgttaatattcgctttttttttaggccttgtcacctgaggactatcgttcagtcatgaagaccgtggaaagcgccattctgtccaccgatctggccatgtatttcaagaaaaggaacgctttcctagagttggtggaaaatggggaattcgattggcagggcgaggagaagaaagattgtgagtccaaataaatgctgatcccagtgttaacaattttttacccatttttgaagtttggcttagctttaagatttattcttgtatttcttataattaaacccttaacaaaataccttatttcaattgatcttagtgctttgtggcatgatgatgactgcttgcgatgtgagtgccattgccaagccctgggaggttcagcacaaggttgccaagttggtggccgatgagttctttgaccaaggagatctcgaaaagctgcagcttaacacccaaccagtcgccatgatggacaggtaacttactaggaaaatctcaagaaaaatgtgcttaaaatgtttaattattattagggagcgcaaggacgagctacccaagatgcaggtgggctttatcgacgtgatctgtctaccactctacagagtgctttgcgacacctttccctggatcactccgctctatgaaggaaccttggagaaccgacgcaactggcaggatctggccgagaaagtggaaatgggcctcacatggatcgatcacgatacgattgacaaacccgtggaggagtttgccgcgtgtgcggatgaagaaatcaaggatatcgagttcactgtgaccacgctaaattgcaatcagcaatctcagcatggcagcgaggatagccacacgccggagcaccagcgaagtggctccagattgagcatgaagaagaccggagccctgggcaaggcagttcgatcgaagctatcaaagactctatacaacagcatggatggctcaaagccgaagacctccttgaagctccttgagtcccatgtcagcgaggatatggatgacaaaagtcctacgagtccttcgcagccgcaggcctccgggagcatgggccgcatgtccgcctcgtcctccacctcatctgccggcggccagatggtggacaagtccaaaaagcgttccaaactgtgcgcgttgttatgacgaaagccgtccaattagaatatggcgactccctccagcaccacgggcagtgagactgaccacaagtgcggaggggggatgaccgagttctaattggattttggagttttgaaaactcacattaaaaatcttgttgtgctccacctgcatctactacaggatttggtactcgatttcgtttggtttgaatgtttttgtttgtgaaactatgtatttcaataaaataacttttgctttagatgtcaagacattgaaactaaagtccctgctacaccagggataaaatagtttattctcttttatcctattttacaaaattaaatataaatgtaaatttttattgtaaacaaaagttatttatcaaacttcagaaacttgaaaaagtgcttttaattgaaacatattatagaaacagaagaattggaaactcatgtataatttcattaacaagaaacgcatcaaatctaatcgtaatcgagaacgaaggcaggagtatatgtacatgtttgatatatgttttaagtactataactacccatatacaagcgaatgagcattaggcagaagcaaatgcagttgcaatattaagcataagtgaatgtcaaaatatgtgatctatttacggtcccgcaggtgcgaagccctcgggttgaacctttgtcggatactatcctctccctatctatctatctatctatctatctatcgacctatctatctaactatctgtctgtcgcttttaggtgattaaaaaccgcgaaactaaactaattaactaagtagatggaatccaaccaactagctaagagtgtacgtagctaccctaaccaaaatcgtgctagtcaaacaaacgtatgagatactattatgtgtacgaaacccctagttaagaattttgaggctacataccaggcatcgggcattgggcatcaggaagtcagatagggatcactactagtcctcgcctgtgatcggcttgaaatctactttatagctaact

SEQ ID NO: 17846 - DNA, 3699 bp, DROSOPHILA
atgcacggcccagtgagcaggagcagcagcagcagcaacatgacagatgtgtcatcgccagctggtggcgccgcatctccggttgaaatgtccaccaccagcagctcttcagccgccactacgtcggcgtcctcgtccaaaccgctgaccaatggcgccaacaagacggctatatcaacggcagctggaggagtgacaccgggtgctgttcctggacccgggtccggagcaatccccgccagcagttcgagtggcaatcaggtcaaactggagcatcatcaccgccagagcaataacaatcgacctgcggttaccaatcgcagttcggaaaccaagctgatgacacctaccggcagttcctcatccccatcgcaatctccatcccaaacccaagccagtatacaaacccaaacgagtcagcaggacaggctggccaaggcgagcaccacggcatcccagcaggatgtcgatgaggtggcccgccttttcgaggagaagccggaagcattcgagaagtggctgacggaaagggctcctccagaggcactcagccgactgcaggagttcattgagaatcgcaagccgcacaagcgaccctcggtcacctccgatctcttccagcagtggatggccgcatcgcccaccgtgcagcagaaatcgccgaggagtctctcgaactcttcagcatcgtcacttccggagtgccggaggcatctgatggacctggacgagggcgagctgttcatggaactgattcgcgacgtggccaacgagctggacatcgatgtcctctgccacaagattctggtcaatgtcggactgctcacccacgcggatcgtggctccctgtttctggccaaggggacgcccaccaacaaatatctggtggccaagctattcgatgtcactcaaaagacagcactcaaggacgcggtgactcgggccagtgccgaggagataatcattccctttggcattggaatcgcgggaatggtggcgcagacaaagcagatgattaacatcaaggaggcctacaaggatgctcgcttcaattgcgaaatcgatctgaagaccggctacaaaacgaacgccatcctctgcatgcccatttgcaattacgagggcgacatcataggcgtggcgcaaattattaacaaaacgaatggctgcatggagtttgacgagcacgatgtggaaatttttcgccgctatttgaccttttgtggaattggcatacagaatgcccagctctttgagatgtccgtccaggaataccggcgtaatcaaattctcctcaatttggcgcgcagtatcttcgaggagcagaataatcttgagtgcttagttaccaaaattatgacagaggcccgggaactactcaaatgcgaaaggtgctctgtgtttctagtggatctcgactgttgcgaggcgagccatttggagaagataattgagaagcccaatcagccagccacccgcgccatcaagtccgccgatagcttcgaggagaagaaaatgcgcaatcgtttcacggtgctcttcgaactcggtggagaatatcaggctgccaatgtttcgaggccatctgtcagcgagttgagctcctcgacgctggcccagattgctcagtttgtggccaccaccgggcaaacggtgaacatctgcgatgtcatcgaatgggtcagggatcacaatcaaattcgagcggaggacgaaatagatagcacccaggccatcctctgcatgcccattatgaatgcacagaagaaggtcattggcgttgcccagcttatcaacaaggccaacggagttcccttcaccgattcggatgcctctattttcgaggcatttgccattttctgtggcttgggcattcacaacacccagatgtacgagaatgcctgcaagttgatggccaagcagaaggtggccctcgagtgcctcagttaccatgccaccgctagtcaggatcagacggagaagctcacccaggacgtgattgccgaggcggagtcctacaacctgtacagcttcacctttacggactttgagctggtcgacgatgacacctgtcgcgcagtgcttcgcatgtttatgcagtgcaatttggtctcgcagtttcagataccatatgatgtactttgccgctgggttttaagtgttcgcaagaattatcgtcctgttaaatatcacaattggaggcatgctctaaacgtggcccaaacgatgttcgccatgcttaaaactggaaagatggagcgctttatgacagatctggagattctgggtctgttggtggcctgtttgtgccatgacttggatcatcgtggcaccaacaatgcattccagaccaaaacggagtccccgctggccattttgtacaccactagcacgatggagcaccatcacttcgatcattttcggttggcggccttcttggatcgtttagccgcatttagacgggccttgcgggacttggcgcgggaacttttggatctggtcgaggaactggtggtggatccaactctgattttcctggtgatcgagtacttcagattgctgagacgcacgattttcttgtttgagcccgaactagatgaagaggacgacgatgtggtagactctgtggtggattccgtggtggtgctatccgtggtgctggtactcgattccgtgcttgtgctgctgtcagcagctctgacatgggccacatacaaaaccatcgagaggacgaagagaacaagggacaacttcatgttggatgccttgtcacctgaggactatcgttcagtcatgaagaccgtggaaagcgccattctgtccaccgatctggccatgtatttcaagaaaaggaacgctttcctagagttggtggaaaatggggaattcgattggcagggcgaggagaagaaagatttgctttgtggcatgatgatgactgcttgcgatgtgagtgccattgccaagccctgggaggttcagcacaaggttgccaagttggtggccgatgagttctttgaccaaggagatctcgaaaagctgcagcttaacacccaaccagtcgccatgatggacagggagcgcaaggacgagctacccaagatgcaggtgggctttatcgacgtgatctgtctaccactctacagagtgctttgcgacacctttccctggatcactccgctctatgaaggaaccttggagaaccgacgcaactggcaggatctggccgagaaagtggaaatgggcctcacatggatcgatcacgatacgattgacaaacccgtggaggagtttgccgcgtgtgcggatgaagaaatcaaggatatcgagttcactgtgaccacgctaaattgcaatcagcaatctcagcatggcagcgaggatagccacacgccggagcaccagcgaagtggctccagattgagcatgaagaagaccggagccctgggcaaggcagttcgatcgaagctatcaaagactctatacaacagcatggatggctcaaagccgaagacctccttgaagctccttgagtcccatgtcagcgaggatatggatgacaaaagtcctacgagtccttcgcagccgcaggcctccgggagcatgggccgcatgtccgcctcgtcctccacctcatctgccggcggccagatggtggacaagtccaaaaagcgttccaaactgtgcgcgttgttatga

SEQ ID NO: 17847 - protein, 1232 aa, DROSOPHILA
MHGPVSRSSSSSNMTDVSSPAGGAASPVEMSTTSSSSAATTSASSSKPLTNGANKTAISTAAGGVTPGAVPGPGSGAIPASSSSGNQVKLEHHHRQSNNNRPAVTNRSSETKLMTPTGSSSSPSQSPSQTQASIQTQTSQQDRLAKASTTASQQDVDEVARLFEEKPEAFEKWLTERAPPEALSRLQEFIENRKPHKRPSVTSDLFQQWMAASPTVQQKSPRSLSNSSASSLPECRRHLMDLDEGELFMELIRDVANELDIDVLCHKILVNVGLLTHADRGSLFLAKGTPTNKYLVAKLFDVTQKTALKDAVTRASAEEIIIPFGIGIAGMVAQTKQMINIKEAYKDARFNCEIDLKTGYKTNAILCMPICNYEGDIIGVAQIINKTNGCMEFDEHDVEIFRRYLTFCGIGIQNAQLFEMSVQEYRRNQILLNLARSIFEEQNNLECLVTKIMTEARELLKCERCSVFLVDLDCCEASHLEKIIEKPNQPATRAIKSADSFEEKKMRNRFTVLFELGGEYQAANVSRPSVSELSSSTLAQIAQFVATTGQTVNICDVIEWVRDHNQIRAEDEIDSTQAILCMPIMNAQKKVIGVAQLINKANGVPFTDSDASIFEAFAIFCGLGIHNTQMYENACKLMAKQKVALECLSYHATASQDQTEKLTQDVIAEAESYNLYSFTFTDFELVDDDTCRAVLRMFMQCNLVSQFQIPYDVLCRWVLSVRKNYRPVKYHNWRHALNVAQTMFAMLKTGKMERFMTDLEILGLLVACLCHDLDHRGTNNAFQTKTESPLAILYTTSTMEHHHFDHFRLAAFLDRLAAFRRALRDLARELLDLVEELVVDPTLIFLVIEYFRLLRRTIFLFEPELDEEDDDVVDSVVDSVVVLSVVLVLDSVLVLLSAALTWATYKTIERTKRTRDNFMLDALSPEDYRSVMKTVESAILSTDLAMYFKKRNAFLELVENGEFDWQGEEKKDLLCGMMMTACDVSAIAKPWEVQHKVAKLVADEFFDQGDLEKLQLNTQPVAMMDRERKDELPKMQVGFIDVICLPLYRVLCDTFPWITPLYEGTLENRRNWQDLAEKVEMGLTWIDHDTIDKPVEEFAACADEEIKDIEFTVTTLNCNQQSQHGSEDSHTPEHQRSGSRLSMKKTGALGKAVRSKLSKTLYNSMDGSKPKTSLKLLESHVSEDMDDKSPTSPSQPQASGSMGRMSASSSTSSAGGQMVDKSKKRSKLCALL

SEQ ID NO: 17848 - DNA, 10303 bp, DROSOPHILA
ttcccattcaacttgtcatccgcgaacgtctgcgttttttaatattttaaatgctggcacacatgtcactaacagacgcagagtgtagaaaaagtcacaagagggataaacacccagggacaaaataatggctctgataagtagagcttatccttaaactaagatattagttactacttaaggaaaacgattcttatattcataaaaaaataactttaaaaatttgatattttcaatgggtaaaacgacatgaaaatataccttataaatataagaattttttttacattttgtaaattaaattttaagtgctaattctttgaccccgcctgtgtgcacatgagtattgctctgtcggcaacttggttgcattacttttgtgtaatttctttggctttttcaggcaacaaaaccaaaagggcatcttttgtctggtatcccgcagtgttgttcttgttgcctttcaagcattttcattgaaaatgtacccaccaactgggaggggaattgtggtggaaaaggaggaggtcgcagagacgaatgtctgttaacattgattttcacagcttttcgcgacggtgtctttgcgcaatgtcaattaaaacgaagcaattcggaaaatataacattaaggcagcccgcaaaactgaagccgcaggagtgtgactttcgaaaccgccgccaggaagccaaacgacacatacttgtaaccaccaactcccaaccataacagctacacatagagaaattataaaaatatattcggaaaatgaccatggtgcatgggaatattataagttaagtagcacaaagagcctttaatgggaaaaggtatttgcaagttaatgagagaatcaattagtaacgtcttttaacactttctggtaatcaaggaaatacagatcctcatttccagaaaaatgataattttgctacaccaaagcaaccatcacgtggagagacatactttttcgcccagtggaggatgtgcatccgcttattacttgacaagtgcattgttgcggagaccgcaggaacttacctgaggcccggcacctgggtggccagcgatccgtcgcgaaggacccacgtgacgaggggcggcgggctgccgtgggcggtgcaggtgacctgggcacccgtgtcgttgccgaagagcagccggggtgcgggctccagcaggaatgtgggcacccgtaagccgcttgtggccagaagtggtgtggcaaggacggccagcagcaacgctcccaaaagcagcgctagaaaggggtgaaaagtgtcgagagggggcaggttaattaccaacattgtggctatatggctggtttaaaactttaatgtcgccgcagctgccggcattccaccatgtgcatgtgtgtatgtgtgtttgtgcaactcgagtgcaactcataaatgcggttaatttggatttggtttcgtttaaccgccgccagcgagcccttgattcagattcggattcagactcacatttgggcgccacttgactgctgagccgagccacttgcatagcggtttagcggctgcaacctgcagccaactttttgataaatttatgcagtctgtgtgcgtttgctcttatggctggttgaagactgcagctggggcaaaaacaataataataacgttgtaatgtggcacgcaaacagcatgctcgactaatagtcacccactacttcatttgatggctcttaaactaattttactagttttaactagttttttaactttaaaagaaaagtattttagttacagcagtatatttgaatactattcttgtgtaacgatatttctaacatttgtttttctttaacccacacattttcttaaatgattttcagggtactatgtaacaaatatgtctgacatgcatattgttttttgctggaataaaagattcgtagtgtgagttatgcctgctctgaaacttacccttttccaggactagacaaggaggctctaataaactcatttcgttgcatgaaaattcaatgtgtggctggtagaaaattaaatttagtttcgtttcgtttagtttagttttgcagcagcttcttcttgtatccggccttgtttgtttatccaatatgaacgtatactgctctttctacgtggcttttcctatatttggcctttgtttaagccccttgctgctgttattatttctgtttctatttgaaaattttcagttcagcttctgatgttgctcagccacctgaaatacatgaaagatgaaagccaacagtttaatttacatatgcattatgaaaatgttatccttcctattgtttggcagtcgaaaatgtaaaagcttgcatttttaaaccaaaagaagttagctcagcaattatgtgttgcataagtctggatagactttcaaattggagggagtcaaattaaaataaatacgctcaaaaggatgtcgtcgttacgtcgaatttcgttacgtgtgcgtttgaagctgttagtgaatttcaacaaaatataatataatgtctacaattgaataaaatatgtataccaatgaaatgcacatttgaattgagctaaacagttttaaattgaaactttaaggcttcgtcacaaccgtatttttatttgcatgtcaagttcaaatgatgttcgccgttcagcaattccccactaaagcttcgtaaacaatgcaaaggacaattacaacaattcgacgtacagcatacacaaagtgctatataaatatgtcgaaagtggaaaacacatgacgacagaggcgagaaatcaacacgagtcctgtgaattggggagctcctatcctcgcaatgcccccaacagaagcaaccttcgcatacggaaaacatacacacatcgcacacatccgaaatacacatacataaatggagggaaatcctgcgtttgcattgctatagagctcttggcaaatacatttaacgtgtatttatgagcgagcatacgaaatgaatgacttttgccatcattaaattttatttcgaatgccccggcccaagtttccactcgcacgagctgccgactacaatgaagaagacataaacatgttttgaggtcgagaagcaggggttcaacagccgagaagcagaatcctttgccgccgcccatctcgattttcctgtttccttagccagtcgggcacttagcttagcgactaaataaacatcatcatgacacccattacacacaatcgacaggcattgggttttacagtgcaagaatattcctcgaatttcaagattaaataatgcattaaaattcatttttgaattatcaaaatgaatctatcgaactggaccaaaagaatttagtttagaactaaatgtttgggcacttagaggttaatctagattcaaggatctgcaaattctgaacctgcaatgtacagaaatttgtaaaattaccaaaaaaaataatcacaaatcttaattttctgtgtaatttcgtggatggtgtgcgctcaggacatcagagtaggcgtgagggtcatactgaagagttctttgaatgtttgcaacttgacacctttttagccgacacatatgggcggaggaagcagctctgtttgcatttaattgagaatttgaaatgatttgtttattctggcagcgtcttttgttgagcgatttgccacgagcaattcgtttctttgctcagcacttggacggcatccttctccccgagtccttgcaaagcacaaacacacacacacacacatagccgggaaaagactgtgtgtgtgtgtgtgttggtgttagctctttatttttaatgagtttttattttccacgcctttgtgccgtccaactgtctgacttcgggatccctgtgccggcggaggtggaccagcttcagctgacaggatacaagccgcatccgccccacatcctgcaccctttcgtcctgcgtcctgcgtcctgtgtccttcatcctgcgccctcgcaaagcgattactttggcttgtgtgtcgggtgtcataactgctaactgtcagcaaatttgacactaaatatgtggacggcgctttagttgtgtcactctggattatataagctttttgtaactgggtgttgccgtttggcgcagttgagctcttgtttattttgcttcggtgtgatgtgtggcattattataaacctgtttatttgttttgataatccagttatgggaattcggcggttttgcagttgcgtgttggttactaccagcattttgctaattgacaatgaataaaacattttgaatctaacttttaagcttaatagtattcctgtttcgcgattttttcgctaacattaagtcccctgaacaaaaataaataaaaatgcttgaattcttttttaatcgactatcagtttagtaaaataaaatacatgatgcttactttggcaagactaagcttttaattcaatttaaaaggatatctgtcaaattaactaaagtgcctaagataaaactttgtttagcagtgttgattttaatgccgaaaggtactgatatttttcttttccctccataatacgttgatataaagcttcttattcccctcgcactgggtttatccattaggaacattaggttcatctccgccaacgtggaaacaattcgtagcaggcaatcaatcctgcacaatggaatccccgaaaacagggcacttgccattactgcagctcgccaatgcaacggatactccttgggagtcctttgcacagcatgcaccttgagctcacgagtggatgttttcattttttatttcacacctcctgtttcccactccaggatttgtgtggcgtgaaaggctttaagtgcggaacgccacaacaaacagcaaaagcaatagcgacggcaacaattcaaaggcaacatggccatgccttcatgtgttgccgaggcagtcgagcgaaaatcaccccctgatcccaagaacactgagaaaaatcaaagcgcatataggcacagtatttaatacaaaacttcaccgtaactggccatcaatatttgttgattttggtatatgaaaaagaaatatacattaattagcgattgaatctatagactgcattgatttttttcagtgaagctctcatgtcctggctgaggttaaacgttgctgcatccgccgctgccacgcccttatccggtaaaaggagtaggagttggtccttgcaactgaaaagtggggggcaagtggtggtctgatggttgccggtggtgcaggcattaagcaatataatttttcttgctttgagacggagctgttgaatcgttttaatgctcgtcacctgcactgtttgccttctttttgttcttgcatgcataaggtgttgcatatatgtatgtacggtcatgtataagtagagtacatattcgcagcactttggggcggatatgtttgcgtttagcgctggttgacagcttggcaatttatatgcccgacttcctgccagccggtggtttaaaggtgtcttaaagccgtgctcctcctcgcagcgccagcaatttcctgttgtttccagcacccacggttggatccccgtgctccggcctaatgcgaaatgcccggaacaatggatccatttgcactcgccgagactgaagtgcaactctttggttatagccaacaaaggctcttggccgcaagtcaaagagcatccgtcgcggaccacggccctagtaaatggccgggctgtagctccaagtacgactgggaaacaaaacggactctggaacaacgtgctcccaacctggacaatagtttaggatgaactgaaatgaggctaagactacacttgaagcaatgtaacagactgatgaaagctatcccactaactggtttgaaaagttcaatgcgaaatagatggaatttgtattccattggtattttcattgaaaagttcacatgttatatagatttcgtacaacactttttattcattttattcaattaacagctatggtgaattttgcaattataaaatcgttttttgattcctgaagtgccaattgcataacaaaccactcttatgtatacacaaaaaaaataacttttaattagcttctgagaaaatataattatattggcaaacaaaaacgaaaatataatttagagcccgttttttttacaatttttttcaatgtgcttggggatgggccaccggaaattcaaaggcgacgagccacctaataacattgcgccctcgccgacccattgaaaacgcccccgcttcgtcccacttcgtcccgcttccgtcaccgatatcgcgtgtccctacaaatgtttggccaccttttatataacatcaattcgggcacaacagcggttgtctagaagggcaacaagaaaaatgaggcacggcaacaacaaaatgtaatggtgggcgcgcatattttttctgccatggcaactttccattgttcgccgtctggtgctgcgaccatccctttgggatccggattctacagatacatagtatatctgcgatggttccaacggctccagcggttcagcgatgctgcattgtcacattgacaagcccccgagctttctgtgctgtgtccctctatctttgttcttggccctctggcgttttcgagtgcctttgtttagtcgctgttggatacacaataactaattcagatttgcatatgacaattctatttaacatttaattatttgccatgagaaatgaaaaaggatttcctttaaacataataagatactctgtcgtttctagttaaattttaaattttataaaattttgttagtcctttatttttgcagtgcaccgtggctactgtcgtgcagcacggggtacttgttgttattatgaataaagttgacttgagtgtattgcgaggacgttggccatggcggtaacatcgctggctcgtctgacaaataaatttaattggtacaaccgctgccagcgaactgtgctcgcaactctttaaaaattttccgcttgatagcagttggaggtgtcgaatgaggaagtaatttggcgtgaatgtggaagacataaagacgtaatgagaccgctaaatgcagctgtaatgacagcgacgattatgtcttctaggaagttcagtggactggatggaaagtgaaaagctgactcatcctggaagccaagcctcttaaaaatatgcaacatttatccgttttcagccctgcagtctttaataaaagctagaagcccaactggcatcaaacagaattgcagagtgcagtagcactcagaagaatggaaaaacggtgtggttttttttttgtgtgaaactcaaccgattcgaatagaatttccaataaaatgtaaatttttcccttgaccacattcctttgcctttgtgcacccgctatcccggataactcttcaagattggcttcacagtcgtacccgctgcaaacaaatattttccgagattaaaatttaatggacaccccaccgacaaagccacagccacagccaaggtctccgatggccggtcgaaccgaaattggcagccttgtgcaacatttccagcttatctccgggcaatgcataattcaacagcttgcggatcccagaagcaaaaaccaaaccaaaaaccgaaaaatgcgagaaagcatggccgaaaaagcaaaccaattctcgttggccaagcgagcaactaagcaacaaaacaagcggcgaaaactgcgaatcattcagtgaaattacctcgttatcttgcagttctaaaatccttcgtcctggctgcaggatctctcgctcatatgaagtcgtctgacataggatggtgattttattatttttggcagcttgcccggaacactaacacatatgtctggcagcttacacatgctagatggcggaaaaaaacatcatggcagattttgcggctgcattcaacaattgccaaaaggtggcccgcaaaaaaaaaaacgaagaaggtattcgctggagaaaggagaacgaatcgcggccataaattatacgcagtgcatagacggtaaatttttatggacttgtgactgggtagcgattctggactcgttcctcctccatccccctacccatttcgagcgtttttccgcctgtctttttggctattgttggcgcacttttatcacactttgataatcgcaaggcacatgcttcacggcacgtcatcgctgacagcacggtggccattcgattcaatttgccgctccataaatttccgcaaaaagtcaccgctacatttgcatttttcccaacgagaatattcgccggtgttttcccggtcttctttttcgctcgctttttatcggggttcacttggccaacctttttcacacttttccattagccagcattcggcctgcttagcgctcaaattatttcaccttttattcaatttactttatccacttgcccggggggtcctttttcggtttggtcttgtgtttgtgtgtatgtgtgtgtatgcaccagtagcttccgtttccggttccggttgggaagttagaagcccgcgcgcacacaaaagcgtaagcgtttcagccggcccagtgaaaatccacttttgttacattttttatgaacacattcgtgcggacaaataacccgtgaagtcagtaaaatccacgataaaaccaaacaccactcacaccaacacacacgcacgaatactcgtaggagcgaacaaacaaaatgtcagcttcaaaattgtgctgcatagttttaggcagcgccacaaatacacatcaaaatctcacagttgccgaagcattgacgtgtccactgagagaatgtttgggtcatttgtaaatagcccaattgcgcgttagtcgaaatagattttaaaactggaaaaacaacattcgtttatatatgaagtggacttaagagcccgaatttcactgatgtatttgtcagcatttgtattaaaaactaaaactcatattagtttactttagttctgaaacaaatagttttttgccttctaatctagaagttgactgtgctgatttacattcaatgaatgctttctttctgtgtacttatccctttgtgcccacacattctcgcccacacactcgtgcactggccactatcaccgttggcactatagtcattccccgaggcagcatccattaatgctttttccattaaatccccaaatagtgcctagcacacacgcacacccggcggatagttcatcctgctctttgtagctgtgtgtgtgtatgtgtgtgtgagccgatgcttaaacaatactaaaacactaccgctggcaactattggcgctatcccgatttcatccgcttgacacgtccaaacagttcgaaacgccggcaatgactgaatcctgaaatcgtccttcgctgacaacgtcgctgcagcgtcgcagcgctgccctcatcctgtcgcttgggcttatctctgtcagcgtaatcgtttcacacacacaccgccccactttattgcccgagcagccacccatccacccagcgcctcccatttttggggccgttactgcaactgttgccactcgtggcccacaatcgaacgacgccgactgcaacgccggctgagcagtcgacactgcgccggcgtcagcgcatccttcggcatttctcttctctcgcaggaccttcattctctttgctatctgtctggctttgtccctcgggaaaatgaaaagagaaaaataaagtaagaggacctaaaagagaaataaaagagaacactaggaggggtgatgggtggctttcacttgttgttgctctgcggttgttgacatttctgcaaatgacaaaagtccagggatatccatgtcttcatttaattcattctacaacatcaaaaatcccattcaaataggaacgatttttattgaatgcagagcgaaatttagtatatgacatggaatggaaataagtatatatggttattgaaaaaagtacgaacataaataactcaaatatattttcataccttttatttattcggttataaacataattttaatatttgtttttaaccttgaaaaataaattcttggtaccgataaaaatgtctttcatatattgcaagatttcttaagaattaaacgttaaaggtttatatttagatcaagcctgaattggtgcgatgtggaagtttaataaatacgtaaccgcaatatttgataccacgctttgacagcaaaatttgatttaaaacctttcagcctggcattagtgaggaaataaaataaacacagcttctaactcgtacatctctatatccggcagcagacttcaatattg

SEQ ID NO: 17849 - DNA, 712 bp, DROSOPHILA
gatagcgccaatagttgccagcgcatgtgtaagctgccagacatatgtgttagtgttccgggcaagctgccaaaaataataaaatcaccatcctatgtcagacgacttcatatgagcgagagatcctgcagccaggacgaaggattttagaactgcaagataacgaggtggctgagcaacatcagaagctgaactgaaaattttcaaatagaaacagaaataataacagcagcaaggggcttaaacaaaggccaaatataggaaaagccacgtagaaagagcagtatacgttcatattggataaacaaacaaggccggatacaagaagaagctgctgcaaaactaaactaaacgaaacgaaactaaatttaattttctaccagccacacattgaattttcatgcaacgaaatgagtttattagagcctccttgtctagtcctggaaaaggcgctgcttttgggagcgttgctgctggccgtccttgccacaccacttctggccacaagcggcttacgggtgcccacattcctgctggagcccgcaccccggctgctcttcggcaacgacacgggtgcccaggtcacctgcaccgcccacggcagcccgccgcccctcgtcacgtgggtccttcgcgacggatcgctggccacccaggtgccgggcctcaggtaagttcctgcggtctccgcaacaatgcacttgtcaagtaa

SEQ ID NO: 17850 - protein, 87 aa, DROSOPHILA
MSLLEPPCLVLEKALLLGALLLAVLATPLLATSGLRVPTFLLEPAPRLLFGNDTGAQVTCTAHGSPPPLVTWVLRDGSLATQVPGLR

SEQ ID NO: 17851 - DNA, 3814 bp, DROSOPHILA
tagaatcctgcgcttgaaagtcattcagggataggaccatcgctccgtctggtatcagggatagtgaatcggtcttctcctccttgacatcctcggagggctccgtgctggtagttattgtaccgcttactgaactggaagagcagggctccacgttgagcctccttattttcagtgttgctggcagccgaacgtgagcctgttccagatcaagcttaagctgctcctgctgcttatcgaccagcataggggcaggaggagcagcagcagcggcggcgaagacggcggaggtcgaggtagagcggctggcggagcgaaatagcttctggacagcggtgcacttttcgtgaaagcgataagagacggacagctccagatggcactgcttgcagatcttgtccggccagcgctgcagctgcgacgggctgctgtccagctgcaggctggtgcagcagcgaatcttgtccaggatgagcatatgaggagactccgggtcgtggccatagatcgagctggcctcgggctcctccgccaggcagaccaggcaagccacgcccaggtccaccacacgcggctgcaggttgttggacattgctccaatctcggactgaacctgcgttatggctcttgctcaagctgctcccaaaattcgcaacacgcgcaggcaacaagaaaacacttcttttgaaatagggatggcacttgcgtgtttttcggtacctgacactcagtgtggcaatcacgagacttgcgctattatcgttttattggttattggatatttattggtttggttatttctttaaattaaaaatgtgcaggcccttttagcttaggtgtatatttgaaagtggtataaagcaaggcaaactattttaagattcattattttttgtgaatttgcgatattagtagcgattattttgtatcgattattttgtagctatgattacccacctctagcgattgagctatcgatgatttacctttacgaaaagtgcgtctggcgtgaagtgtttggttttcagcaaattaaggatttaagtaggcaagcctggaaataactttaattatattactgacatatcatcactagttttcatactttacaagtgttcgtttatgtttctatacaagtgaaattattttcaacagaatttaaattgttatatttcgcgcttttcggtaaaaccatttatcggcgaacagaagatttgcttttgacggcaggcagaagatttgcgtttgacggcaggcagaagaagttgattttattcagtgaaaaatggattgtaatccaaggttgcaggttggccagcaattattcgaattttttaccaagccggaaaagccggatgagtctggtggcgatgtagcagctccgttgctcttgaagaaattcggcaagttgatccgttacaacaacgatgatctgaccgagcagggtgacttgactttggcggccatcccgcgttactggcaaaaatatttaaaaagccagggtctgaagctgcgcatcgatggcgacgaactgctccccagcccggtggaccgcctggagttgatggagcattcacgcaagtggcgtttcccgctcgccgaaatcactgtgctgaacaaggaacgctactctctgcgtttccagcgccatccgattattgcacatgtgcttaactctgtgctcacgctgcgcggcgattacggccgttcggcaaataacaaccaatcgcgcaccatatgcttgcagttgcaagccgttgtcggagccgtcgatggcgggcaggacttgcgccactatcgcttgcagcagctatacaagatactgctgcgcctggttgactactcgtcttggcgcctcgtggagccgaatgaccgccagaaggacaccatctgtgtgactgtcgagctggagaaatgctgcaacggcaagcagcccgtggaacatgtgtgcctcacatgcggtcctgttttggagccgataaataagggcgccagctcattgactgttgacgagtacttaaagtaagcacatactgtattagtacatgtttcgacaagctcttttttcggagttaacctaaaaactcacatgttttgcatctctttcttattcgtgttttctttcgtattctgcttcttcaatgcaggctgcgctgccagcacatggagctgatggccacgcagcgctccggaatgtgtccggtaccaatgagtagccttgatacgctgacgaagcgtcttgcggccgctgccgtgattgtggatctctttgtggtgcgccactccagcgccgtgagtgtggtgcgcaatggagttggcatttgcaagggcgcttcttacatcttgtacaattcagcacgtctggaggcgctgctgcgcaaatttaattatgaggttaacaattgtgcctatgagaaactgccactgctggatgagatcgatctcagcgttctagaggatgatgtatgtgatttttgtttgccgtatcatgccattttatgatttttctatgttctttttgcgcaggttgactgggagttgatttatggctacctccttacctttccggagctaatggagtccataatggatcaattggaccagggtcattgcggtctccatctgcttgtgcactatgttgagaacctggctgccgccttcagtcgcttctattatcataagaaggtccttcttcagaagcgcgatgaactaatgccgatcttgtacgccaggatctacctgatcaaggcggtgagacaggtcctgaatacggctctggccgtcctgggcatagaaccggtggactacgtataaagatatgttgagcatatcttctataaacaaaaaacaaaaaaaaaaaacacaaaaacaagaggctaatgcgaaaccatagcaaaactaaatgctggctcaacagtgggcggtaataatatatgtaataatataatgacatgtgatcttaaaagggccatacaatattgatataacatagttacacctctcattttatcgataataatcaaaatatagcagtatctacttgtaaacaaaataaaacgttgaaacgttgaataaaagacttgctttttgtatgaatacaaaagctcattttgtacaatcgagtcgtttattattgaaagaagtatcaacacaacgtttatcattgaaatgcgattttgtttaaacacttaatgctacgttttcagaacaggaatcatcacgcatacatagctacatcttaatgtatgaatgtcctagctatcgagagttgataacccaaccgaaacgtatttctaaaatttttgacaatatataaaaatttattatttctaagggactgccaaccattaaaatactttgtatttcctaataattatctatacaattcgaatttacattggaacaattttaaatggtttcagcgactttggttagaaaacaatgtatcattagatacataataatgatttttggtaactacatttaatcgccataaatgttccgttttactcttatttacatttcatttgtttttagcatacaaaatcaattttcgtttcattttaaaactaaatggtatgtaccatgtcatgaaaatgtccatatatattaatctatcctataaatttacagttgtttcacccatgtcatcattattggccatacatgtacatacatacatggatttatggaccattagttgggctagcttagcatcagggacttaccaattattttggcatgtaggaaacatttagcataatactatgtggcaggagcgctggcggggatcactggatctggatgggatcga

SEQ ID NO: 17852 - DNA, 1626 bp, DROSOPHILA
cgtctggcgtgaagtgtttggttttcagcaaattaaggatttaagtaggcaagcctggaaataactttaattatattactgacatatcatcactagttttcatactttacaagtgttcgtttatgtttctatacaagtgaaattattttcaacagaatttaaattgttatatttcgcgcttttcggtaaaaccatttatcggcgaacagaagatttgcttttgacggcaggcagaagatttgcgtttgacggcaggcagaagaagttgattttattcagtgaaaaatggattgtaatccaaggttgcaggttggccagcaattattcgaattttttaccaagccggaaaagccggatgagtctggtggcgatgtagcagctccgttgctcttgaagaaattcggcaagttgatccgttacaacaacgatgatctgaccgagcagggtgacttgactttggcggccatcccgcgttactggcaaaaatatttaaaaagccagggtctgaagctgcgcatcgatggcgacgaactgctccccagcccggtggaccgcctggagttgatggagcattcacgcaagtggcgtttcccgctcgccgaaatcactgtgctgaacaaggaacgctactctctgcgtttccagcgccatccgattattgcacatgtgcttaactctgtgctcacgctgcgcggcgattacggccgttcggcaaataacaaccaatcgcgcaccatatgcttgcagttgcaagccgttgtcggagccgtcgatggcgggcaggacttgcgccactatcgcttgcagcagctatacaagatactgctgcgcctggttgactactcgtcttggcgcctcgtggagccgaatgaccgccagaaggacaccatctgtgtgactgtcgagctggagaaatgctgcaacggcaagcagcccgtggaacatgtgtgcctcacatgcggtcctgttttggagccgataaataagggcgccagctcattgactgttgacgagtacttaaagctgcgctgccagcacatggagctgatggccacgcagcgctccggaatgtgtccggtaccaatgagtagccttgatacgctgacgaagcgtcttgcggccgctgccgtgattgtggatctctttgtggtgcgccactccagcgccgtgagtgtggtgcgcaatggagttggcatttgcaagggcgcttcttacatcttgtacaattcagcacgtctggaggcgctgctgcgcaaatttaattatgaggttaacaattgtgcctatgagaaactgccactgctggatgagatcgatctcagcgttctagaggatgatgttgactgggagttgatttatggctacctccttacctttccggagctaatggagtccataatggatcaattggaccagggtcattgcggtctccatctgcttgtgcactatgttgagaacctggctgccgccttcagtcgcttctattatcataagaaggtccttcttcagaagcgcgatgaactaatgccgatcttgtacgccaggatctacctgatcaaggcggtgagacaggtcctgaatacggctctggccgtcctgggcatagaaccggtggactacgtataa

SEQ ID NO: 17853 - protein, 446 aa, DROSOPHILA
MDCNPRLQVGQQLFEFFTKPEKPDESGGDVAAPLLLKKFGKLIRYNNDDLTEQGDLTLAAIPRYWQKYLKSQGLKLRIDGDELLPSPVDRLELMEHSRKWRFPLAEITVLNKERYSLRFQRHPIIAHVLNSVLTLRGDYGRSANNNQSRTICLQLQAVVGAVDGGQDLRHYRLQQLYKILLRLVDYSSWRLVEPNDRQKDTICVTVELEKCCNGKQPVEHVCLTCGPVLEPINKGASSLTVDEYLKLRCQHMELMATQRSGMCPVPMSSLDTLTKRLAAAAVIVDLFVVRHSSAVSVVRNGVGICKGASYILYNSARLEALLRKFNYEVNNCAYEKLPLLDEIDLSVLEDDVDWELIYGYLLTFPELMESIMDQLDQGHCGLHLLVHYVENLAAAFSRFYYHKKVLLQKRDELMPILYARIYLIKAVRQVLNTALAVLGIEPVDYV

SEQ ID NO: 17854 - DNA, 49431 bp, DROSOPHILA
cctaatagatcaacctaatagtatgatcaatacaaggattactaaatgtaaaaaacaacttctcagatactttttttttaataactgaaatctaaagattcgtcttacatattcgtctgtggaagtaatgtttataatatttttgtaaatatcttttttgtatttatcgttaaatcttgaaacaaaaaaaggtttagtggctgatagacttttttcaactgtatgcttgcattgtttttatcagttctttgaaagtgtgtttgtcgatctactttgtttttaatttgttgtggtttctcgtataaggtaccattgtacttgtattgacattactaatgcgctctctctttctttctttttattgctctcactttccggttcttatcaatcgctttcgtacgtatttagtttagctgcgaactgatctacaaccacctaaattcgaatagaaatgcgatagctgcatagcgtaaatatgaccttgggacagataacaaagccactttaaggccgggatcaattcattttggctaataatattaaatgatattagtataaataatgatttgtactcgggaaataaagtaatatccttaggcttaagttacacttacatactaatatagttaagagaatcaaacataaaactaaagctgtgcttttctttcctctcacaggacttgccacaggatgtgcacttggttttcttgtggctgctttcacctgccgcagcagcgatattcctaacacctctccgcgtagaataggcatttccggtcgtgcagtgcggaaacagcagcagcagcagcagcagcagcagcgctgctagcaacatcgggcgatatcagatatagacaacctatatacacatatatatttattcgccgccgctgtcgccgccttgttcttcgcgatttcgtcgccgtcagcgttcgccgccgactgagacgaaagctgcgaagcaacgagcgctagcgaaagcctcaccacggacgcatttatggatgcgggcggcctaccagttttccagagcgccagccaagcagccgccgtcgcccagcagcagcaacagcagcagcagcagcagcaacaacatttgaatctccagttgcatcagcaacacttgggcctccatctgcagcagcaacagcagctgcaactgcaacaacagcagcacaatgcccaggcgcagcagcagcagatccaagttcagcagcagcagcagcaacagcaacaacagcagcagcagcaacactcgccctacaatgcaaacctgggagcaacaggcggcattgctggaatcactggcggcaacggagctggcggccctacaaatccaggagcggtacccaccgctccgggcgacactatgcccaccaagcggatgccggtcgtcgatcggctgcgacgccgcatggagaactaccgccgcaggcagacggattgcgtgccacgctatgagcaggccttcaataccgtctgcgagcagcagaaccaggagaccaccgtcctccagaagcgcttcctcgagagcaagaacaagcgggcggccaagaagaccgacaagaagctgcccgatccctcgcagcagcatcagcagcagcagcaccaacagcagcagcagcatcagcagcaccagcaacaccagcaggcccagaccatgttagccggacagctgcagagcagtgttcatgtggtgagtttaaaggactcaatgtccttatatataaggtcttacttttgggcatctttggataacttccaataatttcactgccttaaaattataataccatgttacaacaagtttataagtttatgaaatcgggttgcaaatagtcaaggaatctcaaaagaagctacgactgtatagcttttagatttaaattccttgaaaagctacttttttttcgatcagtaatattaacttataatacttcaatgattacttattaatccttagaagaaattccccacaatatatccatcaatttgtgatttacatcccattttgtttgatggacatcatatcggtcgccctcgcaagatgagattgtgattgtgaaatggatttcgaatttcattggcgtttccaaagagcttggggattatcgcggcgaatgcaaatgcaaatcgcatccagcagatacgcggctatgggtatatcatcaatgcacagttgcctcacattagagctggtgcagtccgtggtctcaaaagagcagcgaaataaatacgaagccagcaatccaagcggagaatgcacgtacaaacatacatacaaacatatatacacaaaataataatgaggtcagcgattttttgtatttttgtgtgcgagagtgtgctggtttttttttttttgttgtactctttcggtttcagttcagtttcactcacacacagctcgcattcgaactgcgccgccaacttgtagctacaagatacattcgctgtagctacaagcaattgtaggtactacttagctgactttttgacgttcctttggctgcatttgaaaataccttgaacagcagcagcaccgcaaaaaagttgtacacttgtgtataattttgcgaatgaaaagatagatttttttttctgagtgagtgatgcaagccgcgattctcgacggcctctggcttatataattgttagttctgtcgacaatccgtcaagcgaccccatcagagcttgtaattaccagagccagctcgaactcgagatactgattctctgattcagaatccgtctcggagtttctatttcttttatctgggcaacttgaacgcggaacgtgagttattcctcaactggctaccgcactaccgcgatctgttcatttcatttcggtacggttcggcgtggattggagtggaaaagtttttccgcatccgcctggccaagtcaagtcatttgtgtcgttttgcactactactgtgcactgcgtagccagccagccagccccttcgtttcccatcagcacgtaattattcatcgctgactgtaagagttgccgatgatttgtcccccttcatttgaattcttttcatatgcaaaaagtggatttgtcttggcccgcggctaaggatgaggatgtcttcagggaaaacatttgtacaaacattaagtcattcagaatgttgccatctaattaacttattaaatgcagacatattttctagcgacatttgtgtgcaatgaaaaatttgctaattgctaatgcattgatggaaatatttaagaggctttaagtttggaatagtacctaattttttatattcttttttcgattttcttgttttgtgtattgacaaacgcccattccacggattctccaataatttgaatgatttaattgctttcggatttcgctgttattttccactcactcatccgttcctttggcatctcgccagcgaattaatgatcgatgaaatggacagggagcggttaatctaagttggcttttcacttttcatttcttttatttcgctgcttttactgttttggaaaacttttactgattgttgccgccgcctgcggttgccggtgaaaatcgctgcaaattgcggccgcttgcagcaagccggtgcaacatgcaaaacaagaaagcaacatcgcaatcgccatcagcaacaacaaaatgccaagtccaacatattgtttataatgtgcgttgttgtttgggtttttattttatttgggaaagtcgcgtgttgcagtttcttcttcagcttctacactggctgcacatttttccccacttttttttttgtttttctattttgttgtattgcactcattgttgccaattttcacttcactttgggtcgtgtggcattttctgacagccgtcagtcagtacgtcaaagtctcgaagcgcagtcaacaaaacaaaagttgcatgagcgatctgccccgacccccccttttgggccgaccgccgccaacacaccgattttcccgcttttccgccacaactccacgcgcagattgttgtttgtttcaagtgcctatgctactgctgcttctgttgttattgttgttgttgttggtgatgatgttttcgttgctgttgcatcttgattgacaagtgacaacatattattggcgtatcgttgcaagcttagattatttgttgctattcttgttgttgccttgttgtggttgcattggcattgtttatcgctccttcacaaggaaaacgcctccgccttcggccgtgggcgtggcctaaaaagttgcttacattgcgacgagcgggtaatttatataaatagaggtagttaaggtgaaattctactataaacatgagaaaaacacagtgaaattctataggagaccagttgtgtgactcgttttgaatagtaatttactaaacatttaattaaagcaaaggcagattttaaaaccgattgtttccaactttggtagttttcagaacttttcagaagcaacttctaaatccatttaaaatttttgtggcattacatttgtacatatatgtagtacttcgaaagctataaatatttgaacgaaatacctgaatatgtttggttgtaagtttaagaaaaaactatattcattgtcctggcacaatgttttatttataacacattattccaaactcttttcgccaggctttcttgttcaacttgttgaaaatttatgtatttcaaacattttacacatttttgttaaatgcatcatttatcttcgccttgccatcgaactctgtgggccagaccgaaaattgccacaccgcccacacggggggtgggccaaatcccccttttgcgtcatccccctacgcccatgtcttctgcaaagggtggtggggtgtagggattcacctaacagtctgcaccccttgcgtgctctgtcttttggcctaacgaagatatggagaggcttgagtgggttcaacaaaaaaaaaaaagtaaaagaagaaaagggggctgtaagtcgcaaaaagcagaggggcgcgaaaagagaaagaggtggccaaagggggtggggggagagggatggcggacagcggcactaccgccgtggcttcaacaaaatcgattccatttcgacaaatgggagaaggcaaacagccgaaaaaaaaaccaaagaaaacgaattgcagacggaaaactgaatgcggcctgcacttgactacagatgaggggggatacatggattgatatatgcagtatatagcaaatgatgtgcgggatatatagacgccggcataaattattgccgagcttaacgggaataatattgttgcaaaaggcaattcgtacgattatttcttatcatttattgcatcatcttggccaataagctgaagctgggccaagaattttaaactgaatgtgtccaacttttttaaaatggtaattaagctatgataaatattgcattcaatgcattcaattataatgttctacatcatttaaatcgtaaaaatatgtttaaaaatatattttttattgcatacaattctgtttgcttttatatatatttatgacaatactttttaaccagcacatgaacgatttctaccactgtgcgtcttgcacaatgggccaaattgcgtgtttgtcacgcattgctcatttccatcgaagttagaagttgtggcatattgcaaatgcacctcaaaggcttctttactgtgcgtgatatccttgtgccttgcactgggattcaaaaataaagctaaatgaagaggaagttcgagaggcagttgccctgctcacacacacacatacacacacacacacacacacacacatgcagcacgcctatattcgcaatgaattttgcatcttttatttattatgtttggcaaatttcattgcatattaaaaatgcaattttccacaagaagtggagcttttccatcgccttcctgctttcctgccatccatgcgaccatccggccgtttatccttttgccatccttcgagtttttcgggccgtcaaagctcttttggccctgcgagctttaagttcttgagtctggcttttgtcaattgtcttaaacattttaattgctttacgtttgtcgttgcaaagctgttgttcttattgttgttgccggggcaaaaataataaacaagagaaaggcgtaacagaaaatgatgaaatgtttgaggagtaggtgtgtgagtgagcgggtgtgggtgtgtgtgtgtgtgtgtgtgtgcggtttcgtcgagtggctggctgcagatttttaacccttaaataataatcgcctggtaatcgcacctattattttttttcttcgtttttatttagggattttcattaaggtggccaggggaattctctttctcgttttccttttctttttttgcgagccatccacacatcatcagcaaaacaaaccaggcggaacttcttccccttttcgtcctttgcttttgctgttgctctttcgctttggcctttaaaatcgataaactcattttgaagttgtgcccacacacacatacacaccactcactaggaaaacacacagatacacacacgctaacttggatacactttacttacttttattttcaataagcctacttaccgcccacattaacaactgcccaggattatgaacattcgcattaagcgacataaatataccttaaacgacaatgtattttggctaattaaattgatttgaaatgaatggcagatggagagaaatgttgtatattctcgatgagctgcaaatatttgtgtaatcttcagcacttgaacacttttcacttcaaatgaccagctcgtttcgatgggaatagttaacccttgaatgacgccagtcaggcgccattctgggcttcctttatgcactttggcatccacatccacatccatatccatatccacttccacatcctcgtccacgtccgcgtcctcgtcctgttcccaaaggatgtcgaggtccccgggcttgcattcaatttgtgtgtcgattacatgaaatgagcttcggcccgcttggccgggaaatggaaaagctgatgaagagcgggttttatatgcaaaattaagccaaacacggctcgtgtgtcaaaggcaaatgtgctcgattgatttgtccggccataaaaacagtccagggaatgcaaatggagctgggaaattggtaatggtattggtaatggtaatggcatttcggaaagatgattttcaaagttagttatgttaattacggcatcgttttcaatccggccatcgtatacctatattctgaaaacaataaaactctagttataaattccccagcattagccttcataaatgattaatgagctcattttagtgtgttgataaaatataatatgcttttaaaaaatcatccccatgtgtcagttggctttaaaatgtattaagttctaccctcaatgaattgatttattatgtgtgccacattttgaaatcaatcccattacactttcataaatgattgagtccgtttgggttattgatacttttagacatacttctgtagtttccctatatctcttacacttatcgaacttataaagttcggttcatccctgaaagctgtatatcaaaccagatttttttcatcacagtttcgcatactttcatcatgtttggctctttccgttttccataactaccccgcaaaatcaaaccacccccaccacccgctggttggcttgtgtctataacgtcctgccaataaccataacgattatgtccgtgcaacatgtgacatcaacaacatcataacagagtctaaaacgaagccaacacccattgattgcttgatgtttttcccttaccaaacattttcatttgcattttctccctctatttaacgttcatgagattctgctttcagttttccacctgcacttttcaatttgcatgggaaaactgccagacctaatactctaatgagcttcgtgttagcagtgtacccggcaattgcgcttaaactccatcttctgtgatgaccacgcggcgtatacttaatatatacggcatatggacaaatgcctctcgaagtgattagcgtttatggctagcagcccgaatcctggaacaatggcacttgaccaattccatggtgggtaaacataggtttacggtggggttttttgggtgggtactttacggggatttgtagaacagcaacggccagcagcagccgcatgaaaaaaaaaaaacatttttcattactttactggagcggaaatggcaaattaactgcacaaatacacggccacgtgtgtgcgtgaaagcgtatttgtatgctcatttattcattacactgcatgggcccctcacttgaccctcatccaacccccccggtaccactgcccgttctaccgccattgccatcagcaaccccctttcacccatcttattgacttcaaatgcgaaaaagtcgcttttgaggctgggacaatgtttacataagtgatgatatagatttcagcgaaggtacagtactcgtcgtactttatacacataacgttttatatctgtgtaattttgtagcaaaaaaaaagtattttcaagttcgcgattttgtagtagttagaaacggttatgtacttatgcatgtattacgtctgcactaaacgaaacaaagataactaattgaactacttaattatatataaatatagtatttcgaaatatcagttaactatcgcgttttacaacacttgcaatttgtaagcttaaatttggaaacagtaactttacagaacattaaattctgtaaatcaacaagagttcaacttgaataaatcatattttaaactgcttatatcaccagacttaatgtgtgttacacttacaatgcgataaaccattttcaccatcatactcggtatgagttttatcgctctcgttgcgtcattgagtcggcttttgtgtgcactgttgacgttttaaaatgttaaaaataaatgggcattttacaacaacaaaaaaaaaaaaaacaaagcggctggcaaaagacgaaaacgaatcgaaaaggaggcgcaacgtcatcgtcatcaatgtcagcagtgacgaaatgtttgcaaataaacaaaactcgcctccaacaaatagaaatgttaaatgaatcgtggatgtgagacaatgagtgtccatccgacaagtggaaaagtttacgtttgactgggttttttttcccccagggtgatacatcatacactgcgagaagcgagaggcgaaaagagttgccgccgccgccgccgccgccggaagttcaaaaggtgacaatgagacagcgaggaaggcacagtcagtggaacgacttaaaaaaggggggggagggggttcaacggggtggcaaggggacttgcaactggacaattggcggcagaattcacttgaagcaattaaatttatgagattgttgattttgtgcctttgcgaaactttgtcggccgatgaaagccgaacagctgagacaaaaaggcaaaaagggttgcacaccccagcccccagtcccctcatccccttattcgttttgattttatttcgtttttgcagcccacgtttttgtatatataagcacactcagatagagctataaaatatctttggttcacatttaaatccgtaatttcaattcaacttgtcgtgtttacacacacaatgcataatttatagaaatttgtctgcagagcgcagtagcgacagaatcggagcagcggaacagagatagcatataggcgagcgagcgggacagagcgtgcggtctcatgtaacctgaagtataggaacgcacggcgtgagcacagtggattagaaaagttcgggaaaggggctaaacaaaaggaaaatgtacagatttttattgcaattgaaaagtaaacagtatttgtgatccagcaaaagttcctttgactattaatcagaataaaataataataatgcgcctaatgactgaaagttctctgtatatatttaagcatatgtttctataacaatttcctgaaaatccctattcatattatatgaatgttccaattgtatctgagtactgctggcttgcttaatattttaaagcaccttttttggggttgcaacctttttttgcggatactgtgtgtccatgggggcaccgaggagacgtggcacgcagtctctttcagtcagtcagccggcaatcagcccactcggctacccccttcgacgacctcctgcgaaccggcgcccatgccccagtgccatcaccactgcctccgaacacctcctactgccctcacccttcctccttctcaagtgtcgcatatggcaggcaacgtgtgcccgctcccctttctccacatttctccggcccctttctgcgcctcttctccttgctgttcttcgttggttttgaagcttctgcaatggggcgcctctgtggttctaaagggggcggagtgtggctagtgaaagcgaggggggggcgtggcaggtctgtcccccatatcagagtgagtgactatacatgtattatggtatgtatgccggtgtgtgtctgtgtgtatttgtgttaaactcaacgaagcttaaaagctttgtttgcaccatgaaagacttcaatatttgtagtctgtattcctccacttgatttcccagccgatggcatgtagaccgaaaatacaggcctttctttttattagctgcgattgaatataaaattgggtctagatttcagttctcacattgagcaaagggtatttttaagattcgtagcatatattttacagcaaactataactaacatcaaagaaacagtaacatttaaaagcataacaaaaaatgacttaaattttaagtgaattaaagagcttgcaaatttagtttaggtaatgtggtttgcagcattaacttaaagattaggtggagttataatgtactattaaactaacctagttgtggccttaggacacttaggacacccgcgggtggttaaaaatttaaggtctttactttgattttcaaattaagaatgaatttgatttatgcgcttatgaatgcagtagtaattccccagatttccaggggccttacatcaatgcttgtggttgttcccagcccctgaaaaaagtaaaacacctatcccccccataaccccccatttgcatgtttcccccctcaacaaactgtgccactctattgagtgccgcgcccacttttcacgcacgcccctccgcttggccaagaagtgcaaggaaagcgaaaacgaacaaaatatggggtgaataaaagaaaaaaaaaaagaagaagattgttgaggcagccacataatccacttttgcatcagccaagccagccgaggcggagatgcatgccccccttgcaacgacgcccctgttctggagtgccttttgttgctgcagagaaatataaaaaataattggaagtcgcttgcaacgatgttgtcgctctcgtcagcctcgccgttgacgttttgcttgttagctgcacactctctcttcagttttcctcgcatttcccatttccccaaaccccatacatatccccattttgcgggccccctccccagcccctttcactgtgcggtttcaatctttttcctgggcttcgtttttgatttgacttttgtttgctggtgattaggagctcaagcaggcaaaggagcaggatttgtttaaacaatttacaaatgcttcattgagttgcaagtggaggcattacgtgggtgctgaaatattctgccttcggttgcgcacatttgggaattaaagcttaaactaagagtcattagtatagaactaggttttcggtttttatttagtttcggtactaaacttattgctttaagatactctctcgatggagacccattacattctcttctaatttatggcttataaccccgtattgtagcaattttcaaactcgttgacattttggcttgacccaaaccccttgtgtcctgtcatcagcaacttttggatgtcctgctaaattaataattttgattgaggcccttgaagcttcaatgacttcacccccatcgctccccgtaatcgttgtgttatccgccgtgttttatcaacactttcgcctcatcttgggccagtgtcgtcatcatcataatcataactattattattaacggcagagaaacgagcctatttagcgtcaacaagcacaaaatcgtcatctaccccttgtgcaaagatatatcccttgcctgctatcctgccgcctacaaaaatcctcccccgagggctcggcatccgaagaaaaaaaaaaaaccaaatttcccacaaaactttagcaggcgataaaaatttgtctacattagctgagagaaagagcgagggagccgcacgttgcacagttttgtggcatatgccgcacgacaatgcaccgcacaaaaatttgtgattaaaagtaatgcctgttaagttcgaaaatctgtggaagagttatatgtaaatcgaagtaaaaatatcttattcattaatttcctaaaatatatttcaaatttaccaaatatatataaaacctataaccaagcaaagaaattttattataaaataggaaaagaaacgttttgattttgttggcaaaaatgcaaaactagtttatttctctctgtgcatccttagatggctaatccccctttcctttgccaactatctatatctgaagtattctgtattttggtaacaatcttaacggtattcggcattcgagacaatctcatcggccaccttcgcttcgtgtgtgggtgccatttacatttacaggacaacagtcggtctgctttcggtcacccccttaaccacccccccccttcccccacgcgcttcacttactaccccacccaatcaccacaatccccaacgctcactctgtgcaatttgtggcctggctttaagtttctggcttaagtgcgcatgtcctggacatggagattgtctgcccgctttccttgctcaattattgacgaaaaattgtgaaatttgccagcctggatactgttaattgcctcccactaccaaatttgttaccccagccaacgcgtaactttgccctgctcataaaatcacctcaatcttcgctgatcgaatgaactgattttgttgttgctattccacattctgcgttgacataaacaaacaaaagttcacactgaggcaaaataaataaatagagtgaaaattgcatttcgttaaatggcgacgtcgacgatgtcgcttaattgaatatcgcccaacaacaaaaggccaaagcaataacaactatagttctccaccagcaaatccacttgacgacaagcagctaagacaattgcagaaggcgtgacaacccttttcgcctcgccgccacccatttttccgcccgtctttgcactatgccttcgtcattgcatcaaaacaaaattcaattaagttgattgcaaatcgttgccgtcaaaatgaagacgaaaagaaacaacaaaaggaactgaaatcgagcagaaattgcatagaataggctgtacatgtcaaagtaacgaagtcaaaaatgtacttaacctatgagaatggtaaaagggacatttttcgtatgcgtatacgtaatattttaaaatcattaagaaaaataactgccctcttttgtctagatcacttcgtgtttggtatattttagttactttagttatattttttaatatttttttatatatttttatttagttcacattctatagtttttcaattaccatatattttaatcacttttggataacatttttaaagcgtcaactgttttggtcattttattcttttaaacacagtccgtttaccaaacaatttcattaacagttggccctgttaattaaggctttccatttatttcctcacactagttttatcgtccgtttccccttgcggcttgttcgtgtcatctattggccaactcttcttgaccgagaggctaattggtattgtcagcactgccgctgtcatttagccaatataatattactattttttgcgctgcaaacgaaatttacatggatattcaaatttaaaaaacaaaaaaaaaaatatgttcaacttagtaatttatatttaaccgaaaaaatgttgtttttgtcactgtgaatgatttatttaaacaatccgcacgcgaataaaaactattaattaatttacaaaacatatgtgaggctttcagtgcttgacaacagcagcagaaaatgcaatttttccgatatggttagccatcgcaccacactgcgtatgtgtaatgtcacctgacttattatgaactttgagtggcaaataaatatttgttttttagatatacaaaggtgtcaaaaattaatgttgcatgagcattaaaaaatgcaaaataattaccgatattattttcaaaaatattaaatttaaacggtttttcatgattttcctttgaaacattgcttgtttaccttttctaatttttgttcacacaaattggacaaactttgggtaattgtacttctaattgctttattacagctttaattgctcgttctaaaaacgctggctgttaatttacagctgttatttagcagaagagggtgcgagcgaggtagctgctcccgggttaaacagagagggaaagagtcacttagtcagggcgattgcttggcttgtttttgtgatgtttcctttgttttgttttgatttgctttacctccgactgtttgtctatgtttttttcctccctatttccctgccctcttcgccattgccccgttttctctcggttttccactcggatcccgaaacaccgagaaagaccctttgtaaattttaatggcaaatctgctgccatttgcggcacatttcgcgtacaattttcatttttgttatgcccacatatttattttcatggcttgtcctaggtggttgggtgttttgggggggtggcgggtaggctctgcgaccgcttttcctatacacacggagaaataatagcagttttttatggacgaaaatcttatgcagtccttgaagtatgcaacaaatcatttaatcgggaaatgcaattaatggtctaactcatcttcaggcgataacccgagactcgattaccaattaggtttaaaaaaaaaaaacaaaatttttaaaaatatttccttgtattaaaagtgcagtagtaggtttttctccgtgcataccacattgctaaaggggcgcactttacatttgttgtttattttggcgtgagcgttgccagccacgagagcatagaagacatggccactgcgagcgaggaagaggcgagagcgccaacgagtgagtgtgtgagtaaagtggggagccggtaagagaaagagtgagagagtgagtgaatgtcgatggctctccttattgttgctgcttttgctgccgctgttgctggcatgccatttcccgttatcagtggcagactttctgccaacctgctgtcgcacgctgtaagcgtcggcgttgacttcgccgtcactgcctcagcctctgcctctgtcgtcgctcaacggtgacgccacgaacgccgcacagtgggtgtgaaatttagttcgttcgtattttgtcaaattaaaaaggatattatttttcactgttttgaataatcaataaaatgcttactggtatgtaaccagtaaaaaaaaaaactattaaactattgactttgtatacttaatagttttttaatagaattaaatcaattagcagcctaatttgcatatactgccattattgatttttgagtgctagaaagtggatcgcacgccactgtgcctcattttgtgttcctcattttggattttgtgcgcacgccgtgccagctaattttggattttctaagcgagccgagtgaaatatttttagctcctcgactgcgacgcaactgcacagtcggcgcgggcagcgacgtcaacatgcagatttttgcaattgtttgccttatttggccgctgacgtgattttgttgttgttgttgttgttgccgttgtgcttgctgtatttttagccagttgatttatcattctcattgcgtttacgctgcatttgtggctaatcagtattttgtctctctttctctcgttgcaggtgagtttccccctttgtttgtcccatcgacgcattgttgtaccgtgtagatatgcatattgtgcagattaaaccgtaagttaagctaagtatccgagcattaaggagtcgccattactggaatgtttgcatcatcgtcgagttattctgataagcctgataagtcaagatcacgggttacgtatacgcagcgtgggacaactcagcgattgagtgtgcttaaccctattctgagtggattctcgagaatccgctgacattcaagataaatcagattggaatgagtataaatcagatttataattagaatatcgttttaatatccgttaatatattaccatctgggctttattttttatatctactacgtttagaggccatcatttttctccctgcactgcataataattttgtcatttgcgtaaacaatttaatgtgcgtgtgtgcgtgagtgagtgagatattagaggccaagtcaagtcttcgtagtgcgagtttctgctgctcacccaagcactccccttttgaactccgcagccattcgacttctttctcttattattccaattttcctatgccactgtagctgtatttttcccagcttttcctccgcttttccgaccgctttccccgtcgcgcggctttgaagtgtttacattttgcatttgaattatcgccgttttatatgcttcgctttgattttctattcacttgttgttattgccctgtctgccttacattatattaagctaattttagtatttagctttcgtttgcatttcaattcaatttggagaaacggtggggaaaacgctgtgggcttgaaacagaccgagtactgtacttttttatttttaatttccaattcgatttaattgttgttcttggcgctgacgttgttgttgctgttccaagttgttgttatttttgtttcgccttttccgatttgatttgtgttaatgtgtgtgtgtgtgtgtgtgtgtgtgtgtgtgtgtgcttggcgccgtttggcttggcggccaaacgttctgaacaataaaaattttgaacgaaacgataggaaaatgctttgacttttaggtatttgaaaacagtattagcatggtgttcatactttaaacagaaactgaaacttcaaaatccaagaaatatgttgcaactatgaaaatcagctaatctataaagatgatatcaagaccacaaggaaataacttaataacaataatacatattttttggtatgaccactttatgtatatatatatatttatatacaaaattgatctttaaagaaaccccctttgttgatatcagtgattaagtgcagttgaattttccctgttagccttgcttatctggtgtttatccgttctgcaagatcactcaatttctcacaatttctctcttagctgctggtggctctctttctcccacttcacgcagtttgccttcggagaagctgagttttgtttaccgacttgctgttgttgttgttgttgctgctgtcgcaattgaagcgcagtttctggcagcaacagcatgagctatagtatctatagatataccgatacctatacttatgcctacatgtacatacaaacatatatacccgttcgttcgtagctccaacggcgaggcatgcgaagtcccttcaagcgtttcaacgtacttttttttttgctgcgcttcggtttgtttgatttggcttgctcaccttcggctcgacggcaacaacaacaacagcagcagcagcaacaacaacagtatcgaacggacgtcgacggaggcagcgacggaactgcgaattcgatggagacgtcggtggcggtctcaacctgaaatccaacctgaaactcgaaacgaacccgaggctcgtgctgtgtttcatttgaatgggcacacgacgaacggagttcgagttggattggccacagtgtgccggccaaattggaagcctttggttccactttgcgaaaacttttaaattcgcttaaccaaattgacagctttagggccatttcaacatacgtacacgtttggtttcttaaaatgtagatggtaaagggggaaaatcttttcggttgcacgctaacgtcagggtggaagaatgaaaagcagttaatttctagagaatatatcgtatcgttaatatttaatagtcttccttacaaaccttagacataattgtgaaaaagtataatttatgtagtcatcgggaaaccaatttctggaagctgtcggacgagtacttgtaactgtagtcatttatcacaggcatcttttgcaaataccttggctcaaaggacctcatttccccatgctctcccttttggtctctttctgtctacccatcccgcttgcacttgatcctgtgcctaggccataaatatcgtattaaatatttgccttagtatcgcctgcgatgtcggcgtttcgcgtttgcattaacgccgaatgttgtctgtttatctcgctagttattgttcgcgctgcccataggtggtgttttgccattttcgaggggggtgttcatgtgtccatgggccataggggaaggggaagggggaagggggaaggaaggaggcttgctggcaagaggaacaagggggggggagggtttcggctctggtttggtggttgcaaacttttgtggcattgccagttgattggattgccatgagatgaacttggcgtcgcatgtgaatgtgtgcgtgtgtgcgaatgagtgtggcaagtgatttatgagtccccagtgctgatatgggatacgctatacgctatggatatacaatagatacaatgtcattagcgctctcgccgatacactgctcctttttccaacgtaaactccctatttctttcgtcgattttaatttaagcacataatggcgatatcattgacacccagtagtttaacatttaattttagcaagttttgcttgtgttaacattatttgggtttcactgtgctgcagagcgcacattccgaaaggaaacacttaactgcttaagggaatctaggagcttgcgacattcctgtaacgaacactgacaaaaatcaactaaatttcaacaagtggagtttctgtttctatctctctctcgatcgacaataagttggagttatttctagaaaaaacgaagcatattgaagatgatgcagccagcggaacagatcttctcctgcggattcgaactcttcgggcgagtacagggtgtgtgtttgcggaagcagacacgagatctggccacaatgaaccaggtgcgcgggtgggtgatgaacacggacgagggcacggtgaagggacagctggagggcacactgcccaaggtcaacgtgctgaagttctggctactgaatatcggcagtccgcgctcgattatcgagcgggcggaattcacgcccaccaaggagatcacttcgcacaactttagccgattctcgattcgctaccacaatgtggcagcaacgaaaaaggccatttaataaagaatttagacttgtagtctactaccgaaaattggaactgtgtatttgctgtaactatttgtttggacctttaaattgagctgcctacgaatggagcccagttgtgcttctgcgagcatcatttataaacctctaaaatgaaaaacaggctgctgccagccactaattaagccgcacaaagaaatgctcagcgcaattacatggaggctggcacatccactatgtacttattttaatatatgtatctacaaagtaaatatatgtacatatgtatatatatatatatgtgagatgacttggttagacagacacctgcagcttcagcttcagcttcagttttagcctcggcttggccacatttccagttgagcgacgccccaaactggcaatgagtttttacggcacacaaacagcagccaacaggcaacagacaatactggctataaggaaaatctagaataacaacagagagccacaaatatttatcgcagtgcgctgaacaagaacagattgactatttgattgaaggtgaaaatctagtaagtcgtgacttctcaaggcggaaggaaatgccttgaaatgcatttttgggtaaatgttatctgttatgagaataacggtagatatatatatatgaattatacgtatacatatatgtacgtaatccgctgtctattcaacgaatgcatttattgcataggaagttaagatttcaagtgttggaaagttcactgtactgtttccgaatttcattattgacagttacatgtgttagcctgctgttagaaaagtgcaagctggtttcttaagtaatatactaagtaatattaagtgtaactctgtttgtaaataccatatttccgaatttgatgatgcttattccgatttaaacccgtgtggttttaaatcaaaatcggattgaaatcaaagtgccacatgcatgtcttatcacattttcgagttgtccaagtgtaactcgtaactcggagcgagaatccagttgcccagcgcgcctagctgttggcgttgtagctgttgttgttgcgcccccaaatgccctccatgggtcgctgactaccacgacgccgccactgccactgctcgggcgatggcgtcactgccggcgtctctgccgccgaagcactgcgcataatcacaacaaaatcaaacaaatgaacggcactgacacagcggcaacaccaacggcaacagcagcagcagcagcagcagcaacatcaacgcagcggcagcaacatcaccgcaacagcaacagcttcgagtcgcgtgtgtgcgttcatgtgaggttgtgttggcaacttcgttgcgtgtgtaacaggcgcccagattttccgagagagctgaaaaagaacattttcacatgcggagtggggtggagtgttcccatttgtggatgttgggtttgcggaatttttataggttaagctgtaagcggtgtgaagagaggggggcgagaggagtgttgttgtagagaggaggcaagggggcgtggcagagaggctggggcgagcgaagagggttgctggtgtggccttaactagtttcagccggccggtgtcgttgccttataaacgagctaaaaatgcgagataaagagcgcttcgcacgactcactcgactcactggactcacttggatttttgtgagtgattcctgcgaaaccccaaacacaaacccaaaacctctgaattttcccagaacaccccccccaccccccaacgtttcccccgctttaccatcagctcaaattcctttgcgcattcctacgacgttgatgtcgctgcctgtttccggtgtcacttccttatttagttgttcacgtttgtttgttgttttgtgctgttgcctggcttttgggtaggatttcgctggatttcgtccttgtaggctcaacccaatttaacagccatcagaaagtgggcagcgaattcaatttgcctgaaagccacccacaaaaaaaagaaacaaaacaaaaaaagaagcgaagcaaggaaaacagaaacggtgatcattagttggattattattagtctattagtggtaatcaaatttatggcacaaatacaaattgagggaaaactttcatgacgccaaaatggaaattgaaaacagcgagtggggcagcggtggagcttggttggaatggtggaacgggggaggggggggggtaagacaggttgtcgcggcatacataaatgcaaacactttgtgcaaatatttgtgtcattaaacaaatgacaaacgaattggtttcaacatgaaagccaagagagagcgaaagagtaagagagagagagagagcagctgacatgcaacatgctaacagcagcagcagcagcagcttatcaaccgtctgttatggctaacagcgacatccccgcagcaacacccataccaacagccacccactcgcacacagatactcactcgctgcggcgctgcaacaatgcaaaaagcaaactttctcgctgccggcgtcgcagctggcgtcgtgttgctgctgctgctgccgctgccagcgtcgctcgcgtcgctcgaagtcgcttcgtttggcttcgctgacagcggctcgtgccagtactcaaccgactgccaaacggcgcacgacaaaccagcagcagcatcagcagcagcagcagcagctgaggcaacagcaacagcaacacgacgccagcaagcagtaacagccgcacggcagaaacagcaacactagccaaagaaaagctgagcgctttttttttttagttgtttgcggttcgttccctcagcgataaaaacccaccagcagcaacgcatcagcaccaacaaaggcaacatcaacgactatggcaatataacaaaagaaaacaaattaaaaagaaatactaaaatatgcacttaaagttaatgaagaaataaagtgttcgagtgcttaaaaacattagtgtttgaaaagtgaaaagcgaaacaatttcgtgtcaaacatgaagagttatagtattttttaatcgcaaagatgagagaaaaacataaacaacaaaaatgattgtaaattccttaaattccatatatagaggtgttatcagcagaacaataatgtattttccaaagtaaatctgctgtgatcaaaatcagctgtgaatgagtgtaaaaaattcgtttgtgtgcttatggaatttcgtttattttatttacgagatcttctgctaaattcctgtgtgctttctagcaattatttaactcaaccctccccctgtgtcctgtttatttatttgacattttattcgctttttcgtgtctggttcttggatgggaaattgtgcatagcaaatgcaaatttattaggtgcagacttcgtaagactcacgtaagacgtaaaatggcagaaattaaaaatcataaatcaaaagtgctaaataaatcaggaggaaaattgagcaaacaaaaaaaaaaaaacgtgtgcttatgtgtgtctgtgtttttctttttttttttttttgccactcttttggctcgatggaaaccattaattacattgcagtaaatccgtttgggaatttgtacgttctgcattattttcgttttcataaattataaacttttatgttcgatgctagaatttgcttgctaaaatatcaaagaaaacatttttggccaacataaatttccgtttgatttctccgcgtgagtgtgcgtgtgtgtacgctagtgtgcctcagtgtgtgttacgcatattgcttagacaagtggccaagaaatgtacggtgcaggggggagggggggttagtggcagcggagagggtaggagcagatctgagcgagcaattggtcgtttgttatgccctcaccaaaaagtggggcatgctcacaatgccatgaagtagaacacgtttggaattgtgcatatatttgtatctgcacttacagtattcataaaaatgtgcgcatacactaatggccatctgtgcttcagtttgtgtgccctgcaatggtaaaacaattgggctgattaacggttttgaattatgcaaatttcgatggttagctatcagcgtgatatttagatgcaaacacctgctgttacatttctttaattgctccgcttttcaagagttttctttaacggaactgtgatttggggttttgcgtgtatatagtgactatttcattaggcagctaaactatttgatatatatatttattttaagggtatcccaaagttacccatactccagaacttcttccacgcttttgtctcttggtgtataattgaatagtgagagacaagagcatctaggaattcttgggcgaaacaacagcgatagtaatagcaacaattgccttggagcgagcaacaagctaacttaaaccgaaccgagaaatctggcttagccgtttggcgttgcggaaattgatgctgcctctgcctcagtctctgccgccgtcgcagtcggcgtcgctgcgttgctgcgactacattaatcttacttttattgctctttcggttgttactgttgtttaattaatttttggtaaacataatttcgcattgtgcgccagctcagttaaatgacttgaataatgatttataattcacttcgcaaatttcttgcgattttcattttcctttcctttcgccactgccgcccactttttaataatttgcaaaaaattaatagaatgcaaaatataatgcgagtaagtgaagtgcgaatgctaggggcgaaaggcgaggaaatgggcagcaaagagtggggcgctaaacaaggccataatattacgcatacgccgtgtgtgtcggaaaaatatggggtaagaaatggttaaaatagcaaggaattaattggtggcgttcgttttcaaggggtggtgcaaaaaaagggggggggggcaaaaaaggcggctttctgttatggctgacacttgagcgaacgttttaagttacacttttaattaattgttgtgaataaatgatggcccgctggcaaagaggaaaacgcacgagaacagtggaactggaaagaaaaaacagttgacaaagagccgggggaaaactatttgcatatctcatttaaagtgcatgcaaaattggaattcgaagttggattttctgttttaaactcaacttcttaattctagattttatacagtttatttatgtataaaattaagaatgatagtaataacgaatgataatgatgatgctacttattaaaacgattttcaaattctttattttaatttagttggtttcaacttcatcaatcaatgcactaatatttcatgcccaatttatgtgttaacaacagctccaacaattactccaaatctttttgatttccccacccaaacgtattgaccacgtccgcctcctttttcttgcgtatccaaggccacttctcctctatcatctttcagtgcctcagtgtctctcagcacctatataccacacaatgtagcaactagcaactcgactcgaccaactaatcaaataacacggacgcgaagcgaaggctttccacgaaacatttgatgtgtttttccgatgatttttgtgttgcttttgttgttggggaagagacgatttccgttttcggactagctgctatatggctatagtgtattgttttgtttttttttttcttcttctttttctggtgctgagtggcggagagtgtcggtttggattcgccgctaattcgcattaatcatacgacgcgttggacgcgctctctattgtttatgcattggaatcatgaaaacgaaattcgtacaaactgaactgctgaacgtcgccaatgtggaaagaagcttttccacatttttatttttacacgcaaaaaatttactagctctcgtcgacgtggatggaggtggaggcgagagggagacagtgtgcaagagagatgggtgaggtcttcttactcacgctctttgttgttgcttatttttaatgtgtcaaggttcgcggcataatttctgttgctttatttcatttgcgcgtaaagcaaacagaaaatatattaaagcgcgacgcaggctgatagacagtgaagatacagaaacgagtcataaactgagaaaggtttgactttctttttgagcaacagcaatcagaataggtttaaacgtatttgtaaaaaaaaagaattaatttcataactagatttgtagaaatagcgatctagtgacttgagacacgtactcctttctctgtgatttctgtttagctcgtcacaatgtgaccagtacttctgagagcccaaccttcgattttcagtatacctcagaccccagacacttacccccccccccctccccctgacaaagttattaagccccaccaccagcaagacataaaagccaagacggaggccagagcgaaggcaaaggcgaagatgaggatgtcgacatcggaggcgacgcatcgataaatgtaaatgcagtaaatgtagtggggaattaggggaggcatgggcatgggtatgggcatggggagacgggagctcctcaaagggttggggtaggctaaagggtacggtacgaggctatggtatagttataggtgaaaaagatggaaggcaaagtgtgcgtggtgtgggggtggcaatacggagagggcaaaacatttttattaccgcagtggagtcgtaaaaaactaaattacttttaagtttgtaaattgtgtgagctctaccgctctctttctgcacgagcatacccatctctttctgcaataggttacatattacggcaccctttcccttctccctttttcgcatttctataccactaccgttttcccaacgcttctggtcaacgcaagtttgcattctttgtgtcacgcttccatcgaaagataccgaaaacacagatacatttgcagatacagatacagccagcgaaagagacggcgagtgtgaagatagagggcagtataaaagagacagcatgatcgatggtagcagcggcagaggcgcagggaaaaacaaatttatgaaacgtcatttattcataatgagccaagcgaatggggaaaagtgttggcgcgtgtatcgaagtgaacgttggtacacagggcaatgtgatgggcgggggggtggtggttaaaagaaatgggagagatgggagaaatgggagatggccgaaacgggacaattgtgtgcattgcatttcgagtgttgtaaagtgccataaacttattaggcgaaagtgtttcgtgagtgcgagagattgtgcatgaatgtgaatgcgtaatgagtgctattcactttgttattcatttggggaatagttttgcaggcgattgtaattgtttaaccaccgattgagtggctatcgatgacctgagagtgggatccttcgccgcttaagaggacattttccttattgaataaataatttaattaggctgtgtgggttgcgaccttaagtgagtggtttttgtttttatgtaccaaatatgttttaaaggactttgaacagtgtcgataaaaagaaagttttaactttaaacttataggttttgaaacatttcattccaaaaacatccagtttgtagctagactacattggatatatttatttcgaatatttgtgtatataaatctcgaatgtgaaaaacccccgttttatagaatcttcactgtatgaatgtagtcgcagagaatgtttttaaattgtggtaaataattctgaacgcagcaaacgagtcacttgcggttatccagagcatttcgcaaccttccgcacacttgcaaccgagtcctctgcttcttcttcactttgaagtattatatcgtgtgcactaaatactcacacagatatatatgtacctacatacagcggcatacacacgcacacctcgcgaccccacacacatgtcattgtgttggttgctgcgcctattcgcggctattttgtatacattttgcattaattaaaaacaaaataaacagctaaagtcgcgggcgcttggcctgcacggaggcatgaaaataaaaactgaaaagcaaacacattctgatttaaatgtgattgttttcttgttttctttttttatgccatcgtcttttttttttggtttttatcctcttcgttttacgtacccagcaagtggtattaattttatgatttttcaacaaaatgatacttgggaattatgtacatgcatatgtatagaacaaatcattaaaacgccagatttatttgcaatagttaagcgagcctacgagaaatgcaagttttgaaatatttctaatataacctttgcattaacatacatttttaaataaagtaatggtcttaattttgtacagggggaaataaaagaatctattttaaacattatctattccatttaaagatacggttaggcatttttatatagacaaatgtgtagatacttctctatatgtcccatataccccttgattacacgattgaggggtatcgaaagcgctgaagtaaggcagaacagaaacaaaaacaacaacaaaagcggagccgacgccaacacaacgcacactagcacataagttctcacacagatactctggcgttctggttctcttttctcagtcgacttcggcattctgccactgattagaagtgtctttgccttttatgttattgtttctgcctctgcacagctttctgtgttttttaaggtttgttttttgtacacattttgagacgtctttttatgtgagtgtgtgtgagtgtgatttttgccaatggctgtgtgcacttgcgattttcatgaaatttcgctacggcttttcaataatttgtgcacgtcttgcaagtgaatttcttttgattactcttgccaagtcagcgatgtagttgccattgttgttgagtgttaatcgaatcgtgcttcccatcaatgcagtatatacgatatgcgttatatgtacatgtgtaacactaatttatgtataatttctcactgtgtgcgccgcagctgaataaatcaaattacaatcaaaagaactcgagatcgacgaagaaaactgtgaagaaaatcaaaagccaaatgcgcccgcgaagtaaatgcaacaaaatgctatattttcgacgctgctcagcactgtcgacgtcgttacacaacactggtccgaaaagttcaccctatcgtgtggtagcctaaaatctccccacaaatccccggaccaagtctaccaacgcgcttttaaaaatcatcgtgctaaagctgttcaaacttttgtgtctatatatccgaagtgttttcaaaaccgaactctcgactcttaatgtccgaactactcaaaaactaaactaaatcttcgcccaagccagcaaaagctaaaaacgaactatctatgaatatttgggtaagatttgggtaactaatgagagtttttattgctttcaatgttattatcatttaagcttgtcccactttttaagttgtggataagagcaacataatagttttaaaattaaattgttttcttatctacaaaatgttttcgttctttagattttctatatagctcattactattttgtaattgatcgaatacagtttcaacttattttttaggattatatttacactgtagcattgagaaactttatattactataacgtatactttattttctctcctaatttagcaacaaaaattcctgaaacgacccgcggaggatgttgacaatggccctgacagctttgaaccgccgcacaagttgcctaataataacaacaatagcaatagcaacaacaacaacggcaatgcgaatgccaacaacggcggcaatggctccaataccggcaacaacacgaacaacaatggcaacagcaccaacaacaacggcggcagcaacaacaacggctctgagaatctaaccaaattctcggtggaaattgttcagcaactggagtttaccacatcggcggccaattcgcaaccgcaacagattagcactaatgtcactgtaaaggcgctgaccaacacatcggtgaagagtgaaccaggtgtgggcggtggcggagggggcggcggtggaggcggtagcggtaacaacaacaataacggaggcgggggaggcggcggaaacggtaataacaacaacaacggaggtgatcatcaccagcaacagcaccagcagcagcagcaacaacaaggcggcggactgggtggcctcgggaataatggaaggggcgggggacccggcggcatggcgacgggtcccgggggcgtggccggtggacttggcggcatgggcatgccacccaacatgatgtccgcccaacagaagtcggccctcggcaatctggccaatttggtggagtgcaaacgggaaccggatcacgattttcccgatctcggctcattggacaaggatggcggtggcggacagtttcccggctttcccgatctactcggggatgataactcggagaacaacgacacgttcaaggatctcatcaacaacctgcaggacttcaatcccagtttcctcgatggcttcgatgagaaaccgctgctggacataaagacggaggatggcatcaaggtggagccgcccaatgcccaggatttgatcaatagcctgaatgtgaagtccgagggcggtttgggtcatggtttcggtggctttggcctgggtctggacaatccgggcatgaagatgcgtggcggcaatcctggcaaccaaggtggctttcccaacggtccgaatggcgggacaggtggtgctcccaatgctggtggtaatggtggaaactctggtaatctcatgtccgaacatccgttggctgctcagacactcaagcaaatggccgagcagcatcagcacaagaatgccatgggcggcatgggtggattcccacgaccgccgcacggcatgaatccgcagcaacagcagcagcagcaacaacagcagcaacagcaacaggcccagcagcaacatggtcagatgatgggacaaggacagccgggtcgctataacgactacggcggcggctttcccaatgactttggcctgggacccaatggtccgcagcagcagcagcaggcgcagcaacagcagccgcagcagcaacacctgccgccgcagttccatcagcaaaagggtcctggcccaggagccggcatgaatgtgcagcagaatttcctggacatcaagcaggagctcttctattcctctcaaaacgatttcgatctcaagcgtctgcagcagcagcaggccatgcaacagcagcagcagcagcaacaccatcaacaacaacagcagcagcagcagcccaaaatgggtggtgttcccaatttcaacaaacaacagcagcagcaacaggtgccgcagcagcaactgcagcagcagcagcagcagcagcagcaacaacagcaacagcagcagcagcagtactcacccttcagcaaccagaaccccaatgcggcggccaacttcctcaattgtccgccaaggggcggtccaaatggcaaccagcagccgggcaatctggcgcagcagcaacagcaacccggggctggaccgcagcagcaacagcagcgcggcaacgccgccaatgggcagcagaacaatccgaatgccggacccggcggcaacaccccaaatgcgccgcagcagcagcagcaacaatcgaccaccacaacgctgcagatgaagcagacgcagcagttgcacattagccagcagggtggcggtgcccatggtattcaggtgagtccatatatccttatagccagctaagaagcgtagtaaacaccgtcgagaaatccacaatgatagccctaaaaagagccaaatgtgtgtggcccgttgcctatatggagcttatccaatggcataacgctacttaatgccattgacacgtatgtaaatttccatgcatatttaagttatcagcgtaacgaagtcaacagcttttcacgaaaatcccaacagcagaggcagcagcggaaaagctcctagggggtggttttttcacattgagtgaaactgcttttccactcgaccatttcactcagtcaaatgactgctgcttgttttctttatatttatctgcctttgtttttgttgtcgcgaaaggatcataaatcatgttggggcaaacaagacgagcaaacgaacctttgcccgcttttcccgctctctctctctcgctctctcgctctccccatctctctcgttcgccgagttttcactctcttgcctggcgtttaaccctcggttttccatttccactcgctaggcgagtttatctctgtccattaattttaccacacatctgttcataaaattgctcggcgacctggcgctcggcttcagtgagtcctcggcagcgagcgagtgtcctggcgctgcgggcttctctcgtcggcgtccaccgacctcagccagtcgcttttcccgccaccccacttgcctcgaatttcccgagctccatgtgcgccattttcattacgtgagcgagaaaagggacgctaacagcaaaaaatgtggaattgagcttggcttctatattgctcggttgtgttttagggtttttcttgaatggaaatttctgtttcaagtagcgaaaaaggagctttaagatctaagaaaaagcgtgtaggaaaccgaaaaaggaagctaatctatgcacaaaaatgtccagacaagggatgcaatggagaacgtgagaagccttagaagatctagccaaacagaagctatttgtagcttaagggaacaatgaaacaggggaaatgccaggaaaatgaaacattatttgttaaagagtattatttattgtattatttttgtttttctaatgtatatttgtattatataaatgtggataatataaataatgcaatcttagtccacattatttattacaacatctctattctagttatttagtatagtattctagcattctatttctagttttttttctagctgcctagtctagtcgcatatatctgatccttatttattgagctccattttggaaacagccccaaagtgcatgggcccatgaacatttactgagcttcgtcatcactcatccatatagtaatgcattcatcatttgattgcgccaccacgaccccgccccctagctccattgccccccacccccctttgcctttgcctttgatgggcacttttttttccggaaaatgcatgggaatctctctcacaaaagcaatattccctagccacatgcatccttacatatacatatgcactaaacctaacccatattcattatccgctccaaattgttttcctgttatttcgcaacaacaacaacaacatacaacaacaacaacatacaacaacagcaagaacaccccaacatttcatttacaaaatgaaagtgcaaaactttttaagttaagtttcatgtcgctgagtagttttcatcagagaacagccaaaaaagcataaaagagagaaatgcgaaagaaagaggagacagagggagagggatatagagatagagggagagaacaaaatgcttttggcctggtcgaaaaagggacacggcaacggaatttcatccgatttttggtcagttacactgcaaaaaaaagctgagctagttataattataataattagattttatacccactttttccatctcattacaagcaacatataaatatagaaatagaaacattcagaaaattgcgtaataatttaaggtcacttaattgtagtcataaaatactttgcatcttttggcatgtaaaactaaaacaagctaatttttgtacgtgcaccttttcctgggcgcatttagctcaagttttaccatgaatttcgttcatgcattaaccctcggttgcctgagacttttccctcttagccaccccaaacctccgttgcatagaaaatagttgaagcaagttgagtgccgtcgaaaatgatgggagagcgggatataacagcttggggaggcgaaacttgttgacgattgagattgaaatttttcgaggtttattataattttttattcagactgcccactcagtggcagtttcccttgtcgcccttcgtgtccttggcgtctagtttttcgccctcactgcgattttcctcagtggaccataatcaaaggctgtcctggcgaatccttttcgctcgcttatcgggccaagacacaacacgtatacacacttaagtctaacgatatatttgcataggactcattaaaaatgcccccaaaagaggaggcatttggcaacgagggttgcaaaaagccaaaacagcatcggattcaacgagttttcttggctcaataatattttccaaagtgggaagcaaattgtgggggaaacctcttaagtgcaagaaatgagcgggcaaagtgtaaaatgtacaatgaatttgacaaagaacggtgtggcacaagaagcaaatgctggtgtatgtatatgcacaataaattaagcgcggaggagaaaaaaaataaaataaaatgccgagaagaatataaagttggaatggtagaatgtgtagaaaaggagcagcgggcaaaatggaaattatacattttactaatgaggttctttgcccaagaaggatgacaggccatttttaatggcttttcatttggcaaatttttaaaagggctattcaggttttcgtattatatattttaagcttagcagcatttgttttaatcattttaaatgcttcttgtgactttaagaacaaaagctaaacaaataagtcagacatatttttaagcaaactaaaaacctatctcaaacccaaaatactaccccattacatgagtattgtaaataatatttatcagatacttattgtgcaaaatgtatcttgtagctataaccaaagcaaccgacggggcagaaaaaccaggcaacagccaaaccgaaaacaagcgtgtagtcccggctaaaagttcaatgaattcaaaatgctggccattttgcatgtcctgcattaactcgttaaaatgccaggaacaacagcagggtggtgtagttctagccaccaacaaatttctgtaaaatacaataaaaagtggtgaaggagaaggatggatggggggggtgtgtgtgtgtggggatggatagaaattctgggagaacgagttgcggaggaggcttcggttggtcgatccgcaggcgaaagcgtcatcaaaatgccagggcgcacaaaagtatgcagcggaaatgtgcaaaacgtgaaaatgtgcggaaattatacttgcgtcaggcacacacacacacacacacagagagagagagagaaagagatagatagacagatagaccgagagagataggtagagtggctacacaacgaaagagacagctagaatgctccgactgtgcagagagggtcatatcagattttatgacttggcccggtcgacttaatgaagtaagcaagaaatgctagcacatgcgaccaacttcgaactgtgcgagtcatcttgtatcaaaaaacaataaataatttatagcagcaacgaacgaggaagtgttgagatctaggcaacagcgaacatccgaaagtacacatataatgaaatgaaagtggcgaaaaagcggaaaaattaaacaacgcaatgcgcaggcgccaaggcaataaaagcaaatccccaaaaattcagttagcttcgcagattcccggacaactcttcacataactcgccttgacgtggggattatggggccaggagttattggacagattctacatctgtataacggctatataacctctataaatttaatttccccccacggtgaaagaagcagaaacttcggcactaagtgaaaacgagaggcaacgagagacaatcggcctatttatgagcgaaaaactttggctacaaaagaaaatatgatatttttccctgctgtttcataattcaacgaatttgctgttgtttttacgtatccagttttacggataacgcttcgcttgagatttcggcttcagtttcagttacagttacattttcatgttcagttcagttcagttaggttttgttttttttttgctttctgacccggcccattacctaacgcatttgatgctctcaaaggtcacattatttaccttttatattcccattcgtgtcagtgtgaggggaattttccggcaaggttggcaagatggtttttggtttggcgcagcgaaagcgaagtttcgtaatattttcattctgtttttccactcctgccgctctctttttcggctgcgtttcaatcaatttgcaggtgttgagcttttctggggggaggtggcaaaaaggtgagcggaaaagttgatgaactttggcggtaagcgtttttggagcttaaccgtttcgccagagttttgaagatgtgtgaaaatcattttattcccacctttcgctcatttcgctgagttttccattttaatatgtgtatgtatgtttgtttgtatcttaagttgcccagcttcgcaattatagttagccaccttccatttgagggattatttcggcagcttatggcagcaatatcaatcagtttattcacacatatttaccattttagctggtatatttcattttcctggggcttagctggctttctatctcttttttttttctttttggtagtaggcgggccggctgcatgattgcctctgcttttgctcacctggccactttgattgctacctttccgttttacccattttatccgacatttccctgcggcgttttctttcagcacctccgctcagctattttgccttgctgttggcgtaaaatttaatatttgcccgtgttcttaaccccacaatgccccccggttgcctgggtgtgtgtgtgtgtgcctgtctcccccttcatcgtgattattatgccatgtaatctgcttcatataacactgagatgaagacgtggcagtgggaatgcgtaagcaagtggcaagtacttttaatactttcacctccttggggcatcaggatagcacccacacatacacttgccacgcacacacagcccccagttgatgtgttagatatacatatataaatatttcagtttttaatctattttaatggaaattattcgcgaggaacaaagtttttgttggagctactggttttgcattttatttgctataatttgcctttcgccacttgttattcagcagctcctcctcccgcgctccaaacttatccttttctaagtttaatttttctaatctcgcaaacaaatcctggtggacgttggaaagtatgctatgctttttacaaggcgctccttcgccactttgtgtgtgtgtgtgtttgtgtgtgtgcgagtgctttccgcaaacagctcacgtcgcatatttataggctgccagggcataaaaagcgatttcaactggagccgaagcttgccaaaaagatttacaaaatgtttccgcctttgttttttttgttttgtttttattttctctgcgcttattttgggtacatttagattggctttggacggctgcaaaaacttttgtttaggtatcagttagtctggtattttctggctcaaaagttcggttgttatcaccatatttgcagcagtcgtctattcaaattagtttctatttgagccggagaacggaactcagtgccgagacatgctgtctggccggcaaggttgacactcatatcaaaaacaaagtatttgcgcaatttgtttaaatttcatgcgccactcagacgcaaatgcatgttaaatgtaaaaaccaacgagaggcaaacgagccaaagacagaacgtttggcaaacaaacgagtcttggtcaagtgtaaattctggtcaggatgagccaggaaataaactgagaggtggggtgttacattgcacttccaatccaaacacacgcacacacacacacacacatgcctcagcatttgaaattccattaaatgttgttgctctggtcgcaggcaaaataatttccagtgacattttccctggcttttcgttgacaaccgaactcatttcattaactacccaaacagaacgcacaatctgttgccactacacacacacacacacacacacacacacacgcacagtgttatatgtatgtatataaatatatatgttctcgaccataaatatgtctgcggggccctcacgcccttcaacaccacccaaatccccttcccccccccactaacccgcagcagccacccctcataaaaacaccttgggcatccaagccacccaagccacccactcgctgcagaaacgttttgcccggccactttatcaaattaattactttgccaacaagcgggatgaaggatgtgcgggggtgttggggctgttgggggcttcgccgggaggtcaagtggtcaggaaagttgttgttcacttacatttgccacacttttacggccataacacgaaatccgactgcgaaaacgatgaggaggatattggcaaaagggtgaagggctcaagtggaattatgaaattgcaaactggattcataacagctgcagcaggtacttgatcggacacagaaggatctaccaggataagctagggatagagcacagaacattaactagttacattaaataaaccaaaggcattaagaagaacttaaactattgatgctgccgcagagaaaaaaagtatttgcttagctttcttcactacaaggattctaagccgtcgagctgttaacgtcaattagaaaacaacgtaggtgttttgcctctcagacggcatttcaaataccaatcatatgcagatatgcattttattcctacctacttaaaaataccttaaatagaatagaacgttgacgtcagttggaaaattaatgttaaatatagcggcgactgtagcaaaaagttgtctcgtttttctcggtcccagtggggaaaatcaatataatgttgaagcgaatggtaaccagtgtcacgctaaataataaagtaattgttgttttatgtgtgttggtaaacattccatgaatattatacgtggagcaatggaaaggaattcgccttcaaagtgcgagagattattaacccccggttttaatttgtgtgcaaaaaaaaaaatagaagaaagccttttgtgcgacaacgcccactggaaatcgtagttctcctctgagggcccacgtggcgtatgtgtaattccatattgtctactttcatttgatcttggagtggagggcgtgtgagcgtgtgagggggcgtggctgcggtgcgtgtctaatgctcgtcacttgaaaactcgccgagccaaagtaattgaaaatgtaaatggttgaggttagtggcagtggaaagcggatgaaaatgggacgacgaggatgtggaagtgcagaaagtgagtgaaatgttagtgcaaaaaaaaaagggaaacgaaaagttttcggaaaactgttagggatcagctttggtcgacttaattccctttttggcggttaaaacgttacgttgatggctttaacatactttcataattaatagttgcaactatatttcactttgagttttctaaatttcgtatacgcaaacctatgtttaaacaatatatcgatgataaatcttgtggaaaagccggcagcatcaaacggcatacctttcaagccagccatctaccaatttttcatctgtgggctggaaaatcaatgcgaaaattcgtgccgccgtatttaggtgaaaatgcagacgaaattttccatgcaggtgatgtggtgatcctgtggggaaaattggaaaagcaaaggggcagccggattcatatggctggataattctgccaaatttgcagctttgcttttttgtttgttgtttgcattctgttgtgttctctatttaccaaagtgtgtgtgtgtgtgtgttcgagtgtgcgtgtgcgtgcgcctatgtgtatctgcctgtgtgtgtgtgtaaataaaattaacgaatgttgaactttctgctgacaaagttccggcacatgcataagcaaatatgttgaaaatttgcaataggaattgattttcaatttaccgaataagaggggatatataaccaatttgttcctggttttccattaagggctctaaatgtttaataataattttcgtaggcataaaccccatttattggataaagtagccaaatgcaagctaaatcccatatcttctatctcatttaactgaatgattttcagctttctcttaaatcttccgtgtttcttgtttatttttttttaaacattgtcacgttctgacttttattgcgaatcgctggctgagtcagaagcgcgcgcgtttcatttgcgattcaatttgtacctcatagatgcagtcattcgaacagagagtgaaagaatcgcgacgcgaagaattcttctcaatgctattttcatgttgatcgtgcgccgctgctttgttcaccctgtcgttgttgttgttgttgttgttgttgttgctgccgttgccatgcagctggtttatctatcagatgccagctatatgattcatccgttttatgtctttagctacggattttccgctttcagcacgcttatcgtctgcagataagcacgatataaacgatctgatctcatcgagattcaaattgctttgttctcgttaatacaggaagtcgtttgcagttccatatcattatgattgcgaccaaatcagatcgtctcagatcagatctggctgatcgtgtaatgatcgccattagctggcacattttgtatatagtaatcacggagtaaatccaacatcggattggattgcattgcattgaattggattggattgggcacgcaaaatatttacactaattagccacggtccagtacactcaactacaaacgacttgcgtttgcggcggcattaagttcccattaaggcaactggcggctgccacggcagcaaattaaaaatgcaattgcaaattaaatttaatttaaaaatccatcaagtcgaatgaacgacttgggaacggtgaactgcaaaatgccttttgatttctatgcactcccgccgcatcgtaattgatgaagagaaatggaaaaaggtgggcaacataaattcaactaatgaaatcatgaccagattaggttctatatttgccgatgttgatgtttcacattccctgactattcaatattcacggaagattgtgccttttggcctcagaagtagctaccaatttcgtggaaattggcaaaacatcaagagagaaaaatcatttagtatattttattcatgcctagcattcgaatatgctgaaatattttcttgaaagagcttacttttcagaaattgaaattcttagaattaaatatttttcaatacgtttttaacttagcattcctcatatattgtataatgcttctggattgataccaatcatatgccatttagaaaatcgttttatgcatttatgtttttaatagttttgcattgcaattagttcgataaacttaagcctgaaattggcttgcttttcctatcatatatgtatatattgtgatgatgccgcctggttgttggggctttgatgaaaaatccggctcgaactcgtaaacttttgacagacgatccattaaaatgttttcataaatttgccacaggtgtgcctgagcggtgcctgtgccgcctgtcgtatctcgctatttatgtatctgtattggaaaacccttcttctgaaatgaagccaacaaacaaatcgaagtcattcatcgcatcgaacgaaaaagccaaagccgaacctcaataatttaagtcagtccccccagtcagccagcccctctcacgcccaccattccattttgggtgtctcccttttggccccccccttttggccccccttttggcccccttttggcccccttttggcccccttttgacccacatggcacatgcatacagtgcagttcatttcgggcacacacatacatgtatatgtacgtacatatgtatgcattttgggggccacactcatggccatttatgccaaaatttaatttataattattgcaagtttaatttatgatcattgacatgctgcagcagccgaaacacacagaggcacacggaaaccgcattgaaagcgggtgttgtgggtggcgtccatgtgggtggtggttgctggttggctattgtatctattcctcgcttctatacacctcccatcgctgccgattgtctgtcattgtgtggaaactgcaactgtttcaaaagtttttcgctaccttccattgggaaaaactagggtcctttgggtggcagcaacagcaatgagagcgggaaaatggggaaaaggggaggaaactcacaccgcttgatgcgctgaaagttggctgatatgtcggcatcaacaatgatgatgatgacgggaatgtgcatgtgagtgtggatgtggatgtggatgtggatgtggttgggcgcgatgcagttttcctgcacaagtgtgtgtgtgtgtgtggaaagttataaccccgcgcgagcgggagatttcccctgtcttctttggacaggacaggacgggcttgcctgcatctcggaatgcgaatggcatgcagagtgtgctgggagtgtgcaatctgcacgcgggcattcgccagcgtatgtgagcataattacgtggcattgaagtgaatggaatgatggggcaggatcggcttggtctcctcaattaactctaaaaggactctcaaaggagatgagatcaatggtcttataacgttacgaactcagtacgctgcttatagctcgatactcaataacaatattacattttcaattatgaaaattccacttactaatcatcatgagttacttgaattttcctacaaatccgattatctgccccaaccgctgcaatcggattttgtgagccctgctctcgtcgctggcaattaaaaatcaaattcgctctgctctaacgcttttccaaatgagatttcgcctgttccctatatcttctcctatatatccatcccggttgctgtcataatttcgttaaataacgcagcgcggacacctcattggatgggatctgatgtgatgggatgtgatgggattggattggattggagtggattggtttagctaggatcgcagagtagttcgcagcggggtttgcaaggcagctagtttatgtcacacaaatatcgagtgacagacgaccagcgggtggccatccgcccacctcccatctcccacctcccactcccggaattcccttggcttcattttggattttttggcttcgctgccaaaataataacacaaaaaaaaaagaaaactgaagaaaataacatggcgaggcggcagggaaatgggaaaagagcaaaactaaatcattttgggggcagttctaagtgggcgtttgtgggcgtggcctctttgctaatttcattgactcttcaatttttggtcggctgccaagctgcgccaagtgggtgggtgggtgttttatgagttacttacgccccgtttgccctacagtagtacctccttaacacaaaactacatgaaatgtattgcattttcgaaaggaattttatatcttatttgttaagtactatagactttttacagacatagtttagttgtggataattgccatgccatcgcaatgaacagactttgataataattactcataaaagcctttactgagattattcgcacctgtacgtttttgggtctgggaagtttttcaattactttaagtgcaagtgggcaacaagtttggctgcggcattcgtcactcgtgtggtgggtacagttgtgcctggtcagtcgagcggagttgaagatatgtgtggaaagtcctcggaaaaaggggaccgcagttcctttagagttttatgttcttcgtttcgtatatttgttcttttctgtttttttttttttgctgatactccagccttacatgtgtcacacacacacacatgcaggccgggaggacactggcgggatggtcacatatatcattgtcaagtctatatgcaaggcatccccctgccgccgccactgtgccccttgtagcagcaccccttgccccacgaacctcattcccttgacagcgcgtggggcgtgcggcaatctttttggcttgtcaaatgcgcatttcctgcttagagtccttgctctatgtgtgtgtgtgtgtgtgtgcgtgtgctggtgtgtgtgtatctcctcgttgtgcgcttgagtgtatctgtgtttgtctccagcgcaatcaatacggcggcgcttgggtaatagctgcaggatttacgcgctcgtgcggcgtctccggtttacccgcaagctcctcctgctgctccacctcctcctgttggtggtcctccaaccaccccgcaaaatcgtacgccttcgtcctcggcagttacctttaaacttttttttttttttattgatattttatgtattagtggggctgtatccgccggtgggtgcaaaagtgtgtatatggggtggctgggctttcctgttcgttgtcttctttttatgaaagcggctgtaatgatttgttttatgaacttgttcctgcgcttcgatccgcagccaatcgatgtttaaccaaggcccatcgactttatttggtttaggtatttatgacagacagtgcaggaagaagctgtgatccatgggcttagcaaagccaacaagtttgtgggtgcagagagagaaataatgaatgagacttaagtagatatatcttattgttaataaatgcatggaaaatagctaagtaatgagtaattattatggataataaatgtatctatagcaccatttctctgtctgtatgagaccacatataacacgcctaaaacccttagttcgcttgccacacgaagccaacattttacaccttacctttgaattcagagaggcaggcgcatgatttatggccaacattcgaacgttggtgggtggtgggttgctcggctatttagcagaaggttgcccacacagcgacgaccaatgccaaagccaaggcactaaacttcaattagccccgacgagagtccatgacttttaatcagcgtactttacgccactcactcgcactcccttccactcgcactcgcggcgtcctcctgctcgcacgcgagctcaaaatgaaaatgcgtggagcactgcagaaaacacacaataaattaaaccaacaagcaattacaacagcaacagcaccaactgaaaagaggcacagaagcaaaggcaacagtcgaaaggttcgacgttaggatatcctgcaagttgagcactttttgctggaattcattacatctaaaaagcagagaaaatcttgattttctggctataatgtcttattgaaaagtggtttagatacaaatattgatatacctttacaaagtacacccatttaactttcctaacttgcaacgtatcatacaaacaaaaatttgcaaattactgggtaccaaagggcaaacgcgacctaaaagttgcttagtccgctcgatgttactcctgctgtagtggctgctattgcttttgctgatggtcacacatgaaatgtggaaaaacaccttgaggggtgacgagagaactaagccttgaattttaccccacacggtgggtcacagtggctcaaaagcgagaaaaatcattgtcggaaactatggaaactatgtgaaactattcgagtacagggtgtgtggtgtgtccggtgagaagatttatttgctgcccgcatattcgagtttggcgaggtggcagcgagttccgaggacaaacatccaaggggccaagtggtggtgaagggctcttttgggtgggaaaagtgggagttgactgcgggatgtgtggcattgaagttgctgcagggtcgatcgctggcgttgtcctttcgctcattttgcatgtttgggcccattacaataacaaatgaatggcaaatttgctgctcagtagggggaaacccccctccacacacacactcacacacatacacatgcagtacagatggacaaacagacagacgcagcaaagtagactatgaaaaagtgccgaaagatttatgcttctgcttctctctcgctgtacttgtgtgtgtgtgtgtttggcagtcaatgcggattcaaaagccatccaggcgataataagcttgaaagcccgccacccacttccaatccacccgctctgcagaagtgtttctgtgtgtgtgtgtgtgtgtttgcgacacatcgagctgacagcaaatgagacagctgcaaatggagaaggtaggaagtttggcctgcccgcctgcctccatccgccttctgcctttctggcactatgaatgccaatctatgtgtcgggtattagccccaaaaatccttcgcgccggcagcccaggcaaattaccaaagtgccagcagccggtgacaaccgttcgagtggcctgtcgcctgtgggtgttcatgtctcaggcatatagcaagcataagatcaaagatctttgcaaaagggatagttcctttcatgtgctccttaaaatctgtccaattactatggttccttttaaaaaggattccctttgtctcgctcaaatgggaaattacatgatacttcctatctagaatgaacatccttaaatctcgctgtgtttctataaagctttcggggcttctgatatctaccataactatctgctgtatatatatattaaatagctcaacatatatgtacattatccccttacaggtgtcggctggtcagcatctgcatttgagtggcgacatgaagagcaacgtctcggtggccgcccagcaaggtgtcttcttcagtcagcagcaggcgcaacagcaacagcagcagcaacagcctggcggcaccaacggaccgaatccccagcagcagcagcaacagccgcatggcggcaacgctggcggtggagtaggcgttggcgtgggcgtgggtgtgggcaacggaggtcctaatcccggacagcagcagcagcaaccaaatcaaaacatgagcaatgcaaatggtaagcgagcatagcaaaatttagtgcattgaacatacattcatgattccatgtgaattccattccagttccctccgatggcttctcgctctcccagagccaaagcatgaactttaaccagcagcagcagcaacaggcggccgcccagcagcagcaggtgcagcccaatatgcgccagcgtcagacgcaagcgcaggcagcggctgcagcagcggcagcagcggcgcaggcgcaggcggcagccaatgccagcggaccgaatgtgccgctcatgcagcagccgcaggttggagtgggcgtaggcgtcggcgtgggcgtgggcgtgggtgtgggcaatggtggcgtggtcggtggacccggttccggtggacccaacaacggtgcaatgaatcagatgggcggacccatgggcggcatgccgggcatgcagatgggtggacccatgaacccgatgcaaatgaaccctaacgcggccggtccaaccgcccagcagatgatgatgggcagcggcgctggcggaccgggtcaggttccgggacctggccaaggaccaaatccgaatcaagccaagttcctgcagcagcagcagatgatgcgcgcccaggcgatgcagcaacagcagcagcacatgtctggagcacgaccaccaccgcccgagtacaatgccaccaaggcgcagttgatgcaggcgcagatgatgcagcaaacggtgggcggcggtggtgtcggcgtcggaggtgtgggcgtaggcgtgggcgtgggaggggtcggtggtgccaacggtggccgctttccgaacagcgctgcccaggcggcggccatgcggcgcatgacccagcagcccataccgccatccggtccgatgatgcgaccacagcatgcgatgtacatgcagcaacatggaggagcaggcggtggcccaaggaccggtatgggtgtgccctatggtggcggagcaggcggtccaatgggcggtccgcagcagcagcagaggccgcctaatgtccaggttacgcccgatggcatgcccatgggttcgcagcaggagtggcggcacatgatgatgacacagcagcagacgcaaatgggcttcggtggaccaggaccaggtggacccatgcgccagggacccggtggatttaatggaggtaagtcttgaatagttctaaataccatcacttcacttcacttcaactgtcatccctctttgcaggcaactttatgcccaatggagcacccaatggtgcagcgggcagtggacccaacgctggcggcatgatgtccggccccaatgtgccgcaaatgcagctgaccccagcgcagatgcaacagcaactgatgcgccaacagcagcagcaacagcagcagcagcagcagcacatgggacctggtgccgccaataacatgcagatgcagcaactgctgcagcagcagcaatccggaggcggtggcaacatgatggccagccagatgcagatgaccagcatgcacatgacccagacccagcagcagatcaccatgcagcagcagcagcagttcgtgcagagcaccaccacgaccacgcaccagcagcagcagatgatgcaaatgggtccagggggcggtggtggtggcggcgggccgggatcggccaacaacaacaatggtggcggcggtggcggagcagcgggcggaggcaactccgcatcgaccattgccagtgccagttccattagccagacgatcaactcggtggtggccaactcgaatgatttcggtctcgaattcttggacaacctgcccgtggacagtaacttctccacgcaggatctgatcaactccctcgacaacgacaacttcaatctgcaggacttcaatatgccgtagacgattgtcgataaccactcaaacaccacctccagccagcaccaaacacaaccaccatcaccaccataaccaccacgatgttgcctcagttttgtttagattttttttaattttgttgcctcttgttgttattggcctggacagccgaacccaaccgacccgacctgacgcccaaccgccccacacggccccgccccccttgttcctgccaacgaagttattttgtttgttatatgtgtgtgaatttattcctaagctaagttcgttcgtctatgttctctaatttcgtgagctccactgtattgtattgtattgtattgtattgtatttgatcgtatttgtatgtattattagagctgttcccaaggtccaaggcgagcggccaatgggcgtggcagaggcgagagttcgcaaaagacattccatatgcagcggtcgaacgaaggaattagggaaattcgagaaagtatttgcaagtactttgaaaacaatcgaacagatttcagattctcatacaccgatacagatacagatactacagactcgttgtgcaacttaagcacttgtacttaatgcaaatttgtagtgccacgcccagcggattgcacgccccatttcgtttgattacttaagcaaaaaccagatgaaatgatggtagcaaacacaaaaagaaccaacaacaaaacaaaatcgaaaaacaaaacacaaaatagttgtacattttatattgtatttaatttaatttaatttttataaaaacaaaatcgacaaactaagagaaacaaacaaaaaagcgaaagaaaacaaaaacaaaaaaatgggaaaacagatcgagaaactttcagaataaagagcaaaaatattggtgatattttaaatgcttaaacacaaattgagaaataagcgaatcaaatgagaaaacaacaaaaagcgaagaccacaaagcatagtgaaagggaagaacttttaaaaaaaaaaaagcgacataaatttgagaatg

SEQ ID NO: 17855 - DNA, 4785 bp, DROSOPHILA
atggatgcgggcggcctaccagttttccagagcgccagccaagcagccgccgtcgcccagcagcagcaacagcagcagcagcagcagcaacaacatttgaatctccagttgcatcagcaacacttgggcctccatctgcagcagcaacagcagctgcaactgcaacaacagcagcacaatgcccaggcgcagcagcagcagatccaagttcagcagcagcagcagcaacagcaacaacagcagcagcagcaacactcgccctacaatgcaaacctgggagcaacaggcggcattgctggaatcactggcggcaacggagctggcggccctacaaatccaggagcggtacccaccgctccgggcgacactatgcccaccaagcggatgccggtcgtcgatcggctgcgacgccgcatggagaactaccgccgcaggcagacggattgcgtgccacgctatgagcaggccttcaataccgtctgcgagcagcagaaccaggagaccaccgtcctccagaagcgcttcctcgagagcaagaacaagcgggcggccaagaagaccgacaagaagctgcccgatccctcgcagcagcatcagcagcagcagcaccaacagcagcagcagcatcagcagcaccagcaacaccagcaggcccagaccatgttagccggacagctgcagagcagtgttcatgtgcaacaaaaattcctgaaacgacccgcggaggatgttgacaatggccctgacagctttgaaccgccgcacaagttgcctaataataacaacaatagcaatagcaacaacaacaacggcaatgcgaatgccaacaacggcggcaatggctccaataccggcaacaacacgaacaacaatggcaacagcaccaacaacaacggcggcagcaacaacaacggctctgagaatctaaccaaattctcggtggaaattgttcagcaactggagtttaccacatcggcggccaattcgcaaccgcaacagattagcactaatgtcactgtaaaggcgctgaccaacacatcggtgaagagtgaaccaggtgtgggcggtggcggagggggcggcggtggaggcggtagcggtaacaacaacaataacggaggcgggggaggcggcggaaacggtaataacaacaacaacggaggtgatcatcaccagcaacagcaccagcagcagcagcaacaacaaggcggcggactgggtggcctcgggaataatggaaggggcgggggacccggcggcatggcgacgggtcccgggggcgtggccggtggacttggcggcatgggcatgccacccaacatgatgtccgcccaacagaagtcggccctcggcaatctggccaatttggtggagtgcaaacgggaaccggatcacgattttcccgatctcggctcattggacaaggatggcggtggcggacagtttcccggctttcccgatctactcggggatgataactcggagaacaacgacacgttcaaggatctcatcaacaacctgcaggacttcaatcccagtttcctcgatggcttcgatgagaaaccgctgctggacataaagacggaggatggcatcaaggtggagccgcccaatgcccaggatttgatcaatagcctgaatgtgaagtccgagggcggtttgggtcatggtttcggtggctttggcctgggtctggacaatccgggcatgaagatgcgtggcggcaatcctggcaaccaaggtggctttcccaacggtccgaatggcgggacaggtggtgctcccaatgctggtggtaatggtggaaactctggtaatctcatgtccgaacatccgttggctgctcagacactcaagcaaatggccgagcagcatcagcacaagaatgccatgggcggcatgggtggattcccacgaccgccgcacggcatgaatccgcagcaacagcagcagcagcaacaacagcagcaacagcaacaggcccagcagcaacatggtcagatgatgggacaaggacagccgggtcgctataacgactacggcggcggctttcccaatgactttggcctgggacccaatggtccgcagcagcagcagcaggcgcagcaacagcagccgcagcagcaacacctgccgccgcagttccatcagcaaaagggtcctggcccaggagccggcatgaatgtgcagcagaatttcctggacatcaagcaggagctcttctattcctctcaaaacgatttcgatctcaagcgtctgcagcagcagcaggccatgcaacagcagcagcagcagcaacaccatcaacaacaacagcagcagcagcagcccaaaatgggtggtgttcccaatttcaacaaacaacagcagcagcaacaggtgccgcagcagcaactgcagcagcagcagcagcagcagcagcaacaacagcaacagcagcagcagcagtactcacccttcagcaaccagaaccccaatgcggcggccaacttcctcaattgtccgccaaggggcggtccaaatggcaaccagcagccgggcaatctggcgcagcagcaacagcaacccggggctggaccgcagcagcaacagcagcgcggcaacgccgccaatgggcagcagaacaatccgaatgccggacccggcggcaacaccccaaatgcgccgcagcagcagcagcaacaatcgaccaccacaacgctgcagatgaagcagacgcagcagttgcacattagccagcagggtggcggtgcccatggtattcaggtgtcggctggtcagcatctgcatttgagtggcgacatgaagagcaacgtctcggtggccgcccagcaaggtgtcttcttcagtcagcagcaggcgcaacagcaacagcagcagcaacagcctggcggcaccaacggaccgaatccccagcagcagcagcaacagccgcatggcggcaacgctggcggtggagtaggcgttggcgtgggcgtgggtgtgggcaacggaggtcctaatcccggacagcagcagcagcaaccaaatcaaaacatgagcaatgcaaatgttccctccgatggcttctcgctctcccagagccaaagcatgaactttaaccagcagcagcagcaacaggcggccgcccagcagcagcaggtgcagcccaatatgcgccagcgtcagacgcaagcgcaggcagcggctgcagcagcggcagcagcggcgcaggcgcaggcggcagccaatgccagcggaccgaatgtgccgctcatgcagcagccgcaggttggagtgggcgtaggcgtcggcgtgggcgtgggcgtgggtgtgggcaatggtggcgtggtcggtggacccggttccggtggacccaacaacggtgcaatgaatcagatgggcggacccatgggcggcatgccgggcatgcagatgggtggacccatgaacccgatgcaaatgaaccctaacgcggccggtccaaccgcccagcagatgatgatgggcagcggcgctggcggaccgggtcaggttccgggacctggccaaggaccaaatccgaatcaagccaagttcctgcagcagcagcagatgatgcgcgcccaggcgatgcagcaacagcagcagcacatgtctggagcacgaccaccaccgcccgagtacaatgccaccaaggcgcagttgatgcaggcgcagatgatgcagcaaacggtgggcggcggtggtgtcggcgtcggaggtgtgggcgtaggcgtgggcgtgggaggggtcggtggtgccaacggtggccgctttccgaacagcgctgcccaggcggcggccatgcggcgcatgacccagcagcccataccgccatccggtccgatgatgcgaccacagcatgcgatgtacatgcagcaacatggaggagcaggcggtggcccaaggaccggtatgggtgtgccctatggtggcggagcaggcggtccaatgggcggtccgcagcagcagcagaggccgcctaatgtccaggttacgcccgatggcatgcccatgggttcgcagcaggagtggcggcacatgatgatgacacagcagcagacgcaaatgggcttcggtggaccaggaccaggtggacccatgcgccagggacccggtggatttaatggaggcaactttatgcccaatggagcacccaatggtgcagcgggcagtggacccaacgctggcggcatgatgtccggccccaatgtgccgcaaatgcagctgaccccagcgcagatgcaacagcaactgatgcgccaacagcagcagcaacagcagcagcagcagcagcacatgggacctggtgccgccaataacatgcagatgcagcaactgctgcagcagcagcaatccggaggcggtggcaacatgatggccagccagatgcagatgaccagcatgcacatgacccagacccagcagcagatcaccatgcagcagcagcagcagttcgtgcagagcaccaccacgaccacgcaccagcagcagcagatgatgcaaatgggtccagggggcggtggtggtggcggcgggccgggatcggccaacaacaacaatggtggcggcggtggcggagcagcgggcggaggcaactccgcatcgaccattgccagtgccagttccattagccagacgatcaactcggtggtggccaactcgaatgatttcggtctcgaattcttggacaacctgcccgtggacagtaacttctccacgcaggatctgatcaactccctcgacaacgacaacttcaatctgcaggacttcaatatgccgtag

SEQ ID NO: 17856 - protein, 1594 aa, DROSOPHILA
MDAGGLPVFQSASQAAAVAQQQQQQQQQQQQHLNLQLHQQHLGLHLQQQQQLQLQQQQHNAQAQQQQIQVQQQQQQQQQQQQQQHSPYNANLGATGGIAGITGGNGAGGPTNPGAVPTAPGDTMPTKRMPVVDRLRRRMENYRRRQTDCVPRYEQAFNTVCEQQNQETTVLQKRFLESKNKRAAKKTDKKLPDPSQQHQQQQHQQQQQHQQHQQHQQAQTMLAGQLQSSVHVQQKFLKRPAEDVDNGPDSFEPPHKLPNNNNNSNSNNNNGNANANNGGNGSNTGNNTNNNGNSTNNNGGSNNNGSENLTKFSVEIVQQLEFTTSAANSQPQQISTNVTVKALTNTSVKSEPGVGGGGGGGGGGGSGNNNNNGGGGGGGNGNNNNNGGDHHQQQHQQQQQQQGGGLGGLGNNGRGGGPGGMATGPGGVAGGLGGMGMPPNMMSAQQKSALGNLANLVECKREPDHDFPDLGSLDKDGGGGQFPGFPDLLGDDNSENNDTFKDLINNLQDFNPSFLDGFDEKPLLDIKTEDGIKVEPPNAQDLINSLNVKSEGGLGHGFGGFGLGLDNPGMKMRGGNPGNQGGFPNGPNGGTGGAPNAGGNGGNSGNLMSEHPLAAQTLKQMAEQHQHKNAMGGMGGFPRPPHGMNPQQQQQQQQQQQQQQAQQQHGQMMGQGQPGRYNDYGGGFPNDFGLGPNGPQQQQQAQQQQPQQQHLPPQFHQQKGPGPGAGMNVQQNFLDIKQELFYSSQNDFDLKRLQQQQAMQQQQQQQHHQQQQQQQQPKMGGVPNFNKQQQQQQVPQQQLQQQQQQQQQQQQQQQQQYSPFSNQNPNAAANFLNCPPRGGPNGNQQPGNLAQQQQQPGAGPQQQQQRGNAANGQQNNPNAGPGGNTPNAPQQQQQQSTTTTLQMKQTQQLHISQQGGGAHGIQVSAGQHLHLSGDMKSNVSVAAQQGVFFSQQQAQQQQQQQQPGGTNGPNPQQQQQQPHGGNAGGGVGVGVGVGVGNGGPNPGQQQQQPNQNMSNANVPSDGFSLSQSQSMNFNQQQQQQAAAQQQQVQPNMRQRQTQAQAAAAAAAAAAQAQAAANASGPNVPLMQQPQVGVGVGVGVGVGVGVGNGGVVGGPGSGGPNNGAMNQMGGPMGGMPGMQMGGPMNPMQMNPNAAGPTAQQMMMGSGAGGPGQVPGPGQGPNPNQAKFLQQQQMMRAQAMQQQQQHMSGARPPPPEYNATKAQLMQAQMMQQTVGGGGVGVGGVGVGVGVGGVGGANGGRFPNSAAQAAAMRRMTQQPIPPSGPMMRPQHAMYMQQHGGAGGGPRTGMGVPYGGGAGGPMGGPQQQQRPPNVQVTPDGMPMGSQQEWRHMMMTQQQTQMGFGGPGPGGPMRQGPGGFNGGNFMPNGAPNGAAGSGPNAGGMMSGPNVPQMQLTPAQMQQQLMRQQQQQQQQQQQHMGPGAANNMQMQQLLQQQQSGGGGNMMASQMQMTSMHMTQTQQQITMQQQQQFVQSTTTTTHQQQQMMQMGPGGGGGGGGPGSANNNNGGGGGGAAGGGNSASTIASASSISQTINSVVANSNDFGLEFLDNLPVDSNFSTQDLINSLDNDNFNLQDFNMP

SEQ ID NO: 17857 - DNA, 3842 bp, DROSOPHILA
atcccagcaaggtgagttcggaagtccatttgagttggaaaacagatactataacaatttatttccatttttagcccatgatgggtcagtggcagatcgtgttcttcatcgctgcctttgtgtacatcatttgcggtaccttctacaacatcttcggatccggtgagcgtcagtactgggacaatccggaggacgatgagcagaagccggccctccagacgaccgtcaccacctccccagcgaggctgagcaacggcagcacggcaccagcggccatctcgagttcctaggactccaaatggaagtagtattagccgtagtcgtgcgtcattaaccattaatccgtacactatacgatatgcgtagcttagtccttgttttagtctaattatttgataagccaaaagttgttaatattgatagttagcctttgatttattcctacatctgcataaataccgctaaaaagacactaatcttccaattgtaaataaattgggaactgaaaccgaaaccacaccaagtcgagcacaaaacgtcaactttagttagtgaaatcgaggtctaccattgcaaatgtgtagttttcttattttattgtgatagcgaaagagtttacttctctcactgatttgttttgaaattaaatgaaccgctcaagcgaacattgttaagcaaacaaccaaatgtatgaaaaccattaaaaactactagtttaagaaacaaaaaacatttaaacatttattggaagagggcagaaaaaggaccaattacgtgtattgggaatgaatgttgcttaaagaagttgtttaaagaataaccaataatcatattctcttaaagccaacaataagctttcctaacaacgttggttactctttcacccttgatggctaattcgtaaataataagcagttgtcaggatatcaagtgcaaccatctcctctatcagctacttaaatgctagcactaaagcagaaggatttagttagcagttacaatgggccatcaggaggagctgaagccggagcaagtggatctgaaagtaaccccctttgtgggctatctgcgacgcacatggagtgacttctgtgccaccagcagtatccatggattgaaatacactcgtgacgaggatacgaataagattgtgcacctggtgtggctcttaatatcggtggtgatgttcatttgtgctgttgttatggcgcgcaccttctacatggactatcgcagcagtccgacgcgtatgaatgtggaaagtgataacacaccggttaatagactctatttcccacctgtcacaatttgtccagatgtactcttcaacatgcaaaagtccgaggcctttctgaacactctgtaagtgtatgttatttaaaggtctgtacaaggatgtgccacttgatttattcctccagtcgacttccaaaaggagccgagctgaggggcattctacgcaaacttcacattttctacggttttatgctagatgatgagcgctattcggcggaggacatcgagcaaatggaagcccttctattcctaaataatctcacaattccggaatttgtagaacacttacgctggaattgtgacgaaattctgtatcgctgtaggtttaatggtgaaataatggattgttccaagatatttcagctttccaagacgtttttcggtcattgctgttcattcaatttgagacaaaaagggtgggtaaataacaaactaaataatttagagagttttaaagttttccatttgaacagtttgaacttcaccgcccaacgagcaataggtggccttagatatggcctgtcagtggttgtacggtataaagacgacaactacgatccattgcaatcgtattcgtatggcgtaaagttattgatccaagaagcagatgcctttcccagtgcccattctgctgcaaaatttatagccttcaattcggagacatttgctgcagttagacctcaagaaacgttttgctcttctgctgtgaaagctttaatcatcgaagagagaaattgcgtttttcaaaatgagtttcccatgcgttacttttccgattatgtataccctaactgcgagctaaattgtagagtaacgaatatggtcaagttctgcggttgtcacacgtacttttttgattttaatcgcactagcgatcggatttgtacatttcgagatattccttgtctagtggataattttggtaggttattattgatttgctcaaaatatagcgattttaatagattgctttcagccaatataattacaagaaagaaaagtacccagtgctactgtccgctaacctgtgaacacattgattacgacgtacagttgacgaattttcccctggaactgaatatgccggtggccgataagttctagtaaatataataaaagaaatgctggtgaagcatttattaacagttattaacaactttttatttcagttcgggcttagccaaaaacgatggtgtattgcatgtctttatcaattcgtttagctaccgccgattgcgacgtgacttgctttccaatatggttactttggtgtgtaagttgattaaaatactcctttatgaatttgtattaaaaatgtcaattttcagctaatctaggcagcgccttcagtctttttgtgggcatgagcatgctttcggtggtagaaattatctactatttttcagtaattttacgcaagaactacaaactggaatgcgaaactcgcagtcagatgcttcacaagaagccgaagttcgcgtggcccaaagctaatgacactcacagtaaagagcagaaatcagttttcataattcacaaatcgtaatcagcacgatgggcgaatgcaaaaaaatattgccataaattagagcaataaaatcgattttaagctgactataaggtccgaatgaactttgatatactcttttggaggcggttcttgttttctttaggaagaaatacatatacttttattgtgttgtcttgaagaactaacatttaaacttagattcgaattcgattatgtgatgtgattgtaacacaagctttaaatcctatgcaagttacaatgtttatgcggttatcttttacgggactaaaccaagcagccgcctggtaggaaaatccaagatacccgcgagttgcaaatatctatcctactatcgcatattgccataggtcagccaatggacattgtaaatctgcccccaatctgggggcgaccatctggtggtcgtaaattggacccaagcgaagcaaatccgcgataagattgtccgtggggtataaaaaggggaaattgctatgaagattactcacagtatatacggtcatgttcaagttcgctttgaccctgacgctctgcttggcgggcagcctttcgctggcccagcacaatccccattggtggggcaatcgcaacaccatcgtccacttgttcgagtggaagtggtcggacattgcccaggagtgtgagagttttctcggacctcgaggattcgccggcgttcaagtgagccccgttaatgagaacatcttatcggcgggtcgtccgtggtgggagcgatatcaacccatctcgtacaagctgaccactcggtctggtaatgaggaggaatttggtgacatggtccgtcgttgcaacgatgtgggtgttcgtatctatgtggatgtgctgttgaaccacatgtccggagattttgacggtgtggctgtgggcactgctggaacagaggcggaacccagtaagaaatccttcccaggagttccatacaccgcacaggacttccatcccacctgcgagattaccgactggaacgatcgct

SEQ ID NO: 17858 - DNA, 1551 bp, DROSOPHILA
atgggccatcaggaggagctgaagccggagcaagtggatctgaaagtaaccccctttgtgggctatctgcgacgcacatggagtgacttctgtgccaccagcagtatccatggattgaaatacactcgtgacgaggatacgaataagattgtgcacctggtgtggctcttaatatcggtggtgatgttcatttgtgctgttgttatggcgcgcaccttctacatggactatcgcagcagtccgacgcgtatgaatgtggaaagtgataacacaccggttaatagactctatttcccacctgtcacaatttgtccagatgtactcttcaacatgcaaaagtccgaggcctttctgaacactcttcgacttccaaaaggagccgagctgaggggcattctacgcaaacttcacattttctacggttttatgctagatgatgagcgctattcggcggaggacatcgagcaaatggaagcccttctattcctaaataatctcacaattccggaatttgtagaacacttacgctggaattgtgacgaaattctgtatcgctgtaggtttaatggtgaaataatggattgttccaagatatttcagctttccaagacgtttttcggtcattgctgttcattcaatttgagacaaaaaggtttgaacttcaccgcccaacgagcaataggtggccttagatatggcctgtcagtggttgtacggtataaagacgacaactacgatccattgcaatcgtattcgtatggcgtaaagttattgatccaagaagcagatgcctttcccagtgcccattctgctgcaaaatttatagccttcaattcggagacatttgctgcagttagacctcaagaaacgttttgctcttctgctgtgaaagctttaatcatcgaagagagaaattgcgtttttcaaaatgagtttcccatgcgttacttttccgattatgtataccctaactgcgagctaaattgtagagtaacgaatatggtcaagttctgcggttgtcacacgtacttttttgattttaatcgcactagcgatcggatttgtacatttcgagatattccttgtctagtggataattttgccaatataattacaagaaagaaaagtacccagtgctactgtccgctaacctgtgaacacattgattacgacgtacagttgacgaattttcccctggaactgaatatgccggtggccgataagttctattcgggcttagccaaaaacgatggtgtattgcatgtctttatcaattcgtttagctaccgccgattgcgacgtgacttgctttccaatatggttactttggtgtctaatctaggcagcgccttcagtctttttgtgggcatgagcatgctttcggtggtagaaattatctactatttttcagtaattttacgcaagaactacaaactggaatgcgaaactcgcagtcagatgcttcacaagaagccgaagttcgcgtggcccaaagctaatgacactcacagtaaagagcagaaatcagttttcataattcacaaatcgtaa

SEQ ID NO: 17859 - protein, 516 aa, DROSOPHILA
MGHQEELKPEQVDLKVTPFVGYLRRTWSDFCATSSIHGLKYTRDEDTNKIVHLVWLLISVVMFICAVVMARTFYMDYRSSPTRMNVESDNTPVNRLYFPPVTICPDVLFNMQKSEAFLNTLRLPKGAELRGILRKLHIFYGFMLDDERYSAEDIEQMEALLFLNNLTIPEFVEHLRWNCDEILYRCRFNGEIMDCSKIFQLSKTFFGHCCSFNLRQKGLNFTAQRAIGGLRYGLSVVVRYKDDNYDPLQSYSYGVKLLIQEADAFPSAHSAAKFIAFNSETFAAVRPQETFCSSAVKALIIEERNCVFQNEFPMRYFSDYVYPNCELNCRVTNMVKFCGCHTYFFDFNRTSDRICTFRDIPCLVDNFANIITRKKSTQCYCPLTCEHIDYDVQLTNFPLELNMPVADKFYSGLAKNDGVLHVFINSFSYRRLRRDLLSNMVTLVSNLGSAFSLFVGMSMLSVVEIIYYFSVILRKNYKLECETRSQMLHKKPKFAWPKANDTHSKEQKSVFIIHKS

SEQ ID NO: 17860 - DNA, 4580 bp, DROSOPHILA
cgctggtaaatataaacagaaaatagctctggggatagttacaatataactagatgatcgtttcgataattttaataattttttttcccgggttagatcttgtctttttcctaaacgctacgagtattggttgtccgcttgaagtataatacttggacagagcttcttcgcttgttttgctggttgatcaactttgaacttagtcgctaaacacattgtatgccaaaacaattgcgttcgagttaacaattcaagtcaaaagtgaaccgagtgggtacttatagcttaggtatacacttaattcgtactaaggcatgttatatatgttgggctcgaaacaacaacatcaactgttgtgtaattcataatatcgcaagtggtttatacaaagtcattttagttcaaataaataaagaggcagcagaaacttaattaatgcgaacagtaacattaaagtaacgtaacgtaaacgtaaagccaactgaacagtatcccgccctaggtgattgggtttcggatttggggtttgtggatcacgctgaactgcagaatccacactactcggcatccagcgagaagcaaggcagtccggccagcgccggatgtgtggattgctgggaggagcggtgtcgctgcggcattggctgaccattctcgcggtacgtcttcagtttcgtctccatcgcctaaaaaaaaaacacaaaacgagagcggattaagcaacagtcagtgaactatatgaaaaattaactatagaaggatttgggcacatcatataataaataaattaatgaaaatttcatttcgcaacggtttgcccagtgcagagtttagtcagcaagccaagttattatgcgctttcgaaactgaataaatcataacgaacaaaaacaaagaacataaaataaggtacaaataaattttgtatttattaaccaatgcaattaataaatgcaagcggagggcaactaaaattagccttaaagttccgagcgcattgtcagagcggcaggctggcgtccggcgagtttcgcatgcgctcggcgaagcgcctaaaaatgtttgagcccgcactgaggcttccggcggagctgcaatcgctggtgggcgtggactgggcgctactggtggccactgagctgctgctgccgccaaaggcgcggcgaaaaagacttgcctcgctggccgatggcggcggcggcggctgcacacttgccgggcgctcacacatgcagcgaaacttttcgcactcgggacatagcagtgccttgtcccactaaaaacatagggaaaaacacataagccgatggtgggagtgaagggttcaaggatcatatgtacatacgaaacaatggatgaggtaggatggcatgctggacttatagtttgcggagggacttacgtttagttttcttaacatgtcggccacaatgttgagcgccgttgtgcgggagctggggttcatggaattgccattgatttgattctcgggatctgcaagaggaagcacacgtacacagcatgttagtcgagaggttagttaggtcaactactagctacagacgcaaacacaaatcgtacaaaaatcgcctacaagaaatgttgcaaactctttcgtcacatttgggctcttaattttaataatttacaatacaattacaaattatgaggaacttaagcgggctacattttttggttaacaagtaaaaaagaaacaaatggaaaaacaatactaaatgcatggcttgaacgtttggcgattcgtcttggacagttttagcgcgcgtctggttttctttagggaacttagtatcttactcttaagcgaatgctgctggttatattcgtttctattaactaaactgccattgagggcgttgacgctgacgctggtggctcttgtggcgacagcattgtcgtgttttaccaattcgccattggcaacaataccatttggcagcgaggcggacgagttcatcgagctgttgaccgtatttgtgtcgtttgccgtgggaacgctcgttccattgaccactggggtaaagcgtgacttgacgttcagctcttgtttgagatctgcaatagatttgatgaattagttttaaagtctgtgctggacatctggtatagatgcatccacctctcgtctcatccattaatcgctgtagtttttcctgcagcaatcccttttcatccacttccagctccagaagggcgttcttctcgtaggcctgatccagcatcttctcgaaattctctatgctttcgttaagtatgcgatgggcacgttccaaatcgtcgtttttctgctccagctgccgcaggtacaccttcatggtgtcgcgatccttcttcaccgtttccagctgtttctccatgtttgacatatcgatgccatgcgattccaacttgagctgagaatgaaatagttgtaaagactaatcttgtcgggagctcaaagccacatatacgcaaactgagtctaagaattaagctcagtttgtgtaaatcgggcttagcttatagctaccttgagagactcgttttcccgctcaaacattgtgagtttggctgtgagatctttgattatactctgcttctggtccagagtggcgtccatttctatttccatttcgcgggactgctccacaaactcgtcgtactcctgtttcacgtctgtccacctgaaaattaaaagtaaaactaggctatatggctgatttcggagactgtaatagggatgggcacttactctttgtggtactgcttagatcgttccttccaatatctgcactcatcttccacactattgaacatcgggggcgactccatttctgcaaattttccttagctgctaactcctttttctggtttttgtgtactaatcggcggtcaaaatgggtttgtaatttcgttcgttcgaattgatttaacttttaatttctgaacaatgctatgtactacggttggtctattactgtttgggttatttattcgtgttttttggctgctttgtttttaattgctgtgattaaaatgccaaaacacagttgttgttcaagtcgtagttttactttttttttgttttgtgtgttgggggtggtgaatagactagaagtcggcgaagaaaagtgaaaaatcaattaggaacaggtgtttgccctgaattttgtagttactgttgctgttgttcttgttcgatgccctaaaagggcagtcggttttgtccatatcaaatgtaaataaaatcaaattaaacaaaactcatttttgtgacgcagctgctgcggcaacaacaacgaaaacaacgaggatgatggtgatgagcagcagcaacaacaacaacaacaaatagctacgacgaagtttcccatacaacaacgcactgcatggaaatgaaatcatcggtgattttttcgtagaattccagtgtttatacctagaattttatacagcacgactgtccacatttactacttacactttgcacttaattttgctacgttttgtttgttttatttacataaaatcagtgtaaatagttatgctcgtaaaaatttaccactactccaaaaacgcacaagccaaccctggcttgggttgccagtgttggccaatagatgggcatttgccgtttccagccctggtcaacagttgttatttgaaatttaatcaacatataaagttttactcggcttttttttgcgtttacgtagttttcttatatattccaaatcatatttctctaatggacgtgctgtgaacgttatcgatttgttggccggcgcatcgttgctggtatcgtccgaaatatgaaactcagagtcggaactatcttcaattatttgagctgagcttagtgttaaatcacgagtggagctgggagtttgtggcagtgctgcaacattttcgccaactacgcgcatgggcagcgcatgataatgatatgatacatttcgacaggatttgcggcgtagtttgtgttttctgcttgtttcaaagtcacttgaacttgtggacgtgttatcgtccccactatttgagccttccccgcttacagaatccttattgtcaattttattggagtttttcgtgattttagacatatttgttttaagccgcgctggattgttttggttccaaaaatgaacaatttttcgctgatctgtttctggttctttaccaagtacaacgatgtggcaactccctggcagggccgcaactgaaaaatctcaaacgggacatcgttgccagatagctagccagagtgtggccagatcgcagcgactgcagtgcattttcaacaaaaataaggtaaaatatagcacaattatggccagcaattgttaaacaattaacgcaattgccagtattataaccaaatgtcaactgtgtgagtgcgacaatcgagctcgcgtgggcgttgcacatgcagcatcatcgaattgattaattgcggcgcatgccgaaaagtgaaaaaagggaggatgtgtttcaatcaacgcgagtgaaaaccgcgacgaacgaagaaaaaaaaaaccaaactactgcggcaatcgtgaacaaagagctcgttgcgt

SEQ ID NO: 17861 - DNA, 1512 bp, DROSOPHILA
tgcgtttttggagtagtggtaaatttttacgagcataactatttacactgattttatgtaaataaaacaaacaaaacgtagcaaaattaagtgcaaagttctattcaccacccccaacacacaaaacaaaaaaaaagtaaaactacgacttgaacaacaactgtgttttggcattttaatcacagcaattaaaaacaaagcagccaaaaaacacgaataaataacccaaacagtaatagaccaaccgtagtacatagcattgttcagaaattaaaagttaaatcaattcgaacgaacgaaattacaaacccattttgaccgccgattagtacacaaaaaccagaaaaaggagttagcagctaaggaaaatttgcagaaatggagtcgcccccgatgttcaatagtgtggaagatgagtgcagatattggaaggaacgatctaagcagtaccacaaagagtggacagacgtgaaacaggagtacgacgagtttgtggagcagtcccgcgaaatggaaatagaaatggacgccactctggaccagaagcagagtataatcaaagatctcacagccaaactcacaatgtttgagcgggaaaacgagtctctcaagctcaagttggaatcgcatggcatcgatatgtcaaacatggagaaacagctggaaacggtgaagaaggatcgcgacaccatgaaggtgtacctgcggcagctggagcagaaaaacgacgatttggaacgtgcccatcgcatacttaacgaaagcatagagaatttcgagaagatgctggatcaggcctacgagaagaacgcccttctggagctggaagtggatgaaaagggattgctgcaggaaaaactacagcgattaatggatgagacgagagatctcaaacaagagctgaacgtcaagtcacgctttaccccagtggtcaatggaacgagcgttcccacggcaaacgacacaaatacggtcaacagctcgatgaactcgtccgcctcgctgccaaatggtattgttgccaatggcgaattggtaaaacacgacaatgctgtcgccacaagagccaccagcgtcagcgtcaacgccctcaatggcagtttagttaatagaaacgaatataaccagcagcattcgcttaagaatcccgagaatcaaatcaatggcaattccatgaaccccagctcccgcacaacggcgctcaacattgtggccgacatgttaagaaaactaaactgggacaaggcactgctatgtcccgagtgcgaaaagtttcgctgcatgtgtgagcgcccggcaagtgtgcagccgccgccgccgccatcggccagcgaggcaagtctttttcgccgcgcctttggcggcagcagcagctcagtggccaccagtagcgcccagtccacgcccaccagcgattgcagctccgccggaagcctcagtgcgggctcaaacatttttaggcgcttcgccgagcgcatgcgaaactcgccggacgccagcctgccgctctga

SEQ ID NO: 17862 - protein, 377 aa, DROSOPHILA
MESPPMFNSVEDECRYWKERSKQYHKEWTDVKQEYDEFVEQSREMEIEMDATLDQKQSIIKDLTAKLTMFERENESLKLKLESHGIDMSNMEKQLETVKKDRDTMKVYLRQLEQKNDDLERAHRILNESIENFEKMLDQAYEKNALLELEVDEKGLLQEKLQRLMDETRDLKQELNVKSRFTPVVNGTSVPTANDTNTVNSSMNSSASLPNGIVANGELVKHDNAVATRATSVSVNALNGSLVNRNEYNQQHSLKNPENQINGNSMNPSSRTTALNIVADMLRKLNWDKALLCPECEKFRCMCERPASVQPPPPPSASEASLFRRAFGGSSSSVATSSAQSTPTSDCSSAGSLSAGSNIFRRFAERMRNSPDASLPL

SEQ ID NO: 17863 - DNA, 3516 bp, DROSOPHILA
cggtgacccgaagatcaccaccaggaggtcgcagtgctgttcgccacgcacgcagacgcgctcgtaggtgcgcaggaagcgctcgaatgtacccaaacgaccggcgatgggcaggacgaacacgatcttgtcctgcgtcggtgacagcagtccactcggcatcgtgaagtggctgctcaagcgggccattccgttctggaacaggctgcccaggagacctgtcgtcgaaaaagggcagtaacaaaatccatgtaagttatctctccaagatgttaatggcccacatgggtatagatatctgaaatagaacataatactcactttgctgcagggtgacattgtagaagtcctcgtccacctccttgacaaagatgcccgtaaaggcgcgctgaacataaagatgccttcgcaccggaacggtcatcttcttgccccggtacttcttgtagatgagcagcagatcgaggatcatgtcctggccgtggagggcgtccagccgatggtatccgtagagcagttcccggaactcgatgacgcgaccccgttgcctggaatagttgttgatgttctccatcacctcggtgatggcatcctccagtccctcgcgcatcgccgagtcgatcttctgcttgggattggcggaacttgccgagtacaggctgcgggcgatgaaggaccagtccagcaggtcgtcggtgcttgcgggcacgaatttattcagttccggactgattcctgtggatgaaagtgaagagaatgggattagtgaacggagtctccgacttatgaaggcaatctacgtgttatgcatatcattcacttggaactgggccaatgcaaatgtgctctaatggaaacacgccccaccaggtggtgcttgttaattttccggtggcttggcttgatactccccaacggagttggcctttaaaacgaaagtctgacggcggcgacagtcagatcggattcggttttccccggccaaaaatcccgagtcaagatgttgctccaattgaggcgattggcgatcctgttcctgctccacgctctcatccccatccttgcgctatctgttcccatggtggagcaagtgcagccggcggacgagctgctatcgtcgcattggctaagacaggcgcagtctcagttgcgcgaacgtctggccagaaccaaggactccatcgccgacgtccgacaggccaagaatgtggtgatgctcctgggcgatggactgtccatcaccaccttaacggccgctcgcatcctaaaggggcaacgtcgcggcggacgcggagaggatgcacagctggccgtggaacaattccccttcagcggactgagcaagacatactgcatcgacgagcagacaccggactccgcctgcacggccaccgcctatttcggcggtgtgaagacgcacagcggcacagtgggtcagagtggcagtggtgagcgcgtggactccgtactccagtgggcacagcgagcgggcaaggccacgggagtggtgaccaccacccgtttgacggacgccagtccggctggtgcctacgcccatgtgagcaggcgtggcgaggagctggagattgcgcgacagctggtggaggaggagccgggacggaatcttaatgtcatcctgggcggtggtctgggaaaatttgccgatgagcgacgggatggaaaggatctgctggctcagtggcgtgaatcgaatcccaatggctgcttctcgcgatccctgaaagagctgaggaactgcaccgatgctaccggtacactgctgggtatcttcagcgacagccacatgtcatatcacttggccgccagcaaggagctgccgcgactctgcgacatggcagcggcggccattgaaaaactggagagaaagtctcaggaggatgggaatggttacttcgtgttcattgagggcggacggattgatcatggacaccacgaaacccgggtgggctacgccctcgatgagatggtcgagttcgatgcggctgtggagacggtgatccagatgaccgatccgcgcgatactctggtagtggtcaccgccgatcattcgcatacgcttagcatgtcgggatacgcgaagcggggcacacccatcctgggcatggatgcacagcagcgggatgtgaacggggtgccatacagcaccctcaactatgccatcggcaagtggcagagtctggacaaggatggacgtcgggagagtcccagcaagacattgagtcccagtaagtaatcgcgattgtaccgattgtagttgcttcgaataacccgtttttaatccttgaccagcatcctacacacccagctatattcatggaagaaagggcgtgcattctggcgaggatgtggtcgtgtttgcaatgggcccgcagtcgcatctgttcggtggcgtcatggagcagaatctgctgccccatataatgggctatgccgcctgtctgggcaatggcctcactctctgcaaccaggacaaggatgcggatatgattgcctgattttgcgaagtttttcggataaatttttgttttctgttctaaataaatgttcttgtagtgcatgccttactctgtacctttgtatctttgtaatattctaacttagtatctttccatctaactcatgtatctttcgatatatgtatctctttggccaagcatctagctaagtatctttaatctgtacaacccactcaatatattgtgatcctggaagtgcctctaactttgtatctgtttatctttgtagcttgctaagttagttagtatctttctatctaccttatgtatcttatgtatctttaaattgtgccacccacctaatatgttgtgatcctggaagtgccttttggtggaatcgctttcgggtgacacactgggcaacatgtaggtgctctcgtccggaacctccagatatttggccatccgcttgatatcccgatgcagcagcagcgactcctgacgcatctcctccgctttcaaaccctggacataggagtgcaggcggtacatgagcggcgcctgtttgatgggatgcagggtgatggcgttgtggatctccttgcgcttcagtttgcccgtgtacgcatttcgtccactggagttgtgccgcaaaatgtactgcatctggatatttgaaaaaaaggaaatgtttcatttaaaggcgagtattttaaagtacaaagaactatatatacttataacaatggatctaattggttgttctttgaatccaactattgggattgcccacctcgtagttccaagtgcagggtatgccggcgaacttctggacacaccgccccacctcgacgtcctcgtgggtgctgtagaggttcttcaggcagctgggtatgtgtggcgccacgcggcgcagagtctcactgctgaggatcacccccggtccgcccatgcagaagttctcgtcgaactcgagagacagcaggccgaactcctcgctattgcccttgcccgcctggccgatgaactgcggcttgga

SEQ ID NO: 17864 - DNA, 1452 bp, DROSOPHILA
atgttgctccaattgaggcgattggcgatcctgttcctgctccacgctctcatccccatccttgcgctatctgttcccatggtggagcaagtgcagccggcggacgagctgctatcgtcgcattggctaagacaggcgcagtctcagttgcgcgaacgtctggccagaaccaaggactccatcgccgacgtccgacaggccaagaatgtggtgatgctcctgggcgatggactgtccatcaccaccttaacggccgctcgcatcctaaaggggcaacgtcgcggcggacgcggagaggatgcacagctggccgtggaacaattccccttcagcggactgagcaagacatactgcatcgacgagcagacaccggactccgcctgcacggccaccgcctatttcggcggtgtgaagacgcacagcggcacagtgggtcagagtggcagtggtgagcgcgtggactccgtactccagtgggcacagcgagcgggcaaggccacgggagtggtgaccaccacccgtttgacggacgccagtccggctggtgcctacgcccatgtgagcaggcgtggcgaggagctggagattgcgcgacagctggtggaggaggagccgggacggaatcttaatgtcatcctgggcggtggtctgggaaaatttgccgatgagcgacgggatggaaaggatctgctggctcagtggcgtgaatcgaatcccaatggctgcttctcgcgatccctgaaagagctgaggaactgcaccgatgctaccggtacactgctgggtatcttcagcgacagccacatgtcatatcacttggccgccagcaaggagctgccgcgactctgcgacatggcagcggcggccattgaaaaactggagagaaagtctcaggaggatgggaatggttacttcgtgttcattgagggcggacggattgatcatggacaccacgaaacccgggtgggctacgccctcgatgagatggtcgagttcgatgcggctgtggagacggtgatccagatgaccgatccgcgcgatactctggtagtggtcaccgccgatcattcgcatacgcttagcatgtcgggatacgcgaagcggggcacacccatcctgggcatggatgcacagcagcgggatgtgaacggggtgccatacagcaccctcaactatgccatcggcaagtggcagagtctggacaaggatggacgtcgggagagtcccagcaagacattgagtcccacatcctacacacccagctatattcatggaagaaagggcgtgcattctggcgaggatgtggtcgtgtttgcaatgggcccgcagtcgcatctgttcggtggcgtcatggagcagaatctgctgccccatataatgggctatgccgcctgtctgggcaatggcctcactctctgcaaccaggacaaggatgcggatatgattgcctga

SEQ ID NO: 17865 - protein, 483 aa, DROSOPHILA
MLLQLRRLAILFLLHALIPILALSVPMVEQVQPADELLSSHWLRQAQSQLRERLARTKDSIADVRQAKNVVMLLGDGLSITTLTAARILKGQRRGGRGEDAQLAVEQFPFSGLSKTYCIDEQTPDSACTATAYFGGVKTHSGTVGQSGSGERVDSVLQWAQRAGKATGVVTTTRLTDASPAGAYAHVSRRGEELEIARQLVEEEPGRNLNVILGGGLGKFADERRDGKDLLAQWRESNPNGCFSRSLKELRNCTDATGTLLGIFSDSHMSYHLAASKELPRLCDMAAAAIEKLERKSQEDGNGYFVFIEGGRIDHGHHETRVGYALDEMVEFDAAVETVIQMTDPRDTLVVVTADHSHTLSMSGYAKRGTPILGMDAQQRDVNGVPYSTLNYAIGKWQSLDKDGRRESPSKTLSPTSYTPSYIHGRKGVHSGEDVVVFAMGPQSHLFGGVMEQNLLPHIMGYAACLGNGLTLCNQDKDADMIA

SEQ ID NO: 17866 - DNA, 6483 bp, DROSOPHILA
tttaaaagaaaccccattcaaccatttgcaattgcagatccgagaacgataccgatacgcaaccgaacatcgtacgctctcctgccggagctatcatcccaatgcctcgccctttggtcaagctctgttcagactgttagtcaagcgattcggtgatcccgctatcatctggcagaacaaaggcgaccaagtggcgatcaatatactccgtcaggtggtcatcgatgcgccgtatgccacggagaatatccgatacctcgattggaatcccaagctggcgatatgcgtccaagaggtcgttcaaaacttttgcagtaaacaattctagaacgatggcccgtgcccatggcaacagttgtctagatagcatccgattctctgtacgttttgtttatcaacaaaacaattcaaaatacacatacatatagccatgacacccacacagaatactgctctttatctgccaggggaaaccattctcgtttgtacaaattcgatttaatacactacaccacaacacccaacacacataatacacgatggccgatgatgaagataaaccaaagaagcacacgctggacagcctgttcttggtgtattccaacttccaggtatgatgaatgacccggttaattgaagagtaattttcatctaaatgatgccaggtcatacccaccgacatcgagaacgagtactttgacagcatactcctctcgcagttggacgcctggctagagcaggccaagctcatgcccaatcccataactcgaactcagaccggtttaatatacatgcgatacaagtgagtaactacatcaaatctacatatcattcttaatcaaatacatgtttcaggaaatggcgtttggagtacgaagactttctcgaggtcctaaataacttggcatccgataacaatctggctatagatgaaatgaagcaaataatgatcgatgctggcgtcccgaatggtgctgatgtagttatagtcgtcaagtagattgaatcatcactgcattttatttatatgcatacaaaaagtcggacaacaaattattaatagtaacaattgcatacaagagtaactttgattaattcacaaaaattatagtaaaatataaaagcatccaacaaaaagagcctctaaacccgattggttaatttcagttagttaaacacttattttgacatagagggtgcctaattaaggtatgttttgagattactgatctgaaaactaaatacaaaatatatgcgtattacattttttgatgtgattcaataaattgactgatattctgaaattctgcttaagcttataaatattcgatgagttggttggcttgttcgcttcgcgttactttcctgataataataacaacgtttgtttgggtaacagagtttggctggacttatttctagcacctgggcaaatatgtggactgctcggagctaacgatgttacaaaaatacatgcttattcattccgtatatctaataaatattgtcgatgcgttctaatggctttccgagcgtctcatagcgattgtaaggtaataatgcactgtttgtactagtaaatttccggctcttgacgaggtgcatggagtggatttgctattgatgcttgctcttagtcatccctccagttgcgcagcatggtaaaaaaaaatctatagcgttaattttttgaattgtgtatgcgggatttatactgtttaccgtgcatactcgtagcaacctcgtgccgttccaaggccactccaatttcgccacatgatttgtatttccggatatggtcatatagataagattctcttgttggctcagtgagtgtatctctttgcatcgccggatcgcattgtcatggatttgtgtgttggctttctcatttgaatgcatgaataatatgatgcacaggtagattaagtatacgtcgcacttaggattagattagtagcaattgcaagtaatttaagagtaaattgttcgctccagccagtcgtccaagttgaagaaggccgtgtccgaattgtccgtgtcccgttcgcggaacatctcgatgaatgttctaaccttgatggcacacatcaggaaatcgtcgaatggtatttgtccctcccgcgatccgtagcgatgggccagggcgttcaggagccggttgttcagatgatagccagccgaattgagtgctccgcgcagatggaatccatcaatactgccagtgcgacgggtgtcatatagcttaaagaccgcccgccacttggcaatatcggtaagcagagcttcgaactcctcgaaaccaaggcgaccggagcgatccttgtccagcatggctaccatcgaacgcacggcatccttggagaagccatcactgcccaccataacatcgcgcatagagtggtccaggatgcgcttcagctcctgccagtcgacttcctcatcgctgccagccacgctgtcgaacagacgacgcagtgcaatgcgctgcggatcatcctcctcctttggagtcggtggcggcagagacggagcaatgcgatcgtcggtctcgccaaagccaacctcatcgtcgttctcctccatattgttccttgtctccgagaagacgcgaataatgaactcgccctcctcattcggatcgaaggtcgatggaacaatcaggtagtggccaggtggcaacttaaaccgggcgcaaacctcgcgcgtgttgataaaatgtggtgaacgcgccaccgatgctcggtacttgaagaagttgagtccctggggcttcacttgcatgtcacggtctgtgagatgatatatagcaaatccgatggtcagacagtcgatgcccacgttgcgcttgctacgtcgattcttctgcataagggccacaatagccgtgcatttgccatcgtcatcctcgtcgtcgggatcctccagcgaaatgatgtactgcggattgtgccagaaggtttccaggaagtttctgcaaccgccggctgttactcccgatgtccactcaccctcgaacatggacatttcccacttgcggcgagagctgtgctgctgatcctcagtcagcgagtcgggcgacaaattacatatctccacgcgatcaaaatgattgaggaagtcctggaaggacatccagaactcgccgtccctatcgaaattcaggccaatctcctccttcgtgtgctccggaataaatcgccactcaggcgagctgtcgctccacggaccgctccattcggcatcgttgccccatggattacgcatacgtatcatgggcaattttccctgccgattgggcgtcgatatgtccatgaggcacaccttggtaatggagtatgcatgaccgcgaatcaaaccttgtggcgtctccgcttccagaacatgtggatccggctccaaagagcagcccatcatcgagccacgctcggcggccttcatcatgatgctgaatagatttgggggcgcctccttgatgtcgtaccactcggtgacgccgccagtaaagtcctccatggcctcgcacgtggtgccgcctaatcgtgaagagatggttacaaaaaaattattagaatgaaagtatttaaatttcagatctattcaacaaagtcctaaccgcgataagtgccacattagtttatttttttttaagaacatatgataagcatagtgtatttttagaaactaaaataaattttggtatgccacaaattttctacgcttctacaaatactgataatattccatttcctacccttgagtgcttcataagatccatgcagctttgcataagccttctccagcaaggcactccaaaactcgttcttctccgtggagtgcatgtagattagctcgccattataggtgggcagacggtcatcaatgaccacttccacccacttgccatactgccaaaacttgaagtgaaagatgccagcgtagttctcctggaagtcctgatccggcgggattaccctaaagaagagcgtcgagtcctgcgtcaaattggcagctgcagccagtagccagctgtgaaggaatatttaatttttgaatttatgtccacttatgtgttattaatgcgtttggtcttaccaatcgccaagttctccttgttgcacatcgaatcgtgaatagccttccacgaagaactgcggatcatcggcgatgtcaccgggacgcagccactcgtagtagcgatccggtcgtcgtgagtacatcagcgaagcgttggtggccggaaaatcgggatcctcgaacatggttccattagccaggcaactgtcgcgcagcgattggaaatcgcctttgcttacgctgttctgccgggcactagtggccttgcgacccatccaaaacatgttctggttctcgggcaccttcacgctggtgaagcttagctcggccacgccgacggaaggttcctcctcctgggttggagcactttccggtggcggtgccgtgggatatggtagtgctgggaatccgatattgtgctggggagccggactcgttggcatgggagcgtacggcattggcataccgggcaaaccgggcatggcagatggatatggtgcgagcggagccgccggatagggtagattgggctgcggcatgccagttggatagggcattccggttggatagggcgccataggcgcagtggggtacggcagcgatgatacgttggctgatggcagactaggataaagtcctgatccagggtatggcgtggcactggggtatggagccggcgctgagggggcttctggcacgggcattcccatgcccatggtgggtcccgcatacgaagcattctgggcatgactcgtctgctttaccacatatggcattccgcccacggattcggatgatggatagggcaacgaggggtagagacccgctttgggtttgggagctcctcctccttcgttcccgccgctgacttcattcttgctgtagcccaaggccgccaaattgacaaggccaatgccactggcatgataattcttggggtaattatcaatgccgtacatttttactggtttttcgctgtggttttcctcgtccacgcactggtttttccctaaatctaactactaatggcgttgcaaatcggctaaaactacggaactggatgatatccagatgtttattaactcgctgccgtggtaaaactgctgactcgctgagaatcgtacgctttaaatgggagaagtatccaaatttaactttctcggtaaatgattcataatctttaacccttgcgcgttctgtataaattttctttgaatatgcatgtgcaatcaaaaaagctttgaaaatgcagaatgaaatatttataacattctaattcatttattaactcagaaaatatattatagaaatattaattttgttttattaaacagtttcaataaaaacaaatatagcttttaataaattttagttttctaaaaaatgtatttttatggtattagagaagtagttatgtagtctatattgtttacgaacgtaaactattaaattagtgtcaatattgaagacccaacacgtttcgagggttaaaaaaaggcgagcagggctacattgtcgcgcagagttgccatctttatccgaatgaatttggtatttttttagccctgtcggcattttcaatagaagaagaagaagttaaacagtgctgtgtttttttttataacaaacgcaaattagttaataaattctggcgcagaaccggcatttgagcgatggaaacgcaacctgaggtgcccgaggtgccgctgcgaccgtttaaattataagtattcaccctgctctgttaggaatccaaaaataatgagttctcccttttgaatagcacggcgcatcaggttgtgagcctcacgggcatcagtttcgagcggaggagcataatcgtaaggatataacttagatacacttaaatatgtacaaaacataacacacctcctccctttagggcgtggtcgagctgaccattgtgccgaacagcgagaatctgcgcctgatacgcctgaatgccaagcagctgagaatctacagcgtcgttttgaacgatgtctgccaggcggatttcacgtacttcgatcccttccagaacatctgctacaaggagcacaagagccgcgcgctggaggtctactccaagcatcatctgaccgccgcccagtacaccgatcccgatgtgaacaacggcgaactgctcatccaggttccgcccgagggctactctatgatccaggagggtcagggtctgcgcatccgcatcgagttctcgttggagaatcccaaatgcggcgtacattttgtcataccacccgcttcaacggacgaggagacacagatgaacagctcgcatatgttcaccaattgctatgaaaactcgtcgagattgtggtttccctgcgtggacagtttcgccgatccctgcacctggcggctggagttcactgtcgacaaaaa

SEQ ID NO: 17867 - DNA, 4199 bp, DROSOPHILA
tctctaataccataaaaatacattttttagaaaactaaaatttattaaaagctatatttgtttttattgaaactgtttaataaaacaaaattaatatttctataatatattttctgagttaataaatgaattagaatgttataaatatttcattctgcattttcaaagcttttttgattgcacatgcatattcaaagaaaatttatacagaacgcgcaagggttaaagattatgaatcatttaccgagaaagttaaatttggatacttctcccatttaaagcgtacgattctcagcgagtcagcagttttaccacggcagcgagttaataaacatctggatatcatccagttccgtagttttagccgatttgcaacgccattagtagttagatttagggaaaaaccagtgcgtggacgaggaaaaccacagcgaaaaaccagtaaaaatgtacggcattgataattaccccaagaattatcatgccagtggcattggccttgtcaatttggcggccttgggctacagcaagaatgaagtcagcggcgggaacgaaggaggaggagctcccaaacccaaagcgggtctctacccctcgttgccctatccatcatccgaatccgtgggcggaatgccatatgtggtaaagcagacgagtcatgcccagaatgcttcgtatgcgggacccaccatgggcatgggaatgcccgtgccagaagccccctcagcgccggctccataccccagtgccacgccataccctggatcaggactttatcctagtctgccatcagccaacgtatcatcgctgccgtaccccactgcgcctatggcgccctatccaaccggaatgccctatccaactggcatgccgcagcccaatctaccctatccggcggctccgctcgcaccatatccatctgccatgcccggtttgcccggtatgccaatgccgtacgctcccatgccaacgagtccggctccccagcacaatatcggattcccagcactaccatatcccacggcaccgccaccggaaagtgctccaacccaggaggaggaaccttccgtcggcgtggccgagctaagcttcaccagcgtgaaggtgcccgagaaccagaacatgttttggatgggtcgcaaggccactagtgcccggcagaacagcgtaagcaaaggcgatttccaatcgctgcgcgacagttgcctggctaatggaaccatgttcgaggatcccgattttccggccaccaacgcttcgctgatgtactcacgacgaccggatcgctactacgagtggctgcgtcccggtgacatcgccgatgatccgcagttcttcgtggaaggctattcacgattcgatgtgcaacaaggagaacttggcgattgctggctactggctgcagctgccaatttgacgcaggactcgacgctcttctttagggtaatcccgccggatcaggacttccaggagaactacgctggcatctttcacttcaagttttggcagtatggcaagtgggtggaagtggtcattgatgaccgtctgcccacctataatggcgagctaatctacatgcactccacggagaagaacgagttttggagtgccttgctggagaaggcttatgcaaagctgcatggatcttatgaagcactcaagggcggcaccacgtgcgaggccatggaggactttactggcggcgtcaccgagtggtacgacatcaaggaggcgcccccaaatctattcagcatcatgatgaaggccgccgagcgtggctcgatgatgggctgctctttggagccggatccacatgttctggaagcggagacgccacaaggtttgattcgcggtcatgcatactccattaccaaggtgtgcctcatggacatatcgacgcccaatcggcagggaaaattgcccatgatacgtatgcgtaatccatggggcaacgatgccgaatggagcggtccgtggagcgacagctcgcctgagtggcgatttattccggagcacacgaaggaggagattggcctgaatttcgatagggacggcgagttctggatgtccttccaggacttcctcaatcattttgatcgcgtggagatatgtaatttgtcgcccgactcgctgactgaggatcagcagcacagctctcgccgcaagtgggaaatgtccatgttcgagggtgagtggacatcgggagtaacagccggcggttgcagaaacttcctggaaaccttctggcacaatccgcagtacatcatttcgctggaggatcccgacgacgaggatgacgatggcaaatgcacggctattgtggcccttatgcagaagaatcgacgtagcaagcgcaacgtgggcatcgactgtctgaccatcggatttgctatatatcatctcacagaccgtgacatgcaagtgaagccccagggactcaacttcttcaagtaccgagcatcggtggcgcgttcaccacattttatcaacacgcgcgaggtttgcgcccggtttaagttgccacctggccactacctgattgttccatcgaccttcgatccgaatgaggagggcgagttcattattcgcgtcttctcggagacaaggaacaatatggaggagaacgacgatgaggttggctttggcgagaccgacgatcgcattgctccgtctctgccgccaccgactccaaaggaggaggatgatccgcagcgcattgcactgcgtcgtctgttcgacagcgtggctggcagcgatgaggaagtcgactggcaggagctgaagcgcatcctggaccactctatgcgcgatgttatggtgggcagtgatggcttctccaaggatgccgtgcgttcgatggtagccatgctggacaaggatcgctccggtcgccttggtttcgaggagttcgaagctctgcttaccgatattgccaagtggcgggcggtctttaagctatatgacacccgtcgcactggcagtattgatggattccatctgcgcggagcactcaattcggctggctatcatctgaacaaccggctcctgaacgccctggcccatcgctacggatcgcgggagggacaaataccattcgacgatttcctgatgtgtgccatcaaggttagaacattcatcgagatgttccgcgaacgggacacggacaattcggacacggccttcttcaacttggacgactggctggagcgaacaatttactcttaaattacttgcaattgctactaatctaatcctaagtgcgacgtatacttaatctacctgtgcatcatattattcatgcattcaaatgagaaagccaacacacaaatccatgacaatgcgatccggcgatgcaaagagatacactcactgagccaacaagagaatcttatctatatgaccatatccggaaatacaaatcatgtggcgaaattggagtggccttggaacggcacgaggttgctacgagtatgcacggtaaacagtataaatcccgcatacacaattcaaaaaattaacgctatagatttttttttaccatgctgcgcaactggagggatgactaagagcaagcatcaatagcaaatccactccatgcacctcgtcaagagccggaaatttactagtacaaacagtgcattattaccttacaatcgctatgagacgctcggaaagccattagaacgcatcgacaatatttattagatatacggaatgaataagcatgtatttttgtaacatcgttagctccgagcagtccacatatttgcccaggtgctagaaataagtccagccaaactctgttacccaaacaaacgttgttattattatcaggaaagtaacgcgaagcgaacaagccaaccaactcatcgaatatttataagcttaagcagaatttcagaatatcagtcaatttattgaatcacatcaaaaaatgtaatacgcatatattttgtatttagttttcagatcagtaatctcaaaacataccttaattaggcaccctctatgtcaaaataagtgtttaactaactgaaattaaccaatcgggtttagaggctctttttgttggatgcttttatattttactataatttttgtgaattaatcaaagttactcttgtatgcaattgttactattaataatttgttgtccgactttttgtatgcatataaataaaatgcagtgatgattcaat

SEQ ID NO: 17868 - protein, 791 aa, DROSOPHILA
MPYPTGMPQPNLPYPAAPLAPYPSAMPGLPGMPMPYAPMPTSPAPQHNIGFPALPYPTAPPPESAPTQEEEPSVGVAELSFTSVKVPENQNMFWMGRKATSARQNSVSKGDFQSLRDSCLANGTMFEDPDFPATNASLMYSRRPDRYYEWLRPGDIADDPQFFVEGYSRFDVQQGELGDCWLLAAAANLTQDSTLFFRVIPPDQDFQENYAGIFHFKFWQYGKWVEVVIDDRLPTYNGELIYMHSTEKNEFWSALLEKAYAKLHGSYEALKGGTTCEAMEDFTGGVTEWYDIKEAPPNLFSIMMKAAERGSMMGCSLEPDPHVLEAETPQGLIRGHAYSITKVCLMDISTPNRQGKLPMIRMRNPWGNDAEWSGPWSDSSPEWRFIPEHTKEEIGLNFDRDGEFWMSFQDFLNHFDRVEICNLSPDSLTEDQQHSSRRKWEMSMFEGEWTSGVTAGGCRNFLETFWHNPQYIISLEDPDDEDDDGKCTAIVALMQKNRRSKRNVGIDCLTIGFAIYHLTDRDMQVKPQGLNFFKYRASVARSPHFINTREVCARFKLPPGHYLIVPSTFDPNEEGEFIIRVFSETRNNMEENDDEVGFGETDDRIAPSLPPPTPKEEDDPQRIALRRLFDSVAGSDEEVDWQELKRILDHSMRDVMVGSDGFSKDAVRSMVAMLDKDRSGRLGFEEFEALLTDIAKWRAVFKLYDTRRTGSIDGFHLRGALNSAGYHLNNRLLNALAHRYGSREGQIPFDDFLMCAIKVRTFIEMFRERDTDNSDTAFFNLDDWLERTIYS

SEQ ID NO: 17869 - DNA, 8028 bp, DROSOPHILA
aacggatcgtatcgtatcgcatcggattaaatcggatggcatcgtcggaaggtgagaaggcctaccgatgatattagcccgacgaacacgcatatcaagtgacagattgcataactgtcgaatacgaagacccatctccatccatatcccgatctccatcttatgtggcgtgtggtgaaagttaatttggcagaaatatgtagaaaaaattatgaaatgtattttcctttcggttgccaccgcaccgcaccggcattgtcttgtggcaaaagtggcaagtatcaagcggaaacggcaaacagagcctcatgcagccacttgtgccgcccaataggttaataaatacatttcgaatggaggcaggaagagctgacagcagcacgccaagtgatacaagtcgataaacgcgggtataccatcttaatttctggatatcaataattaagtaaactaaattcgcttcacaacttgaagttgaagaaagcattgatttaaggacctataaacattacttatataaaaagaaagagtgtataatgatagtatgatcatttaaacttgatagttagctgatatcaaataaatataaaacattgtctttaaagaaacatttaactgactgttatctaatactttaatgcaaatatacttgtgaaagtaaaaactgcacctaaatacatctttgttggctcgaatggttttcttatcgccagccttatgatgcatgtctgtgccatttaatctcatttagcgccgtgtttcttgtttatgtatatctcggctgacaattacatgtgggcaccttgaaggggccaacaaattggcgaccaacaggcatttctctggcattgtttgtgttggccaggtggccgggttggagccttggccattttagaaaggcccaactggaagcgctcgaatggcacagcgaaaggtacaagaaaggtactcttcaactacagcgcgccaccagcatatagagacaacacacgggtacaggttggtttagttaggtctagacatttattaagcacgctgggctcggcggccagatgtcgaagcagctctggctgggcattatcgagtgcacgttgtttgagcacattataatttagttatatatttgaaatatgtttgtagcaacccaatcactgggtttggttattgctattactattatattactgtcgctcgagtgtcgctcacttggagtcggcggctgccgcattgctggcggacttagtggcagctttaatggcggccgccgaagtgcgcttcacgctgaccaagacattgcgcttcgtggaagccggaccaggtttggttgcttttgcagtcggtttgggcgttgccatctttgccggctggctggcagcagcggtggtcttggccgttggtgtggttggagcagaggcagcatgctttttctccggcgacttggccaccggcgcgttttctttcgcagctccctcatcggtatcgccgttcgcttcctctttgccgtctttcgccttgtttttctcgctgcaagtgaatacgtattacacaacatgctcatgattactgcatcgtcgttcacatacctttcaatgtcaatgttaagcacagactcgtcctcttcatcctcctcatcttctttatgacctcttgtctctacttctgccaggaggtcacccagatccttgtccacctcctcccacatctttttatcattggtcgcatcaccctcttctacttctgcatcaccatcatcatcgtactcgtcgtcatcctcgtttaacttgccatcgatgtcctcatcgccatcggcgtcatcatcaccggcctttttgtcatcatcgtgatcgtcctcatcgccctcctccgtcttgttcttcttctcggtctcctccttgtttcgcaggaaagccttcacatgggagtgctgcatgcaatgctttttggtgtagtcctctaacgagacatcatcagccttggcggaatagtgattgcacagctcgcagtagaatgcctctatgacctttatatagtccggtccaatcagagcgcgtttgcgagtctcctcatcctcgcttttcagagcggcctccgcctcggtgaccatggcatctacatcggcgtcgatcatgtccacatcgatctcgcccaccgagtctacagtgtggaatttattcaaatctatctcgcgctcatccacgctatcatccgatccggattcatcgttgcgggccttgttctgtaagaaaacatacaaaaattaattatttaaagcttatttcaagatatgaaagggaaattaacaatatagtaaagtccagaactgtaaatgagtttcgatcccttaatgactctgactcaccctaatgtgatccagggagcagcggtggttctcgtagagcatggcattcttgaaggccagatggcaagagccgcaatagggcattaagaacttcttaatggtcttgtggtgttcggaggcctgatgaagattcttgggctggcggtaggccaagcggcacagacgacagtagcgcgactcgtgctcctccttgctattctcctcgatctcgcgctgtgtggtgcgctggcgggcacgcatacgctgcaggtcagctcgctggttgagggccacctgacgcatggagttcttgtgggagcgcgagttcagatggtagttatactcctgcggatcaatgaggaaatggtgttaattgaataactcaagactccaataaaagaaacacaccttaaatgtaacacacttgatgcggcaatggacgcaaatgagtttgatgaagctgcgtttgcggttgttgtggtcctcatcccgatgacgggagctacgtcgctccttgctacgatcatcgcccgatgattccttgtctttgtccttgcgagacgtgcgctctttcttggtggatgatgacttcttggacttggagtccttcgcgtcgtctttgtccttcttcttacctgacttctcgaccgatgacttggccttttcgtccgatttgtcaccatcgccgtcctcaccgtcgcccttcaccttgacatcctcgtcatcggaggcgtcatcggccttggcgctcttgggatcggactcatttaggtccttgtcatcatcgtcatcgccatcaccgtgctcatcatcatcatcgtcgtcatcatcgttaccttcggcctcactcttgtcctcgttgttggccgacttgttgcgttttttaccaggcgaagtcttcttgctcttctcgtccttctcatcatcgtcttcttcatcgtcatcgtcgtcgtcggattcatcgcctccatcggcgtccttgtccttgcctttcttcttcttgcttttctcagcatcttcgccgtccttgtcctctttgccgctggaatcgtcgctggaattcccgccctggcgttgtcgtcgcaacgagctacatttgggtggaatgaattcgaatgtgaagtcatgtcagggtggcaggatggttttgttttgtttggttgaaggcaagttcaaaattttgtgtttttttttttttttaagtacataagaacaagctgggtggtaaactaacaaaatacgttcttgtcaagaagtgtcgggtgtcttttttatcggtacatttcaattcgttctacttagttacacaactatatacacatggatagtatttgatctacgaagatgggagtttctctggaggccgcttggataatcttgcaccaagtgctctcctccctcctccttttcgcattcagattttcgatgcctcactgaatctcacagttcgttcacattattatgtcaatctcacggattgcattcatagttctttgcgtcctcaattggtgcacaatagcgtaactctgatttttgtatattcatttgggttttgatttaatttgatttttttttttttttgaaatttggtctatttaccttttcagctgctgaatcttgagcaggcgagcccggtctttctgctgtgcatagagcagctggcggcgcatggtgcgcaggtcattcgactcgttgaccctggtgcgcacaacgcgcattcctcccacccgcatcccggtgcgcatcatgccgcccctcatcgacattgtgccacggggtcgggatatatagttggtgccggccacgctacgcatcatccgcttcggaggacccatcgatccgtcccgctgatgccggctgccgctggtggaatcatcgcgtgggcggtaggagctcgagctcccgccgttattaccaccaccgccggtgctgctccgctgatgatagttcgatgacgaggagccaatgttctgcgacgaggacgagggtcgatcgctgcgatcattcgacgaggacgtgcgacggtaatcctattgacgattgatgagtaggaaggtgtgaaggagctttgttttggttgatttggtattgatttttgtatcaaatatcaaatatagttggtagatataaaacatatttagacttcttgaatgaaaataattgctatatagctacggactgatattgattctgattctgatcggattggttgtgggttatatagttcacaattggctgttattattttttattattatttcctgcagcgtgttttttgtgtgtggtagcatgatggagaaaacttatacgcatatagcttagctacacagatttgaatcgatattattattataattcgtatgcggatgtacacactgatagatttctatttgctctgctcggattgctaaccgaccattgatattggatattcggtatggggaaaaatttgacagctgatggtacggtagaaggcatacaagacatacaagagtttacagatcaaaatcgcttcaatcgattcaacagctctctaaagaagtttttgctctctcatatcatatacgtggatcatttcgggtcggttcagatcgaatcggattggatcatatcgatcgatcaatcgatcggtcgctggcaaaatcattatctatatggtgccgcgccgctgccgatgctatggacaatatacagatttatatagatttatgtggtatatggtcagaggttcggtgctccaaagtgcttgtctggcaactttgagtcagcgcgctgtttgctcatttgggacatgttatgctttaacgctcgataggctcaactcagtcccgcgtttaagcttcacaaacagtgctataaatatttggaaagtcattaacattacacagtacatggcgattggcttaatgcataattaatatgtcgacctttgggtatagcgtgctttcaatagcatttaaaatggggcaaagtataacttacgtcttgacgcgggcgtttgcgatcatcgctgcggtcgcgagatgagtcctagaaacacaaaacataaaaatagattgcattatgaatacacatatatatgtatatatatatatagatggatttgggtaatacatcattcatttactacaagagcgacagacttgttattaatatatatgtaatatgtaacaattgatcaaagaggtaaaaggtaaaagaaaacaaaaaaaagaccgccaaatatactcaagcgtatttgccactgaaaaatattaaattaacatcaaacgtatatttcaaatactataatcattcttatctattttttccacagaaataagtgtgccgtttataagtacgcacctgttcgtagaatatatacttttaaggttgaatataatatatttatatatatatattgaatagtttttcatttgctttgcatgtggaaaagacgtcaattcgatataatctctctttctgtcagatgtataattaggaaagataagtagtcatccaataagtgtttactagcttgaccagaatgtctgttattatcaattacaaaagttgattgtaaaaggttcttatctctgatttttcacatgcattggtattcgtcttatttacatatagtgccaaaaatcttttcgcatccaaatattacctacagtttcttatctcctttgggagataataagaggctgaatgatcagcattgcaaaaaaatcgtatcaatatatgtacgtgttataagcgatatccctctattttcagatacacaatgtagaaaaaccaatgtcaaggtggtctaactattataatttcaatttctaccctgtcattataatccaaattgaaattaattagaatgcagaacaaatctgggcatatttctgaagctatcgtagtaattactcacaaatggttacttataggttagtgcgaagtgctccaacttacatagctgcgcttgtggctcgaggagctggactcgtagcgcccgctgctcgagttgtggtgagtgaacttgtcccgactcctgttgtcgtagtggctgttgcctcctgctcctccgccgctgttgttgtggttgttgtagcgattgttgttgttgtgatagttattctcgtagcggccattattgggtcggtaattgccctgggtgcgagtattaacgtagttgctggaattgcgattattgtagtagccaccgcgagtggtgccaccaccacgtggaatgaatccgccgcgtccacgcatctttaattccaatctcttcctgtttgcagcacaaggaaatactgtaaggttgcgttgaaaagattacaaaattcgatccgcatggcagactatatacatgtatgcacaaatgcgtgcaaaatatacataaggacagactgagcgttcagcgcagcaccccttaagtttttttttcttttcatggattatctctgcgccgccggtggcgtcgctcggtttgagaaaaaaagaatcgattttctgccggcccgagaatttttttgcgattttactgcaaattgatctaagccacttacctctgctctaacactattcactaatgggcacaatgaagcactgcttttctgtctgtttttcagttttaactgaacgtttaacttctgattttcaccttttctatcagctacttttttcgctcgaaacaattttttgtctagcaatggcgaacaaagtgaagtgtgaccgtgctctgtggaatcagtgcttaaaatcgattgttaagacttggctatatcgattgtcaacaatgtggcaatgctatttagctgaaataacattattaataacataataacataataacgaaataaaagaaaatttctttgctttcttcaaatattctcgaaaactatgtaaatttaatttaatttcttaaacaacatttctttaatgaaatcgaatttgtatcatttatttgcaagcccctaccattgggggtttgaactcgactagaaagtctagaaatatcgtttgatgcagtaccatcactgataaacggtgacatcgctaataaagctgcaaaaaatacagctcagttcttattttacatagcagaaattttaaattgttttatactggaattgtgcgataaggaaacctgaaatcagagcagtaaaatgttcaatggttagctaatactgttgccaataaaaaaaatcgcaaactgacccacagaacaataagcattttatgattgtcaccattgattacgtcgggcagcaacggatagcgggaaggcacgaaaaaacgggcagcattactgcaatgtagagccatcggatgatctgttcccttcccattggccaaagatgtgtactattgatttcttggcagcccatcgaaccactcgctcatcctcacccacacccgtgtaactaaccaactggccattgtttttctgtcaggctcaccgcatccacattagccagctcatccgatcagattggcccagttcaaagtacacattcagcatccgcagcagcaaattccgcacccttgagtcatggcgtggatggcgttaggggcactagcctccggtttcggtattcacccccctttcaatcattactgctcttcctcctcctgttcatgttcatgtcgtgtcaccgtttagtagactagttgagaatgtattaatgtgtcttatgaccaacgcattcgcctta

SEQ ID NO: 17870 - DNA, 3111 bp, DROSOPHILA
cgccattgctagacaaaaaattgtttcgagcgaaaaaagtagctgatagaaaaggtgaaaatcagaagttaaacgttcagttaaaactgaaaaacagacagaaaagcagtgcttcattgtgcccattagtgaatagtgttagagcagagatgcgtggacgcggcggattcattccacgtggtggtggcaccactcgcggtggctactacaataatcgcaattccagcaactacgttaatactcgcacccagggcaattaccgacccaataatggccgctacgagaataactatcacaacaacaacaatcgctacaacaaccacaacaacagcggcggaggagcaggaggcaacagccactacgacaacaggagtcgggacaagttcactcaccacaactcgagcagcgggcgctacgagtccagctcctcgagccacaagcgcagctatgactcatctcgcgaccgcagcgatgatcgcaaacgcccgcgtcaagacgattaccgtcgcacgtcctcgtcgaatgatcgcagcgatcgaccctcgtcctcgtcgcagaacattggctcctcgtcatcgaactatcatcagcggagcagcaccggcggtggtggtaataacggcgggagctcgagctcctaccgcccacgcgatgattccaccagcggcagccggcatcagcgggacggatcgatgggtcctccgaagcggatgatgcgtagcgtggccggcaccaactatatatcccgaccccgtggcacaatgtcgatgaggggcggcatgatgcgcaccgggatgcgggtgggaggaatgcgcgttgtgcgcaccagggtcaacgagtcgaatgacctgcgcaccatgcgccgccagctgctctatgcacagcagaaagaccgggctcgcctgctcaagattcagcagctgaaaagctcgttgcgacgacaacgccagggcgggaattccagcgacgattccagcggcaaagaggacaaggacggcgaagatgctgagaaaagcaagaagaagaaaggcaaggacaaggacgccgatggaggcgatgaatccgacgacgacgatgacgatgaagaagacgatgatgagaaggacgagaagagcaagaagacttcgcctggtaaaaaacgcaacaagtcggccaacaacgaggacaagagtgaggccgaaggtaacgatgatgacgacgatgatgatgatgagcacggtgatggcgatgacgatgatgacaaggacctaaatgagtccgatcccaagagcgccaaggccgatgacgcctccgatgacgaggatgtcaaggtgaagggcgacggtgaggacggcgatggtgacaaatcggacgaaaaggccaagtcatcggtcgagaagtcaggtaagaagaaggacaaagacgacgcgaaggactccaagtccaagaagtcatcatccaccaagaaagagcgcacgtctcgcaaggacaaagacaaggaatcatcgggcgatgatcgtagcaaggagcgacgtagctcccgtcatcgggatgaggaccacaacaaccgcaaacgcagcttcatcaaactcatttgcgtccattgccgcatcaagtgtgttacatttaaggagtataactaccatctgaactcgcgctcccacaagaactccatgcgtcaggtggccctcaaccagcgagctgacctgcagcgtatgcgtgcccgccagcgcaccacacagcgcgagatcgaggagaatagcaaggaggagcacgagtcgcgctactgtcgtctgtgccgcttggcctaccgccagcccaagaatcttcatcaggcctccgaacaccacaagaccattaagaagttcttaatgccctattgcggctcttgccatctggccttcaagaatgccatgctctacgagaaccaccgctgctccctggatcacattaggaacaaggcccgcaacgatgaatccggatcggatgatagcgtggatgagcgcgagatagatttgaataaattccacactgtagactcggtgggcgagatcgatgtggacatgatcgacgccgatgtagatgccatggtcaccgaggcggaggccgctctgaaaagcgaggatgaggagactcgcaaacgcgctctgattggaccggactatataaaggtcatagaggcattctactgcgagctgtgcaatcactattccgccaaggctgatgatgtctcgttagaggactacaccaaaaagcattgcatgcagcactcccatgtgaaggctttcctgcgaaacaaggaggagaccgagaagaagaacaagacggaggagggcgatgaggacgatcacgatgatgacaaaaaggccggtgatgatgacgccgatggcgatgaggacatcgatggcaagttaaacgaggatgacgacgagtacgatgatgatggtgatgcagaagtagaagagggtgatgcgaccaatgataaaaagatgtgggaggaggtggacaaggatctgggtgacctcctggcagaagtagagacaagaggtcataaagaagatgaggaggatgaagaggacgagtctgtgcttaacattgacattgaaagcgagaaaaacaaggcgaaagacggcaaagaggaagcgaacggcgataccgatgagggagctgcgaaagaaaacgcgccggtggccaagtcgccggagaaaaagcatgctgcctctgctccaaccacaccaacggccaagaccaccgctgctgccagccagccggcaaagatggcaacgcccaaaccgactgcaaaagcaaccaaacctggtccggcttccacgaagcgcaatgtcttggtcagcgtgaagcgcacttcggcggccgccattaaagctgccactaagtccgccagcaatgcggcagccgccgactccaagtgagcgacactcgagcgacagtaatataatagtaatagcaataaccaaacccagtgattgggttgctacaaacatatttcaaatatataactaaattataatgtgctcaaacaacgtgcactcgataatgcccagccagagctgcttcgacatctggccgccgagcccagcgtgcttaataaatgtctagacctaactaaaccaa

SEQ ID NO: 17871 - protein, 919 aa, DROSOPHILA
MRGRGGFIPRGGGTTRGGYYNNRNSSNYVNTRTQGNYRPNNGRYENNYHNNNNRYNNHNNSGGGAGGNSHYDNRSRDKFTHHNSSSGRYESSSSSHKRSYDSSRDRSDDRKRPRQDDYRRTSSSNDRSDRPSSSSQNIGSSSSNYHQRSSTGGGGNNGGSSSSYRPRDDSTSGSRHQRDGSMGPPKRMMRSVAGTNYISRPRGTMSMRGGMMRTGMRVGGMRVVRTRVNESNDLRTMRRQLLYAQQKDRARLLKIQQLKSSLRRQRQGGNSSDDSSGKEDKDGEDAEKSKKKKGKDKDADGGDESDDDDDDEEDDDEKDEKSKKTSPGKKRNKSANNEDKSEAEGNDDDDDDDDEHGDGDDDDDKDLNESDPKSAKADDASDDEDVKVKGDGEDGDGDKSDEKAKSSVEKSGKKKDKDDAKDSKSKKSSSTKKERTSRKDKDKESSGDDRSKERRSSRHRDEDHNNRKRSFIKLICVHCRIKCVTFKEYNYHLNSRSHKNSMRQVALNQRADLQRMRARQRTTQREIEENSKEEHESRYCRLCRLAYRQPKNLHQASEHHKTIKKFLMPYCGSCHLAFKNAMLYENHRCSLDHIRNKARNDESGSDDSVDEREIDLNKFHTVDSVGEIDVDMIDADVDAMVTEAEAALKSEDEETRKRALIGPDYIKVIEAFYCELCNHYSAKADDVSLEDYTKKHCMQHSHVKAFLRNKEETEKKNKTEEGDEDDHDDDKKAGDDDADGDEDIDGKLNEDDDEYDDDGDAEVEEGDATNDKKMWEEVDKDLGDLLAEVETRGHKEDEEDEEDESVLNIDIESEKNKAKDGKEEANGDTDEGAAKENAPVAKSPEKKHAASAPTTPTAKTTAAASQPAKMATPKPTAKATKPGPASTKRNVLVSVKRTSAAAIKAATKSASNAAAADSK

SEQ ID NO: 17872 - DNA, 10011 bp, DROSOPHILA
accattttttatttaaacaaatggaaatccaggcgaaattattaaaaacaacaacagcaactggacggcgtgacgttgaagctatcgaaaaaataccaaaccaacaagccaaaactattcgataacgaatagctcaacagctgaacaccccattgtgaatgtcttagtatttttcaaatatttgctgacggtttttcaaacaagggcctttctaaatttaaactttacataaatcgaaaatattagaaataaatataattaattttagtaagttacggtgtaataatttgctaaacattacttaagtgcgaccgtaaaacacctagttaaaaataccacttcgccaatgcaaggtgatcggtattttcagggtaacacgttcacacccacccacacatcgtagctgcgctgcaaagtgtttcaatatttattgcaaaaatggtgtgaaaaaccactgattcgcttaaatttagtgctcaatcgtaagcaacggatggccgcgaaggcgtcggcagtgaaattcgcgagtaacattgctgaaaatacatcgaaaagcaaacgcgaaaaacgatgaaatctagtcaatcaaatattgtgaatggatgtgaaagagaagaaagaggggcgcaaaacgaaaacgcaaataataagtgacacgcagaagccagctaaagtgcagtttatttaaatatactagagatctgttcaaaatataaatataatctcacaaatcatcaaaaagtcaagtgtctgtgtgtggtgtgtgcgtgtgtgtgggagtctctctctctttttctccctcttttcttccccatctaccgtgttgttattctggtggggttgaaaagccattgcctgcataacggttaacgcgtgacgtacgacccatcaacagcagtcaagtgcagcaccctaccgcccctcgcccttcctaaagagtagagagcacacctcctttataaataaagagatcctccgatccacccaaacaccattcatcatgatggacaacgatgatgcactgctcaacaatggaggaccacagtccggagctgaaactgtctacggtaccgaggacaacaacatggtcatgtcggagaaggtaatagtccatccacaaaagccctctttcatcttgtcccactgagaagtaaccagatcactcggaatgggaatagtcttaagtttcaatagcagtccattgatagtttatagccaggaaaattcactgtgataccattgactaatttatactattcactgaatcatacgggcgtttctgattctcccttaaatttgataacgcacaataagtaggtttaatctgttctggttctctgctccttaccatccacattcagacccactcgtatcgtacaagtaacacaaacacgagataatgaggctataaaagtgttccaagcggaaatacaatcgcagaaatatgctttctttgcacatcattcttgctctcttcgtatctctttcttgtttatatacccttaattatgtaaaaacgcagccaacaattgtttattatgcatcagctgacgtctgtggtcattgacattaaagctggcgaaaaatagtagccaaaaatgggtagaaaaagagagttagagagcaaaagaagggtaagaagccggggaccagaaatcaataaagtcagtcagttggccctcaaattttatgaccacctcacgcaatattctgcagagaaagaaataccatgtcataaattttgttaaacatctcttatctgataagctatagaaattctagaacatcaaacacaataattatagttttggcgtttataattatttataaccataaagtataggtatttttaggttcaacaactttttcaaaatcagttcaataaaatggtatgacaccataaaagcttatcgatttttatagccttaaaactccatatatgtatatagtatattggattcctcaactgccccatctacagtctggtctatttttaattttcaccccaattccccgattgattttgcactttatcagcttcgctagctttaatcggtctatgcaaatcaaatcagggggccttccctctcaatttcgtactcatataagtgttatttcgctatcctcaccacgaaatgagctcatcaggttccccaattcatagttcttggcgcacatgggcggctgataagctacctgttaattgagtaatgagttcaaacaggcactttgaagcgggaagcattgctgacacgccgataaaaacttgttttttagcccaacgagcgcagaaaccatttgtgaaacaagtctgaccaaaaatgtttgaatactttagctagttggccttataggttggcccaaccttgggcggttgacgggtttttattagagaattaccgtctcttgcaatgtaaatgccaagaaatgccgtgtaaaacttaaaaactaaattaaactccaattaaaatcatttaaatacgtgaaaacgcatggtatatctttttattttattatcttatttaacacatttatcgtaaataattttgcaccaacctcactcattcatcatgtacttattcataagacgggttttatttgcacatttttcatttaatcaatttgttgaaaattttgttttttatgtgtcctttacaccatgtttttgttcttttctttctctttcagaatgaacaggttgtcagcatcgtgagttatcaaaatttttcgtttgtggtctatttattttctctcctataatctttttttttcttgcacacatcttaatacgtaaatgcacgatatataattgtttaaaccatttagttgagtaccattttgcacgcttcgcatttgtttttaaccaacaattaaaagctgagaaggtgtcaaccttaacctttctcggttctttaatttaccggaaataattgagtttctttactttgttttataacaaaatgcatgcgtctttcattcacataaactgcggccacatatcgcaattatgttaaacgacttaatgtttcttactatctctacttgatactatgtttgtgtgaatatgttggttcttgagtaaataaaaccctctttgaaagtgaaataccctagaaaaattaaacctatatttatgtaaaggtttctacagtttctgtcccacctctactaatcaattgcactttgttgtccctttgatgccccaaaaacgaagcacaaatcaactgatgcaattcctctttcaggtccaacaactggcgggcagtatttatcaggaatttgagcggatgatcaatcgctatgacgaggatgtggtgaagaacctgatgccgctgctcgtgaacgtgctggagtgcctagatgcctcctatcgcatcaatcaggagcaggacgtggaggtggagctgctgcgtgaggacaacgagcagctggtgacacaatatgagcgggaaaagagcgcccgcaagcagtccgaacagaaggtgagcaaattggttggagcctaatcaagtcattggattaaattcaataaattatatgccaccagctattggaagccgaggatctggccgagcaggagaacaaggagctggccacgcgcctggaatcggtggagagcattgtgcgaatgctggaactgaagcacaagaacagtctggagcacgccagtcgtttggaagagcgggaggcggatctcaagaaggtaaaccccaataattcaaaagccatagtacagacagtaaatgttttgcttgtttatctaaccaactcaggagtataacaaactgcacgagcggtacacagagctgttcaagaaccatgtggactacatggagcgcaccaagatgctaatgggctcaacgcactcacaaatgagcacagcctccgaacgcatggatgtgagccgagcgagactgaatcctgtggcccgcagctcgggacccgtttcctatggcttcgcctcgctggagaattcggtgatgctggacacggagaccatttgcagtgtgggcagccagtcggatgactctggtccgccctcgctgcagaacgagctggacaatctcagtggaacgttagagcgtggagctgccaccgatgcattgcagcagcagcaccatgccacctcgccccagagtcccgacagcagtcccgttgtgccaaatgtgcccacaaatggtaggtgcagttggcgttttaagaataactaccatctgcttactactcatccgctgaccgtactaatttttcctctcttcttttgatttttgtgttaactcaactaaatacaaaacaccgaaactccgaacaacccaatccaaactcccataccccagttggtcgctcgactaccaaaaaggagcagcgctcggataacaatctctaccaagagctgtccttccaggacaacgaggagagtgaagagaatgagattgtcacaggtgagacgttcggcaaatgttattgggactactctattgcaccataaatgttgttaatcaaacggggatgagtatgaggatactcaaagcgtgaagtttttaaatccaacccaagtcaatcaagctgtactaattgccaatatcccgtttcttcctttttgatttacctgcccgcgcactaaacaccgcccaacatgacattgctatacgttcttggaactatacttcttgtggccgaaccctttaggcagctgggtccatcctggagagtatgcgtcctcaggtaggtaccactcaagcactcaagaccatcaaccacagcagcaagagcaaagacaagtacaagaaactcagccacaagcgccatataattcgtacatatatggattcatctatataacctgtaaatacatcaaatatcatgcgagattcgactgaaaaatatgttaaaaaaaaaaaagaaaagacaaaagattttaggatcttcactagctgcgtattgtgtgtgtattcccttgtgatatctgttggaaattatgagctcgaaagtgtgtcagcctgctaaagagcattagcaaattagaaacatttatgcaaatttagaaaaagcaaataaaattttataacatcaactctaattaaatttctctttcttttatgccgaattctacttgcccaaatccaaaaccatttcgtttcctcccacaacacaaatatcaaattcctctcgcaattactaaacacactccacaaaacaacaatatttgcattgtattgatcctttgaagctaacgacaactattttggtaagtctaaagtgcgctgcaaacatccacatatttatccataatgtagctcccagtagaattagttcattaccctcttttactctcgtaagtagatatcccccgaaatcgctgagcatttgaagaaatgtatctttactttatttttggtgcttggatggacttgaaacatccttcttcgtttggattttgccatatcatttggttttagcttctccattagtttggtagtttttagtttatttcctgatatggttctggattttacttcctattttaaggaatgcaatatgtggaggttgccatcatctgaccattgattctcacttgtttgctttcatttatttcacttgtaacatatatttgtaatttcattacttacacttgagtttcacttgaatttcccgaaacgcttttacacttgttttgtcaataaaaacctatacaaattgccaattattgattaagctctcaaacatttttcaggcatgggcaaggaggttgaaaatcttatcatggaaaacaatgagctgcttgccaccaagtgagtgtcactaatgatgtccccaatagggaatcaatttcctagaaaccaattataaccatttaccacatcctacagaaatgcgctcaatattgtcaaggatgatttaattgtcaaagtggatgagctcactggggaggtcgaaatcgtgcgcgaggagctcaatgccatgcagcaatcgaggaccaagttgaggcagcgcatcagtgagctggaggatgagctgaagaaggccaaggagcaggtcaagcagcaaagtatgttctaccaaatgtggggaatgtttctgtgtattaactacgtcctcattttagacactgagcaagaggagaatgatgtgccgctggcacagcgcaagagattcacccgtgtggaaatggccatggtgctaatggagcgcaatcagtacaaggagcgtttaatggagctgcaggaggcagtgcgtcttacagaaatactccgcgcgtcgcgtaccgtagataatttagacagaaagtccaagcagagcatttggaagtactttagtaatctttttacgtaagtgtattagaaaaactcccagaatgccctatattaacttgttaacctttctatatggacagcccctccaaccgcccaacggaacgcgttgcggacggtctcggaggggggccgatgtttcgtcacaccggcggaggaagccctgcccacagccatggatcccctagccgaggaagtggaggtggcgacaatcgcctggccctaaccagcggccagccgcccgtgcatccggccagcgctggtcttgccaacgcactcattatgccgaaagactatgccgaggagggcagttcggaaaggataagtgcaaggaggcgggaacagtaccgccagctacgagcccatgtccaaaaggaggatgggcggctgcatgcctacggttggagtctgccgattaacaaggccagccaggaggcgaatcccaatcggcattcaggaggtgtaccggtacccgtatattgtaatcccctggcggaggcatcgccccacatgaaggtattttgtgcggcaggcgttaacctacacggcgggttcacaaagaatgggcaatcactgatacctgccaactcaccatatgctccgaaatctacgctcaagatagctgagataaccagtcccacggcggatcagagcatggaggctttggacaggcagatggcgagagtcagtctggagacactggagcccgagacgcaactcagttcgttcgtatggatatgcacaagcacacatgctgccagcacagtcagtgtggtagatgccaatcaatcggccactgtgctcgacgcctttcccatatgcgcgtcgcatttgctttgcattgcctccgtgcaaggagcgatggagagcgactacgccttgctggaacaatcggaagtggtcaaggcgggcgagatgctgcagcgaccgggcgagggtactgagctattgggcaaagtggagtttgtgcgagtgaaaccaaagtcggacgatgagcagaacagcaatgagaagcaacagcaggaggaggaggaggcgaaggaagccacagagaaatccaacgagcagctgccggctgtgagtgccgaagagccacttggcaatgtggaggccattaaaatacgtcagccactgccaggagctccccagcgattgtccacagatggcaaccagactaacaacaataataacagcagcagcagcagcaatcttttgtttgccaccaaatcgctgaaccccatactggagaccaaggatcgtgatgaaccggcaatgagctctgtaggtccaacaatgtggctgggcgcccaggatggctggctgtatgtgcacagcagcgtgggaaggtggcacgagtgcctgcaccgagttctcctgccggatgctgtgctagcgattgtacacgtggaggcgagggtcgttgtggcgctggccaatgcccaactggctgtgttccgccgccagacagacggccaatgggatctgaatagctatcacctggtgacgctcggtgatcgcaaccattcgatacgttgcctctgtgtggctggcgagcgcatttgggccgctcaccgcaacaagatcttcatcgtggaccccgtatcgctcaacattgtgcattcgctggacgcgcatccgcgaaaggagagccaggtgcgtcagatggcggccacgggagctggtgtctgggtgtcgatcaggtgtgttacttcaccttttatgttttagtgcttctaactaaatatggctttcaataacttcaagacttgactctacgctgcggctgtacaacacgcacacgttcgagcacaagcaggacgtggacattgagccgtacgtatccaagatgctcggcaccggcaagctgggctttagcttcgtccgcatcaccgccctaatggtgtcctgcaaccggctgtggatcggcaccagtaacggcgtgatcatctcagtgccgctggccgaagttcagcccaagtcatcatgtaagtcatgttaaacgttttgtcttagagcacggagttaattgtatattttatttcccttggcagccgatccccatggtcagatgccgctctgttgcatggccaacgctcaactttccttccacggccaccgggatgcggtcaaattcttcgtatcggtgcccatgctgcagcagcccaatctcaatggtggactgaccttcaccaacaagcgacccgatatgctggtcatgtgcggcggcgagggctacatcgattttcgcataagtaagtggccaccaccgagtccgccggatgaaacggattgggcagcaaagctctaagccgtgtgtataaccattccatattccatcccatctgcaggacatgataagtttgatgctagtgataatgcagcgcacttgatagtttggaaagtcgatacgtaagctttgatttctttttgattttgattttgattgcattgcttcttttagttttctttattttgttaaatgcttagtttttgattacttaattgtttgtgtccttacctaatttgttttgttttgatttgttttgccttcaatgcgatttaattgtgcaatctctgccccacacttagaacgttcaatctgtagcaggatgatgggtcccacaagtggattgcagcatttctctcagccgtgacctgatctgaactagcccactaagcaggtttacgcaagtccccattttaatttaatttatgtttttccgtactgttccaatcggcaccagttttactgcttgtgcagtgcgtttcatggctaaaagactgatttatcaatggtctttcggttctgaagcattatacatactatatatctatggtctaagcacatgaaactattttttcgcacaaaaaccatgcaccagattaattaatctattggtgttccatgtcccttgtccaaaacattaactatagtcaccatatttttgtgttcagggttggccacttgtagaaatcctatagaatactcttgaatcgggtatatgaatcatttttaagtattttatattttcttaacaatattatttaattatttttatttatattaatattaaaatgtactcttattttcaaaagacatgtgtacaaactataaataacttgtgcaaagttcaccaaaacgcttactaaaacttgaaactaaagactttgccaactgtagtgtggcctgtataaactttgtaaatgatcgaagtctagtaataccctttactttggcattgcagcactaattcatctttcacataggctatttttgtgcacagcagctgaaaactttcataactaatgcaattgaatggactctttacagacgataacgacatggaaaacagtattcaactggaaccaaaccaaacgatcgagaatcgaggcgataagagttacttgatcgtgtggcacgttagtcaacgttaaaaccgatgctttggtctaagtgcaaatgaatattaatagcagttatatgaatgcatacgtgtatgaacttataattcgatgtgcaactacacaactgcaggctagcgaaaggattacattaaactttactatttatctaactaacctaccttaaaaactaccacgatgacaaaatgggttctataaaataatttagttaaacaatttttaaatttgagcccgtgaggctgctccaattgattcttattgcttcagttaaaccaaa

SEQ ID NO: 17873 - DNA, 3588 bp, DROSOPHILA
atgatggacaacgatgatgcactgctcaacaatggaggaccacagtccggagctgaaactgtctacggtaccgaggacaacaacatggtcatgtcggagaagaatgaacaggttgtcagcatcgtccaacaactggcgggcagtatttatcaggaatttgagcggatgatcaatcgctatgacgaggatgtggtgaagaacctgatgccgctgctcgtgaacgtgctggagtgcctagatgcctcctatcgcatcaatcaggagcaggacgtggaggtggagctgctgcgtgaggacaacgagcagctggtgacacaatatgagcgggaaaagagcgcccgcaagcagtccgaacagaagctattggaagccgaggatctggccgagcaggagaacaaggagctggccacgcgcctggaatcggtggagagcattgtgcgaatgctggaactgaagcacaagaacagtctggagcacgccagtcgtttggaagagcgggaggcggatctcaagaaggagtataacaaactgcacgagcggtacacagagctgttcaagaaccatgtggactacatggagcgcaccaagatgctaatgggctcaacgcactcacaaatgagcacagcctccgaacgcatggatgtgagccgagcgagactgaatcctgtggcccgcagctcgggacccgtttcctatggcttcgcctcgctggagaattcggtgatgctggacacggagaccatttgcagtgtgggcagccagtcggatgactctggtccgccctcgctgcagaacgagctggacaatctcagtggaacgttagagcgtggagctgccaccgatgcattgcagcagcagcaccatgccacctcgccccagagtcccgacagcagtcccgttgtgccaaatgtgcccacaaatgttggtcgctcgactaccaaaaaggagcagcgctcggataacaatctctaccaagagctgtccttccaggacaacgaggagagtgaagagaatgagattgtcacaggcagctgggtccatcctggagagtatgcgtcctcaggcatgggcaaggaggttgaaaatcttatcatggaaaacaatgagctgcttgccaccaaaaatgcgctcaatattgtcaaggatgatttaattgtcaaagtggatgagctcactggggaggtcgaaatcgtgcgcgaggagctcaatgccatgcagcaatcgaggaccaagttgaggcagcgcatcagtgagctggaggatgagctgaagaaggccaaggagcaggtcaagcagcaaagtatgttctaccaaatgtggggaatgtttctgtgtattaactacgtcctcattttagacactgagcaagaggagaatgatgtgccgctggcacagcgcaagagattcacccgtgtggaaatggccatggtgctaatggagcgcaatcagtacaaggagcgtttaatggagctgcaggaggcagtgcgtcttacagaaatactccgcgcgtcgcgtaccgtagataatttagacagaaagtccaagcagagcatttggaagtactttagtaatctttttaccccctccaaccgcccaacggaacgcgttgcggacggtctcggaggggggccgatgtttcgtcacaccggcggaggaagccctgcccacagccatggatcccctagccgaggaagtggaggtggcgacaatcgcctggccctaaccagcggccagccgcccgtgcatccggccagcgctggtcttgccaacgcactcattatgccgaaagactatgccgaggagggcagttcggaaaggataagtgcaaggaggcgggaacagtaccgccagctacgagcccatgtccaaaaggaggatgggcggctgcatgcctacggttggagtctgccgattaacaaggccagccaggaggcgaatcccaatcggcattcaggaggtgtaccggtacccgtatattgtaatcccctggcggaggcatcgccccacatgaagagcatggaggctttggacaggcagatggcgagagtcagtctggagacactggagcccgagacgcaactcagttcgttcgtatggatatgcacaagcacacatgctgccagcacagtcagtgtggtagatgccaatcaatcggccactgtgctcgacgcctttcccatatgcgcgtcgcatttgctttgcattgcctccgtgcaaggagcgatggagagcgactacgccttgctggaacaatcggaagtggtcaaggcgggcgagatgctgcagcgaccgggcgagggtactgagctattgggcaaagtggagtttgtgcgagtgaaaccaaagtcggacgatgagcagaacagcaatgagaagcaacagcaggaggaggaggaggcgaaggaagccacagagaaatccaacgagcagctgccggctgtgagtgccgaagagccacttggcaatgtggaggccattaaaatacgtcagccactgccaggagctccccagcgattgtccacagatggcaaccagactaacaacaataataacagcagcagcagcagcaatcttttgtttgccaccaaatcgctgaaccccatactggagaccaaggatcgtgatgaaccggcaatgagctctgtaggtccaacaatgtggctgggcgcccaggatggctggctgtatgtgcacagcagcgtgggaaggtggcacgagtgcctgcaccgagttctcctgccggatgctgtgctagcgattgtacacgtggaggcgagggtcgttgtggcgctggccaatgcccaactggctgtgttccgccgccagacagacggccaatgggatctgaatagctatcacctggtgacgctcggtgatcgcaaccattcgatacgttgcctctgtgtggctggcgagcgcatttgggccgctcaccgcaacaagatcttcatcgtggaccccgtatcgctcaacattgtgcattcgctggacgcgcatccgcgaaaggagagccaggtgcgtcagatggcggccacgggagctggtgtctgggtgtcgatcagacttgactctacgctgcggctgtacaacacgcacacgttcgagcacaagcaggacgtggacattgagccgtacgtatccaagatgctcggcaccggcaagctgggctttagcttcgtccgcatcaccgccctaatggtgtcctgcaaccggctgtggatcggcaccagtaacggcgtgatcatctcagtgccgctggccgaagttcagcccaagtcatcatccgatccccatggtcagatgccgctctgttgcatggccaacgctcaactttccttccacggccaccgggatgcggtcaaattcttcgtatcggtgcccatgctgcagcagcccaatctcaatggtggactgaccttcaccaacaagcgacccgatatgctggtcatgtgcggcggcgagggctacatcgattttcgcataaacgataacgacatggaaaacagtattcaactggaaccaaaccaaacgatcgagaatcgaggcgataagagttacttgatcgtgtggcacgttagtcaacgttaa

SEQ ID NO: 17874 - protein, 1195 aa, DROSOPHILA
MMDNDDALLNNGGPQSGAETVYGTEDNNMVMSEKNEQVVSIVQQLAGSIYQEFERMINRYDEDVVKNLMPLLVNVLECLDASYRINQEQDVEVELLREDNEQLVTQYEREKSARKQSEQKLLEAEDLAEQENKELATRLESVESIVRMLELKHKNSLEHASRLEEREADLKKEYNKLHERYTELFKNHVDYMERTKMLMGSTHSQMSTASERMDVSRARLNPVARSSGPVSYGFASLENSVMLDTETICSVGSQSDDSGPPSLQNELDNLSGTLERGAATDALQQQHHATSPQSPDSSPVVPNVPTNVGRSTTKKEQRSDNNLYQELSFQDNEESEENEIVTGSWVHPGEYASSGMGKEVENLIMENNELLATKNALNIVKDDLIVKVDELTGEVEIVREELNAMQQSRTKLRQRISELEDELKKAKEQVKQQSMFYQMWGMFLCINYVLILDTEQEENDVPLAQRKRFTRVEMAMVLMERNQYKERLMELQEAVRLTEILRASRTVDNLDRKSKQSIWKYFSNLFTPSNRPTERVADGLGGGPMFRHTGGGSPAHSHGSPSRGSGGGDNRLALTSGQPPVHPASAGLANALIMPKDYAEEGSSERISARRREQYRQLRAHVQKEDGRLHAYGWSLPINKASQEANPNRHSGGVPVPVYCNPLAEASPHMKSMEALDRQMARVSLETLEPETQLSSFVWICTSTHAASTVSVVDANQSATVLDAFPICASHLLCIASVQGAMESDYALLEQSEVVKAGEMLQRPGEGTELLGKVEFVRVKPKSDDEQNSNEKQQQEEEEAKEATEKSNEQLPAVSAEEPLGNVEAIKIRQPLPGAPQRLSTDGNQTNNNNNSSSSSNLLFATKSLNPILETKDRDEPAMSSVGPTMWLGAQDGWLYVHSSVGRWHECLHRVLLPDAVLAIVHVEARVVVALANAQLAVFRRQTDGQWDLNSYHLVTLGDRNHSIRCLCVAGERIWAAHRNKIFIVDPVSLNIVHSLDAHPRKESQVRQMAATGAGVWVSIRLDSTLRLYNTHTFEHKQDVDIEPYVSKMLGTGKLGFSFVRITALMVSCNRLWIGTSNGVIISVPLAEVQPKSSSDPHGQMPLCCMANAQLSFHGHRDAVKFFVSVPMLQQPNLNGGLTFTNKRPDMLVMCGGEGYIDFRINDNDMENSIQLEPNQTIENRGDKSYLIVWHVSQR

SEQ ID NO: 17875 - DNA, 3301 bp, DROSOPHILA
gtgattccgactttcatatcaagcaagcaggctctactaccaaccagtgttgtaaatttctttcaaaacctttctgtcttgatgtttttccatttgttcgcttgtcagtttcgatcgataggcgccacgaatttccacgcccacttctatgccaacagctatctgatagtcgagaaaatcgactatatcccatgctaatgtgtagtcttttaccaaataatgtgtacagcaatttgttttgttcatgaaatttattaataaggcattttaatcaaaactgcaagcagctttgccttgccgggattcattattggaagcaattttgatttaaaggttgttaataatatgataacccactctaaactttgtattcgctgtcattaacatcacgtttgccttggcaatttccaagttccgcttttggttctcctcatccagtttcttcaatttctcaatgtgctcctcgatcatcttggcgcgagctggatccttttccatcctcatttcgtgctcgagctccataattttcagtttaaattgcctcttctccttgtcggattccaccacatgattcattgcaatggcaccatccatttttgtatgcagcgattgatatcaagttgtctttgcacgatgtgtattgactgaatgactaccactgcgttcgcagcgaactttgcacaatgaatgaaattattttttaagaacggtcactctaaagtacggggattccctcaattacaataaaatttctggaatttaacgcatgctgaaaatcgctgaagtcgaaaatgaatgacacatacgaagtaatgtattgttacaatgatatgaactaattatattcttaatatttgttcacattcgttgtaaatgaaaaatggtaaatataccagagagcttaaaaagtctgatacaccaagacatgattctggaatgaaacttttcaccactgccaccaaccggtcacactgcgtccaatcagctgttgccggaacttatttatagcctgcgttccacagatggtaaatccatccaggatcgcccgaatcgatggcatctctgagcgaaacacttcgtagccactggcccatcgctttgttcggtgtgatcctcttcgtggctgggggcacggagctctactggaacgagggacgagccgtgcacaatatgatggcgctggacgaggcacacgccgacatctactcggtgcgcttcacggaggaggaacaggaggtgggcctcgagggcagaatcgttcacctatccggacccattctcgtgggcgaaccgctcaccgaacccgactacaacattcagttgctggcggtgaagctccggcgacgcgtccaaatgtaccagtgggtcgaggaggcggtgtaagtggttgtggcttccaacgttccaactaactctaattccaaaacctacgcagcgagcacaactacggcgacagcgtgggaacgacgcattcggactcccgcacctactattacacgcgggaatggcgtgataagatcgtggactcgcgaaacttctacaaccgccacggacacacgaatcccagtcactttcccatcgaaagccacgttcaggtggcggatgccgtcttcattggacgctatgaactgggtgcggaggtgaaggagaagtttaacaactaccaggagctcacttcggacattcggccagaggatagtggcgtcaagctgcatctgggcatatattatcacaccaatgatgtgttcaatccggaggtgggtgacctgcgcctgctcttcagcttcgcgggaatggagggcgaggtgttcagcgtggtgggcaagctgtcgggcaacaaactggtgccgtacataacctcccgtggcgttccagtgctgctcgtctatccgggtgggctcagtgtccaggaagtgttccggttggaggctcgtgcccaggtcttgcacacctggtggtggcgcttcgtcggctggctgctgatcttcttcggcgtcacctgcaacaccaaaatccttcgtctgctgtgtgagtcctgtattttctaaaaaaattgatctcttgtactaaatggttatatctcctccagttgtacgggtgccgctattggtggccttggcacccgatcctcagttcccggttacgggcaacctactcatcgcattttcgctagctctgaccattgcggcagtcgcctggatcctgcatcgtcctgtgatcggcgcctgcctcttactggctggcgcatcgccttacgtctggttcacccgcaatctggtcgactaccatcgcctggactaatccatttcagagtcatctcaatattatttacaggtttatttattgttgattttcattgttgagccaaattgatcgcatttgccatttatccctcggccaataaaaacttaacacttagtaactaaactaaagttagaactccctgatgcccgcactggtggtggtgctgcccggtggcccacctcctcccccgcttccgctcgctcccgacacattgggcttggattcgctggaggtgtgcacactggggctctgtgatttgtcctgctcctcgtgaccatttggcgtttcttcgtagcgaacgtagggttcgaagctgttgttgatttgcacagatccgcgatgcagattgttggactcggcctcgaagagaatctcgttgatgaaacgttcggccagaagacgctgctcgcgcggcagtcgcttcagtttgtgcgtccaggtgcgggcgatggactcctcctccggatatgtgccagccaaatactcgcaggctatgttgagtagttcgtcggtgttgtgggcggtgcctgttgccccaggaccgccagtagatccggctcctgctcccgtacatggcggcgtttgcctggctcgcttgctgctcccataatccacatggttggttgctggcggtggcggtggcggagctccaaatgatttgtgaaacatctcggaaatgttgggcgtctgaccaccagcgcgtggtgctggataatggagggctgctccctggctctccagaaacgcactcgggcaattgctgctctcaccgaaggcgaagttgggctcgttcttaaaggcgggattgacggctagaaacttctccgagttgcgcagaaagtccagctcctgaaaggtccagcagcgtggactgtggaggctgcccgatcgcagggcactctccaccaccttcagctccttgcggtagttcgtgcgcagtgtgttgatcttctttttcacatcctccacggtggcgtcccgcttgagataatggtat

SEQ ID NO: 17876 - DNA, 1184 bp, DROSOPHILA
atttatagcctgcgttccacagatggtaaatccatccaggatcgcccgaatcgatggcatctctgagcgaaacacttcgtagccactggcccatcgctttgttcggtgtgatcctcttcgtggctgggggcacggagctctactggaacgagggacgagccgtgcacaatatgatggcgctggacgaggcacacgccgacatctactcggtgcgcttcacggaggaggaacaggaggtgggcctcgagggcagaatcgttcacctatccggacccattctcgtgggcgaaccgctcaccgaacccgactacaacattcagttgctggcggtgaagctccggcgacgcgtccaaatgtaccagtgggtcgaggaggcggtcgagcacaactacggcgacagcgtgggaacgacgcattcggactcccgcacctactattacacgcgggaatggcgtgataagatcgtggactcgcgaaacttctacaaccgccacggacacacgaatcccagtcactttcccatcgaaagccacgttcaggtggcggatgccgtcttcattggacgctatgaactgggtgcggaggtgaaggagaagtttaacaactaccaggagctcacttcggacattcggccagaggatagtggcgtcaagctgcatctgggcatatattatcacaccaatgatgtgttcaatccggaggtgggtgacctgcgcctgctcttcagcttcgcgggaatggagggcgaggtgttcagcgtggtgggcaagctgtcgggcaacaaactggtgccgtacataacctcccgtggcgttccagtgctgctcgtctatccgggtgggctcagtgtccaggaagtgttccggttggaggctcgtgcccaggtcttgcacacctggtggtggcgcttcgtcggctggctgctgatcttcttcggcgtcacctgcaacaccaaaatccttcgtctgctgtttgtacgggtgccgctattggtggccttggcacccgatcctcagttcccggttacgggcaacctactcatcgcattttcgctagctctgaccattgcggcagtcgcctggatcctgcatcgtcctgtgatcggcgcctgcctcttactggctggcgcatcgccttacgtctggttcacccgcaatctggtcgactaccatcgcctggactaa

SEQ ID NO: 17877 - protein, 376 aa, DROSOPHILA
MASLSETLRSHWPIALFGVILFVAGGTELYWNEGRAVHNMMALDEAHADIYSVRFTEEEQEVGLEGRIVHLSGPILVGEPLTEPDYNIQLLAVKLRRRVQMYQWVEEAVEHNYGDSVGTTHSDSRTYYYTREWRDKIVDSRNFYNRHGHTNPSHFPIESHVQVADAVFIGRYELGAEVKEKFNNYQELTSDIRPEDSGVKLHLGIYYHTNDVFNPEVGDLRLLFSFAGMEGEVFSVVGKLSGNKLVPYITSRGVPVLLVYPGGLSVQEVFRLEARAQVLHTWWWRFVGWLLIFFGVTCNTKILRLLFVRVPLLVALAPDPQFPVTGNLLIAFSLALTIAAVAWILHRPVIGACLLLAGASPYVWFTRNLVDYHRLD

SEQ ID NO: 17878 - DNA, 4260 bp, DROSOPHILA
tgccgtcaaaacgattgttcatatgaaagttttcttagttgttagaaataattcgactttataacatacatagtagtaataaaaataaaatatataatatcaataataaaacataaaaataagttaatttctctcctaatcatgaatcagtgcttttttaagggggaacttattgattcgccacactgtacctgtcccactgtgcgccatgcacttggcttgctgcaatcggaatcgggtcagcatcatgtaaacaaattgggtgcaagtgcactcgcactcgcactcgcctcccgagaatccgagagccacgaggccaatggacagcgcttatcgcacttgtggcgtagaatagactgattaaagtgccgttgacagctagtcagtcggtcgtcttgctaaaagttcgagatattaatccaaatgtatttcaattacaattgtatggtgtacttaaacttagcattaaggaactcgatacccaagcccagtgtcgccgtgcgtttggcagtggagtccgatcccacgaagagagtgacgaagagaaccgaaagcaggggagtagacttcatgctaaatagctataaatactatagcttagaaaataaactggttgttgactcttttagaatatatagtgtatttaatatatgaacaaattttataaaatactcataattttatcaagttcctaaagctcaactcaatcatcattaactagattataaataataatcaaattaattttagtagattattcatttaatattttaaatattttttttaaatatttattatgatttattataataatatatttaatataaatgtttattatagttatatatttaatataaatattcattataattatacatttaataggaatatttttttgatcccctttagcggcgcccctgctgataagtcagcaaagcgccgttatcgtcgcggatttgaaaacaacacagccgcaccagcgacgcgtacattgtgcgaactgacgtccccgggggcagtcgctgctgtaaaatccaccagttggataggattgacattaacaccaaaggaacagtttcactagcagaagcgcacataatttgagaaccagacatggccgctgaaaggcaggagaaacgaggcgaggaggagacgcagcccaggttgcccgacctcggctttgtgcgcgacaagcttcagaagttccagtccaagatgctgaccgacttcgagcagcggctgtcctgcatggtagaggatgtgctgcaggatctgcgacagcgcgagttgcgtgcccacgagttccccaacttcgagagatccgatcggaagagcacctggcacaatcgcgtgaccagtcaagcgccagcagacgtcagcgactccacaaatggccatgcaaatggcacgcatccaaggccaccgatccaaagcgaaacatccgctcgtaagcagcgacgacaactgcccgaaaaagtgttcgttgcccgggaatcgtacctcaccgctctgctgcaggtggagcacatgcgcaccatctaccacatcttttatattattctggtcatgttcctgctgaacgtgatctgctacgattactttgttgatggccgcttcgatctgggacttggcaccttccgcggcggactgcgccgcctccactgggtgatgggcgtttggctgctggagcatgtcttcgtcctggcgctctatttcgccttccgcggatgggccttggtcaggcacaaactgaaaccgcacagtaagtgggttgatccaattatcataaaattataatattaatttatggtcactatataaaggattgtaatgataatttatggaatcatatctgctttattaaaaatgcaggtagagttaaaagctcataacatagccttttgttgaggcacttgaccagcaaattgtgacgacatcgcctttaacaaaggaaattcacttaccagttactcatctcggttgaattgtacaacgtttacttgcgcgtttgctctgattgttaaaaaaaagcatttcccataaaagtaaagtaacttaagagaagataagtgcaggaatatagaaatgctattaataaaaggacgtaatttctttgaactattttctaatcctgcaggttctctccagcgcttttggtcgcacagctgtctcatcctgtacatcagctcccagctggtcttctgtttcgtgtcgacttcgctgtgcctcaagttcaacctgccctttgtgagtgcgtgtatcctgttgctcgagagcacgcgactgctgatgaagatgcacgcctttgtgaggtacaatgctgagcgcgttctgaatggcaaggccaagaaggaagatgcggaggaggagaaagaaggcagtgagcgaccctttgtgccgccgctgagctgttacacgtactttttgtttgcacccacgcttatctaccgagacagctacccgcgcacctcccacatccgctggaagtttgccctgaatcgactgttggaggtggtggccatagccttcctgtacgcgttcatccatgagcggcacatccacgagcacttcggacagtacggactggaaccaatgggaccctcccagctgatcctcaagctgttcggcatgatgctgcccagcgcggtgatctttctgtgcggcttctacctaatcctgcactcgtggctgaacttcacgtcggagctgctacgcttcggtgatcgaatgttctacaaggactggtggacgtcgcacacttacgatggctactacagaaactggaatgtcgtcgtgcacgactggctgtacgagtacgtgtacaaggatatgtacactcatgtgttccgaggttccaaggtggccgcctcgctggcagtgttcatgatctccgctgtggtccatgagcaggttctcggctttgccctgcaaatgttcttcccagtgatgttcttcttctttggggtcgtgggtgttgccttggtattcctaatgcggagtgctccaaaagtgatgggcaacatctttctgtggttctctctgatcctgggaaatgccacgctgatctcactatacgccatggagcattacgccctaaagaactgcaacctaagcaacgagagttggacgtatcgcctgctgccggcggtatggcgctgctacaattagtcaattagttaaacactacttttaaactgtctgtacacagggcgtacgcttcgatttgtattttaggtaaataaacttaatgaaattaacagaaacgatgtcttcagttcgtttcgtgtctttgaacttcccagctgaaccctaaagctatggtttcttattttacatcaggctgcctgatgctaacttatgaaatactacgtgagcattgacgagtgcgtccttggaagagcattcctcggcggcatggcatcctccgcctaaccgcagagattcgcgatggcctgagccgcattagcggctgccacctgtggagcgtcctctgccggaatgcgtttgcgtcggaatagaatcacatgcggctccggcgcgtggaccatgtagtgcacccagccggggctctgctgcacgcccaggttgcgccactccgtctcggtcatcagatgagccttcggcacatgtttggccaaatccggtggcaagataacatgcctgcagggagggaaagtggtttgtgtgtaaacaaacagttcacggatgctgaaacgcaagttgaacgtacctgtattcaaagttgtcgtcgaagtacttctctgagtattgaatttgatcggccggcattgcgaaaagccagaaaacctgaggtaaattaagcaattttaccaaaataggtcaataaattcagatagatatgccacaactgattcgattctaaatactattgttatcgctgcacgtatcgaacataaagttatcgatttggttatcagctgtccagttaacagcacctttggcggtaaactcaaatgtactgtttttaatggcacgatcttagcgggctttaatatattgaacataaacttttttctgtataacaatatttttgcaatgtttaaagccattttaaagccattttgttaaaaaaacgagtactttgtaaaaagatgctgttagaaaatgttaacatatttagcgaatgaaaaactcaattggataatatgtgatttccagtgtgaccggaactcgcaggctcgcacattttccaaatgcaatcggcaatttctccgttactcgcccatggccacatttgtg

SEQ ID NO: 17879 - DNA, 1885 bp, DROSOPHILA
ctgacgtccccgggggcagtcgctgctgtaaaatccaccagttggataggattgacattaacaccaaaggaacagtttcactagcagaagcgcacataatttgagaaccagacatggccgctgaaaggcaggagaaacgaggcgaggaggagacgcagcccaggttgcccgacctcggctttgtgcgcgacaagcttcagaagttccagtccaagatgctgaccgacttcgagcagcggctgtcctgcatggtagaggatgtgctgcaggatctgcgacagcgcgagttgcgtgcccacgagttccccaacttcgagagatccgatcggaagagcacctggcacaatcgcgtgaccagtcaagcgccagcagacgtcagcgactccacaaatggccatgcaaatggcacgcatccaaggccaccgatccaaagcgaaacatccgctcgtaagcagcgacgacaactgcccgaaaaagtgttcgttgcccgggaatcgtacctcaccgctctgctgcaggtggagcacatgcgcaccatctaccacatcttttatattattctggtcatgttcctgctgaacgtgatctgctacgattactttgttgatggccgcttcgatctgggacttggcaccttccgcggcggactgcgccgcctccactgggtgatgggcgtttggctgctggagcatgtcttcgtcctggcgctctatttcgccttccgcggatgggccttggtcaggcacaaactgaaaccgcacagttctctccagcgcttttggtcgcacagctgtctcatcctgtacatcagctcccagctggtcttctgtttcgtgtcgacttcgctgtgcctcaagttcaacctgccctttgtgagtgcgtgtatcctgttgctcgagagcacgcgactgctgatgaagatgcacgcctttgtgaggtacaatgctgagcgcgttctgaatggcaaggccaagaaggaagatgcggaggaggagaaagaaggcagtgagcgaccctttgtgccgccgctgagctgttacacgtactttttgtttgcacccacgcttatctaccgagacagctacccgcgcacctcccacatccgctggaagtttgccctgaatcgactgttggaggtggtggccatagccttcctgtacgcgttcatccatgagcggcacatccacgagcacttcggacagtacggactggaaccaatgggaccctcccagctgatcctcaagctgttcggcatgatgctgcccagcgcggtgatctttctgtgcggcttctacctaatcctgcactcgtggctgaacttcacgtcggagctgctacgcttcggtgatcgaatgttctacaaggactggtggacgtcgcacacttacgatggctactacagaaactggaatgtcgtcgtgcacgactggctgtacgagtacgtgtacaaggatatgtacactcatgtgttccgaggttccaaggtggccgcctcgctggcagtgttcatgatctccgctgtggtccatgagcaggttctcggctttgccctgcaaatgttcttcccagtgatgttcttcttctttggggtcgtgggtgttgccttggtattcctaatgcggagtgctccaaaagtgatgggcaacatctttctgtggttctctctgatcctgggaaatgccacgctgatctcactatacgccatggagcattacgccctaaagaactgcaacctaagcaacgagagttggacgtatcgcctgctgccggcggtatggcgctgctacaattagtcaattagttaaacactacttttaaactgtctgtacacagggcgtacgcttcgatttgtattttaggtaaataaacttaatgaaattaacag

SEQ ID NO: 17880 - protein, 559 aa, DROSOPHILA
MAAERQEKRGEEETQPRLPDLGFVRDKLQKFQSKMLTDFEQRLSCMVEDVLQDLRQRELRAHEFPNFERSDRKSTWHNRVTSQAPADVSDSTNGHANGTHPRPPIQSETSARKQRRQLPEKVFVARESYLTALLQVEHMRTIYHIFYIILVMFLLNVICYDYFVDGRFDLGLGTFRGGLRRLHWVMGVWLLEHVFVLALYFAFRGWALVRHKLKPHSSLQRFWSHSCLILYISSQLVFCFVSTSLCLKFNLPFVSACILLLESTRLLMKMHAFVRYNAERVLNGKAKKEDAEEEKEGSERPFVPPLSCYTYFLFAPTLIYRDSYPRTSHIRWKFALNRLLEVVAIAFLYAFIHERHIHEHFGQYGLEPMGPSQLILKLFGMMLPSAVIFLCGFYLILHSWLNFTSELLRFGDRMFYKDWWTSHTYDGYYRNWNVVVHDWLYEYVYKDMYTHVFRGSKVAASLAVFMISAVVHEQVLGFALQMFFPVMFFFFGVVGVALVFLMRSAPKVMGNIFLWFSLILGNATLISLYAMEHYALKNCNLSNESWTYRLLPAVWRCYN

SEQ ID NO: 17881 - DNA, 17330 bp, DROSOPHILA
cagcagcgtggactgtggaggctgcccgatcgcagggcactctccaccaccttcagctccttgcggtagttcgtgcgcagtgtgttgatcttctttttcacatcctccacggtggcgtcccgcttgagataatggtatatgggcaccaggcgcaaataggcctccgcccgcttctcccgattggtgtagtcccgcagcgatgtgtcccacagcacgggcagatccctgtatgtctggatgaaggcgcgcagatagtgtcggttctcctccgctcccgacatcaccttcaatccgtgcggcggcgtttgtggcagcattttgcgcggatctctggattaccctctgccaatccacgccagctgcagtccttggctatcttcaccacttcagcgaatcctggatggacctattgaccaactgtcaatgcgaacgaactgtgtttgttgtaattgcgcgtttgacagattgtttgccatattgacgtaatggttgtgtgcgagtgtgcgtgagcgtgaagatacagcaacaagtgcggacgtagtggcaatgcttgtcactggtatcgatacttcgccagcagtatttatcggtcaactcgttgttatcaagcgcgtatatttaaacaaagtagcacaaaagcaagtagttttaggcattcatttattaaatatatgagcaagcatacataaaattaactgtagcttatatagcttgcatgaaaaatatgattggaggctacaactgcaacaatagtaggatattaccaaatttaatttatcgacaggccaaaaacaacttaaacgaagaaaacagttctaattgattgttaatatagtgcagcttacaactattttatagccatagtcgtttaatttagttatatagcattacagggaataccttcaaccccttgcaagtgtgaccattatttagcgccgattgattctggtatttcgttcatcacatttgcgcgtatttcttggcgcccccgcgacggttacactgcgcggcacactacagcgaaaaaaattcgaaacagacgcgtttgtccgttgagttttgatttgtgattccgacgcgcagccgttgagcgcaattcgcttacattgttgatcattttgttggttaaattgctaaagcaggtacgcggtatcgctaacaagaggacgaagaaccgggcgacgctgcctatgcgcgtctgtgtgtgtgtgttttcgtgagccgccgctttttaattaaataataaataaattgtaacaaaaagtagaaaaacaaacaaacatggaaatgatgcgcgctaaatgcatgaaaacagcgtccagttaatgaaagtaaacgaatcgagtacaaacgaattatttgtctccttgtgcgttcgttctattgtgtttcgagttctgttggtgtgtgtttttgtgtatgttccacgagttgttcgccttaaaaaagtaactgcagaagatccatggaaatggagaccattgaagagcaatcgaagtgcggtgagtactgaaagagggcgcggggcgtggcagctccaaatggccggcgaatttatcatttttcaatgtcgcccaaaggggttgggtacggggtaaaaccacattcggggccaaaagatcctcataaaaaatgtcgctgccagcaaatgcaaaaaaataaaatgaaataacaacgactataagtacatctttgtgtgtatttgtgtgactaaaaaagcaacggcatcgtgtcgcagatattttaatctttttttctgaatttatttcggtgtagaaaatatttatcgcataaatgcgaaatgcctccctctcttcatcatcgtttcccctcactctccctctcttcggcgacactgtaccgacagcaagaacaacaacaacaactgaggcgccctaactgttgtgagagtaaaaagaaaggacaagcaacaacaatttaagcgatcagttcctgttatcattgatgcgaattcagccgtttttagccatggagttgtagctataaaagaaagtaaacaagaaactatcgaatcttaaaaaagtaaacaattaacaaaagatagatttaggtattgatgggaaagagaaatctctgctataaagtttttattatatttttaacatttttatttaactaaaaacaaaattgtttctaggcaattaaaattgttatactttccataagcctacgatttccgcaacgagaacgtgtaactgcaaataccacacaatttcaaaggttattgccttaaaaaatacgtgtaaatatgttgtacggcaggaatttttccagcgcgcggcataaacaaataaaattatcatttaatgtattttgtgtccgaatttgaggcgcaaataaagcatatatcaattaaaagtttataatttggttaggttataaaatcaattctcctttgatgttatttagcctttaaatgtgcatatgtatgtagatacttttgaaatcaactctacatgatatctttgtgtacttattctgtctgctccgctctaatacttgccgccaggtaagaagaagaatttatcctgctcgacaggctcttcgctccttctacttcctcctcttgttgcacagaatccttgatccttgctttccgggtggtttacctaccccgctggccgattacctcgtattccatttacacatgttgacagggcgcacatgcccatacaactatgactatatagcctgtagtccgtgttttccgtccctcaatgctaatggcattttacatggcccgcagaccttcggaatctgctcttcgcctacgtcaaggcttccgcgggatacgtacgtaattttattacaagatttttctttgatgactctgctctgctatttgacaaaatccgctacacagcgagaaattggttgattttatgtataatttaaacttgcaggtaaactgaggtttttttttctagagatttaaagtaattttctaaatattattccaaaattacaaaacgtctttcgtttaaaacacaatttttttacataaaatattttatttttggatttcattgtcacttaaaaatgcttttaggtctaggtcaaaagcaatagacacgagaatttaagtaaaaatcaaaaattgtcattttgggttaactatgatttcgcataggacatttttcgctgcgtggctgaatgcccagaaacccacacacacagccctcttcttccgatggcttttcatttctcagatgccactcaattagtttttcatcgtttccctggcaggcagccagcgaggaaaagtagaaaataaataacaacagcggattttgttcgggcaaaaaggaaggaaattcccgaatggcgaaaaatggtggccgccacctgtgagtctcggcactttctcacactcggaaattttgcttaccattttgcgtttaccttttctcctgacctcacttacataccttcttcttcttgtttgaaccgaagaagctaccacctgtggccatgcaaaatgcgatttcaggtgttccctcagcctgagctcgtcttgcatttagttatgttttagagcccgatccttgaggatctgcgaacaaaatgttacacttaccgctggtgcagttcaactttggcaaccatttgggcaaaaagagcaacaaagtggtcacggttcagcgacaatccgcctcctatttcacatatgccgccgacgaggaggtcaaacaggcgaagcttcgacaggccgccttgtgtcaggtgtacgaggattttacaggtatttcaagattcccagataaaccccttcaggtactcgtttccaagggttgaatatgcgcaaaagcaagagcaacatattcgccagagggaaacttaagtagggtaaagtctttcgtgaatcatccatccattcagccagaccatcgacaaacacctgggaaaggtgcaggaacagtaaaaataactatgtatttcataaataaatatattactttccgaggaaagcattcgatgtcatgttaaggtgatattgatttaaatgccagtcaagcaattcgtggaaataataaggcgcattaaacttaacaatatgtttcgtttaatagcttagaatgcatcattaaagaaattgttcatataaaaaattattcgcagaattagcatatatgacttttcatcgctaaaagcctctcgaattgaataaatcaaacaatttttttcacatttaatgatgtggacatttgtgcgttttaatacccatatcaatcttctacaaattctgaattcccatggagcacattccgtatcactggtttttattggattccacattccagtgatattcctaccttataaacattttgttagtccataaatcgccacgatttccattaggtaaattgcattgtttatcgcttgttttgggaatgcatatctggaatatctatttgaaaattccgagacgtcagagatgagaatacgacacgaactgtagttcttcctcagcattttcctggactttgttcaattgcacaagtggcgaatgtctcgccagatatagatacaagtgtatatagatgcaattggcatcggttacagctgcacaattctggataaaattaatgcaacaaagccgaccgccgtcagtggtctccacttgctccatgtggttgtgtccatgtcgattgggggtaaatgatttgcacttgaaaacattccccattctccattcccccaagtccattctcactcatttcgaatactctactttcgctgcctgtcaaaaactatggcaataacgaaggtcgcttcatttcggcgtctaagaaatcggcacaattaaaattgttgtcaacagctcgcaatttggcagcttaatgctgcggcttctgctgaccaggcccccatccgccatccgccatccgccatcctccattcttcatcttcgatctgtagtgtacatgtttactatacatcctcaaggggttctattttggttagccgctctgctctgtttcctcgcatttctttgttttattttgcacagttttccctcgatcttttaccccctccccccctccccctattcacagcacattcaattgcataaacaaacaaatccaaaaaatagccattaatcaaacaaaatcttttctccagtcgcctgtaaacagaagcgagttgaaagtagtgtatgggttgttgaagggtcacacggatatcgaactgtaattaattatgctgccaataaaatatttattttcttagcagtttgttaaaattgattttgttgggaaacattcataaatcacaaatattttaaataagcggaaaaatactgtattttggcctaagaataatgtgtgttaaattttcgcattggtttttatattgtgatagtctagagtattttatataatgtaagattgaatggaaaaacccctttttgatcgacacctatgaacggcatatttatttgcttgatttacgcctgacatgcacttaaccccatgccattggtcatttctgatttttgagagcacacaatgcatgtttctgattttttaatgacttatacccattcatttcgccccatccagagatgtccataacaacgctgcccacgcgcatctgcctggtgggaggcgttggccaggatgcggacacgctgcaggcagccgaatcctttggcctgcccatcgttacgtcggacacgggtctggacattctcggagagtcgtcggactggcggacattctacgtgctggatgacttcgagggtgccagcttcgaggcgatacacaagcaaaaggaatggtgagtacgattagaacctataactagtcactggtactaataataactcggccagaagctgaggaacaataaggctgcttaatttagaccaaatctgtcacatgtgtccagctgtccgcccccacatccttctccttactgtacaacccacttttctcttctttctggctatgaagagatgcctgaacagtcaagagccattatcacatcgccatgctgagccgcagcaaattgagtttgaaatcgagacacacgcacgagtatactacctatcttcgctccaagagccccaatgtggatccactcgttggccaccagtttcaagattgacagcgtcagccatgcgccagatataccacacggctcctctgcccgcttccttccgattgcatacccttcctcggggtatttgaattgggtaaacagtgtagtttgctacaaaacatttcgatttgtttacactttcgtatgtattgcgtggaaagaaagttacgattgctcgatgcccataaactcatttgaagtagtatctttcagcaatggccttaaatgcattttcaattgcaaatgtgcacacctgtgccattttgtttgtgtaatatagaattatgtttattatttgattacctcaagctctaatagtaaaccaaaatttagttggagtccccttatgatttttgtacaatatttctaaagattttttcggaatttcccatcaatatataatatagacattatgaccacaaagggtatatatttaattcgacttgccggcataagcttgcaaacacttttcgctttctacaaattgttgtctaatttgaaacttgcgcaaatgtttgttcttttgctccatatagatatatgtattttatttggtccggttatttggattggttggggttcttgatttttttgcacgcttgattaatttgcctgctgcgtagtaatagcctccaataacctacacgctttttgatacgaaatcatacacattcgatttaatatttgttttttggcgaccccacctctgccctgtctcattagttattaaccataagtttgccatactttggttagcgtttatttacgagcactttttttggaggtcacctagtgcgttaaagttgttatgaattcggggggtcggtgggcgtctgttttccgtttcatgttttcccaacacacgctctgcttgtaaggaaacagcaaagaaaatgcgaaacagggaaaaaagagccaaaaagtggctttgttccccccattaagaattattattatttatctcatagattttcattcatgtttcggttctttttgttattgcaatttgtatttggttttcatcgctttttttcttctgctcgccaaatgagcgaaaaataaaacaaagctaaggtgcgcataagttgtttttttcactgggctaattatatttcatgtttcatatatttttttttttttagtattccatctataaatttaattggtcttagcctatagaaaaacataaactggtattaaatatggaatttgtttatcatccggaaaactacgtagaaagtttatttgcagcgttagttgtttattttttaaataaatatgcactttgtgagtttgtttttgtcaactgatatgaataaatcgtgactattaaatgcacctgtatttaaattgagcattaaagtttatataatccatcaaaggcttttcacggttttgacaaagtattttcttagtttatcccaaaacattcattaaaatgaatataggctattcctgcttatagtcatggatcataaaatatatatagaaattatcattattttttcaagttacaattaaattgtaattagttctagtgagttagtacttttgttgcactaatgcagttctgattaaaaatacacaaagatcatagggaaacagaggaattttaatgagtttttctcaggaatcgcagataagtgaaatgaatgaccaaggggcactttaacggccacttaacctcgcccaaaatgatgccacaaagatcttgttaatcggtgttcccacagcatggccgatatgagtgggggatatatacattctgaatcataggaacgatacattcgcataatgggggaagtctcggagcaattcattgcctattttggggacgtagcgaactgcgaatgaaatcggtttaaaaatgaaaacaaataaaacgctggcatgacaatttcaaatagtatttcttctaaagaaattgaaaatgaatcgttttgaatattttttttttgggacttctcttgggaagcaaaatcttttggtgccattggccaagtttcatctgaataaaattgaggaggtggaggcattgcgacaatctcttggcgccaagaatctataggaattcgtgtattttcagatcgagcgatgtcaaatcaagtcgaaagtgttgaaagaagtgtttgggaaaaaacggaaattctctaccataaaaaaaaatataacacaaatcgcgaaaaaagatccgaatttatggtttttattgaggcatttatgtgatctgcgctctggagtgtttacatacatatatttaaatatttcttgtatatctgcgagggagtatataatttataagttttgatatggcaatttaattgagacagcacgagaaagagcccgcgaacgacatgtcattgactgttctatagttttgaccctcgcaaagttcgagtgccccgtgttcagtcaaagatcggcgcactttacaaaagaatcgccactaccacccagagatggcaggtcatccgttgccgaggccaaaaacccctagatcccccatattccgcgattcacttcaatccgatcatcatccatcgcattcatctcatatgaatattgttgtgtcgagcacgcgcggcgcatttttatgctttgactaagcatctgaattttcctgggttttccttggatcccaatgcgaaaaattgaattgttctttggaatttcatttctttgatgcctgctgcttaaatatttggttgactcaactctctttgcatttcacctgtctcgcttgatttctttgtttacggtcgcctctattttctttactacacacagaaaaataaggtaaatttgtagaaggaatatggatatgaaacaaaatggtggctaaaatgtgctaaaatatcatgaattcttgttttatattctgaaattaaaagagacttattcgaaaggcttatacaaaattggatctaaatatctttctgtgtagatcgcacattctcgcattgagagtgatgtttgcagttctttcttataagagaaatataggaaaatatcacgcctgtatagcatttgccacttatgtgccacattaagtgatgaggagagaacaagctgcaaagtggggaaaatccgaggaaaagcggggcaggagccaagagggtggaccgcctggcatgtcaggcattttctatttccattctccattcgctcgccgcggtcccatcgtttattcaataattttcccaagcaacgaggctggcagttgtgtttgtttagttgcccggatagaatcataaactcttgtcgctcggttcctccggctagatgtctcaacttattcatactctcgttatggtgctctgaatcaggcaaaatcgttccgtttgcccgcgacaaatatttgagcatatggaaatgaaaatctgcctttgttggtaaggttaactgaacctaacagccagaaatgtgggtgaaatgtgtaaatgcgagtgaaaactgatatgatagcaggctcgataaaatagaagaaagtgaaagtgaatctaacaacaggaagttaacctgagaaaagtctaagtctaagaaagtgaaagatcaagtgaaatggagtcaggggagaaaacggcaaaaggaagatggaaactgtaagtgtgaaacttattgtgataacatcatgatatcaaagttaaggcaaactttctatagaactatgataaataaagttattacactataaatgaaataccttaaatgatacaacattttatatgcaaatactttggctttaagcattcataagaatctttggaattcgcaaaaaaacgaaaaattctaaaaacgacgtaaaattaatttgttgctaattatagaatgccccattcaaatgttttaaatggtttttttttttgaatacaaatctttagcaggtttgagtattatccaagcatatctctctccccagagattcaaattcgaagaatcattcataaattctacccaaaatcaaaagcattactcaatgcatgaaccgcaaattgttttcgattcttccccacagtcataattataattacgccttcatgaggcacataaataaattaagtgtacacatttaatgtatgataaatacatccccctacgcccactaggtgcatttaaacaatgctcgacatgtcagcttccgctcgattgatttgtttataagaacttccggctttgtgccagttgggatgcggaatgggttttgaggatgggctggctggctatccaacagctgtcgatgtccggtttggtaaacaaatgagcccttagtctgattgggatggcacttcagtcaaagttcagtaaggcgaaaagcgccaagcaatcgaattcttttacatttttgtgtccggaatgcaaacgggcaaaaaagataccgatacgcaaccgattcgaattgaattatggcaactgcaagtgcaactaccaaggtcaattggggcataaaaaccagattgccttgcataactcaaaagtgtgccacataaatatttaattgtctctccctttatatcacttgcagcattctgggaccgccggctttgaagtacgcggccgagatgaaacagacactgggccagaactcgcggcccatttacaattacgcgatgcgcggcgtggtcacttgttttacaggcatacgcaagaaggatgagctggtgagtggctgcctccatttggtagtcttctctcgtaactaatatgcgaaatattttattacttttttttacagacaaagctggtcaatctcattcactcgatgggtggctgcatcaagaaggacctgaacacgaagaccacgcatttgatttgcaaccacagtggcggcgaaaagtaccagtgagttcttaattcaatgaaaccttatacaaaaggtttgaagtttccttacagccttaactaaaacttggcgtactttttttttttttgttaggtacgccaaaacctttcggttgaccgtggttcgtcctgcttgggtgtttgccgcttgggcggatcgtaattcgctggagttcgatgccacgcaagagaatttcaccaagacgcatcgcctgaaggcattcgagggtcaaaagatttgcttctttggattccctgtggaggagcatcagcatatggtggatgtacttttagaaaacggaggcgtttgcgccgagctcgatgatccggagtgctcgcatgtcgtaagtctgccctttttaatatttaatgcctaaatgcaagctttttcggtagtttggaatttgtaatttgcatgctggatatatttattgtacatgctttttttgctgtttcgaacagctaattttcttacccacaaaatcctaatacgtgtgtcttccaggtgatgcccaatacgggcgcagtatttacaagcactagcactagcacagatactaacccaagcaccctaattaacccacccgaatcccaagtcccaggcagtagtagtgcatcgcaggcgggggaagaagagcaacgaaaggctgagcatcttgagcaggcggaaatcaaaaagatggaatactcacacgcggaaacggacaatggaatgagtttggacattgaccaggagcaaaaagagaatcaaggcattgaagacgaagatgacatacactttgacgaacgcctgtttgtggaggcggccgatattataaaccacggagaagaccaattgcctgaatctgatgaagaagacctggaggaggagcagaaacccaaggtcgaggaggttctaaaagaacaggaagttgaggaggatgtgcaagccagtacgccaaagactagtaaaataagaactagcttaaaggctgccacgcctcttagctcacccgaaatggatggcattgctttggacttcgagagcaccacccagaacatttcacccattttaaaagctattgacgagtgcgacttagagacagatgatctgccgccttcggagaatgatctaaagcgcaagagggaaagcttcgacaatgtgtccctgatgtcagtggactcctttgccctgccggcgagcacgaaaaaacccaaactcatacgcacaggatcaatttcgaggacgcttcggcgatctgttagcttcgttgccgaaccattgatgaaaactttacgaccacgcagaagttcagtggcggatgcatccagtttcgttggtagcgaggcagccgataattcaatttgctcactagcctcttccataaatttaaccctaaacgactccattagaaagccagttaaggagaagctgcgcagcttttgcggcaggattacaagaagcagcagtcgtaggcatgacagaggtgtcgacggcactccggaatgtacgaccctattggatagtggcttcaagacaccaaaagcacccaagctcagatctacggccacgcccaaaacagccaagcgactcttcggccccgtctccggtgttgtttccgcattgaccctaactaacccatccacacccacaccgaatcctaatccgaatacgaattgcaccgccactttggatgtcaacgatacctccatacacacattcgctttctgtgctgctgccgtcacgcctgcaatgccaccatcatcatcatcatcatcgtcatctcccatactatcgacttcgatcgctgtacatagctcggtgcaagtaattaagtctcccgaagagtcgacaacgaggcgtaacagccccgcgcccatagaagagcccatggcaatggtacttttaaaattcaaaagtgttttcttcgaatgatctattcaaattaaaggacacgctttggaacggcaaaatatttaaagtgggagaaaattataaaaagcgagaggtttccttatacaatcaaacattaaacatttataaacaaacattttatatacatttttttttagcttttgtgtaatgattttcatctgcgatatatttcatcttttacgatattctcaaataccaattgtatgattgtgtgatgtattttaaacatctgatccactatcttccatttttctattgtgttgaattaaatatgttcgagcatttttaacattttttcagttgctgtgcgaagcgatttccctcaatcctcccgccatccattatccagcctccttccatcccaaatgttttgttaattgttatttaatggttatgccgtagcttaagtcacaactcatataacatctaatttggtgcggtgtctggaatttcttctgtaaataactttggtttcctatggtctactcaaatttttttttctggccagcgcacaaaatacaaagaattaaaaacacaaccaaacaaagcagcacaataagtatttgaataacatttatttgccacacacaaaacacacacaatcccccacacacacacacactctggttatagactttcgttcagcttgaataaatgttaaaaatgccaactagaaaaaacagcgtagataaacaaattgaaacaataaatggagaggagaataatatcgagcaaacctttaactgtctagcacgagcgatttcttcgcatttgggtgaattattattattttcttgatggactaacaaatatttacacaaatgttactcgttctcggggcaaagcaatttgcattaatgttccgtagctacacacttttgcctcgtttcgttcgccaagatctttgccgtttcaaagtgctgccaaaaatgtgcactaaaaatgttttgtttggcctttttgcatttgatgaatgtgttcaaaatttattgtgcttgctgctgctgtgccgagctatatctatatctatataccatctatatagacgcttgattgactccgtttcgtataatctaaattagccagcaaacaaaacattttttgcgatctagcacattccgcatctcttttatacacacattaaacgatggatcaccgatattaatttgtcatgttctcttccgttcaggtggttgacgagcacacgactttgacgaagccggagccgaagaataatcacactcatatcctgaaatcagactggttctggtataccatacagaatggctatgccaatgagatggactatctgtttggcgacgtaagtagatcactattaaattgtttaccagctgaaactaacattgaattacttttgatcttactttagtatttggatagcatcacgaatacaccgaacacagatcgtcgggattcattgcccattagctttaacaaaaggaaacgcaagcgtttttcgcaacgcatccagctggagggtactccgttgggttctggtaaacgacgctcctccgtttcggatgccggtctattgtctgtctcaaatagtttattcgattgtaccaccagtccggataaactggagtcggacaagctgttgcatgccgagccggaggcgagcgatgccactccagccaagaaatcgatgcgctttaatcactttatggacttttataccacagagtccaactacgtgggcatattggacaccatactgaatgtaggttgaatattttcttaatgatgtttttattttcatttattttttactactcgtctacagctttttaaaaacaagttggaagagttggctgaaaccaatgatccgctgcttaataagtcggagatcaagacgatctttggcaacttcctgcctatccacgaggtacaccaaagcatgctggagcatctgcggaaattgcatgctaactggcgggaggattgtcttattggagacattatcattcaacatcgcgacgagctgataaaggcgtatccaccatacgtcaacttcttcgagcagatgaaggagcaactgcagtactgcgatcgggaatatccgcgtttccacgcctttctgaagattaatcaaacgaaaccggagtgcggacgccaaggtctacaagatctgatgatccgtccagttcagcgattgcccagtatcagtctgctgctaaatgatatattgaaacatacgacaagtggcaatgcggaccacggacgtttggaggaggctctgaaggccatcaagcaggtgacactgcacatcaacgaggataaaaggcggaccgaatcgcgcatggccatcttcgatatattcaacgatatcgaaggatgtccggcgcatttagtgagttccaaccgcagctttattttgaagtgtgaggtgaacgagctctccgattcgctgagcggtcgtggtgatagcctggtcctgtacctgttctccgattccattgagctatgcaagcggcgttctaaaggattcaacactgcaaaatcgccaagcacggccaagacgcataagcatctcaagctgatatctttgaatacgatccggttagtgattgacatctcggatagtccaagagcttttggtttgctcttgcggggcgataaggagaagctctatacgtttacgatcagtgatgaggagacagataagtcggtctacgtaaagaaattgtgcaaccagattgcagcccacacctgccgtactgatgcggtaagtggtagcatacatagatagttttatgttctgaaattcatgttcttattcttgttttgcaggacaaacttttgatttgtcgcacctcccaggaactggaggtggacataagtgatgtgaatgtcagcacgctcagcaaagcctttaaactggcggccaaaacgcgactcaaggtgggtcctcaaaactttttcagcttaaaacttttctaatactaattttcgttcttttaggtgggtcgtgctttctcctttaacaaaacgcccaacaaactgaaacgggccgtatccacgatgatgacttcgccgtttggcagcaccaactctctaacacctgcctctcaattggcccagatgcgtttggccagctgcacgaatataaatgtgtgtacaactacagcatcgatgtgaacaaaaactgatgtataattatatttttataggaggttgatgatgaggactgtgcaagcatgcgaagcagttcgccgtcaacacaatccgagatgctagtggtaccgccactttcggtgcaacccacgcggaaaaacaaggccgttgtgggccgcatttagagctgatgatgatgatgactccacagtcaaattgtgtattccattttggaagtctctttttggagagactcgcttgcagtgctattccttgagcattggtcgcccatgtccgagtgcatatacaagcttcgaattcgtaatctcacaacacaaccagaaacaaattatcgagcgtccaatattgtttagattgtaaaatgtattgttaagttgcacctgtcgataggaaggctcgcaaatgttgaagcgtttgcccgagctgtcgattgatcatgattaacttgtaaatagttctccatatgtgtactcccgtgcccgtataattgtgtcgcgtcgctaaatgtaatcaactactcattgcagtgactagggatcgaattcacgcacgcaccgaacgatcgattcggatggttttcggtcggatgatcgccacaccgcaacaagctgtgaatgtttactgagtaaattttttaaaaaccctatcttaccatattgattataactcaacgattttgcttgagtaggcaattacgaccctaagtcgtaaggcgttcaaagcatgaagatgtttaagttaatatatgaacaatgattaaaggaaaacatttttaaatcaaagcattttttattcttagctttgaagctgcaaagtaggcaacgaattacacaaacttcgacagttaccacaatctcacccgaaaagatgcaattgttgcgcatagaaaattaggtttttaatttagtctatagaacaattttgtaggggcaattccaagtaaatattcatatacaccaagccaatcatatcttccacacttacgaatctggtgtacaaaaataaaaatatactaacgtagaggacctaaacaatcgctttcagagtgtataaaccgatttgacgcccgaattgaatttggacattgcatcggaatgaagttgatactgcaaactatgcgattgcaaatgaaggagtatcttcagcttctggccgatctccagaatggccatttcgttactcccgttggcagtccaaaccgctgtaatagatacagttttttatcaatgtgcagaacacatttgataaacttacagattttgttgctcttgttacgtatattgatgacagctcc

SEQ ID NO: 17882 - DNA, 3157 bp, DROSOPHILA
cactgcgcggcacactacagcgaaaaaaattcgaaacagacgcgtttgtccgttgagttttgatttgtgattccgacgcgcagccgttgagcgcaattcgcttacattgttgatcattttgttggttaaattgctaaagcaggtacgcggtatcgctaacaagaggacgaagaaccgggcgacgctgcctatgcgcgtctgtgtgtgtgtgttttcgtgagccgccgctttttaattaaataataaataaattgtaacaaaaagtagaaaaacaaacaaacatggaaatgatgcgcgctaaatgcatgaaaacagcgtccagttaatgaaagtaaacgaatcgagtacaaacgaattatttgtctccttgtgcgttcgttctattgtgtttcgagttctgttggtgtgtgtttttgtgtatgttccacgagttgttcgccttaaaaaagtaactgcagaagatccatggaaatggagaccattgaagagcaatcgaagtgcgagatgtccataacaacgctgcccacgcgcatctgcctggtgggaggcgttggccaggatgcggacacgctgcaggcagccgaatcctttggcctgcccatcgttacgtcggacacgggtctggacattctcggagagtcgtcggactggcggacattctacgtgctggatgacttcgagggtgccagcttcgaggcgatacacaagcaaaaggaatgcattctgggaccgccggctttgaagtacgcggccgagatgaaacagacactgggccagaactcgcggcccatttacaattacgcgatgcgcggcgtggtcacttgttttacaggcatacgcaagaaggatgagctgacaaagctggtcaatctcattcactcgatgggtggctgcatcaagaaggacctgaacacgaagaccacgcatttgatttgcaaccacagtggcggcgaaaagtaccagtacgccaaaacctttcggttgaccgtggttcgtcctgcttgggtgtttgccgcttgggcggatcgtaattcgctggagttcgatgccacgcaagagaatttcaccaagacgcatcgcctgaaggcattcgagggtcaaaagatttgcttctttggattccctgtggaggagcatcagcatatggtggatgtacttttagaaaacggaggcgtttgcgccgagctcgatgatccggagtgctcgcatgtcgtggttgacgagcacacgactttgacgaagccggagccgaagaataatcacactcatatcctgaaatcagactggttctggtataccatacagaatggctatgccaatgagatggactatctgtttggcgactatttggatagcatcacgaatacaccgaacacagatcgtcgggattcattgcccattagctttaacaaaaggaaacgcaagcgtttttcgcaacgcatccagctggagggtactccgttgggttctggtaaacgacgctcctccgtttcggatgccggtctattgtctgtctcaaatagtttattcgattgtaccaccagtccggataaactggagtcggacaagctgttgcatgccgagccggaggcgagcgatgccactccagccaagaaatcgatgcgctttaatcactttatggacttttataccacagagtccaactacgtgggcatattggacaccatactgaatctttttaaaaacaagttggaagagttggctgaaaccaatgatccgctgcttaataagtcggagatcaagacgatctttggcaacttcctgcctatccacgaggtacaccaaagcatgctggagcatctgcggaaattgcatgctaactggcgggaggattgtcttattggagacattatcattcaacatcgcgacgagctgataaaggcgtatccaccatacgtcaacttcttcgagcagatgaaggagcaactgcagtactgcgatcgggaatatccgcgtttccacgcctttctgaagattaatcaaacgaaaccggagtgcggacgccaaggtctacaagatctgatgatccgtccagttcagcgattgcccagtatcagtctgctgctaaatgatatattgaaacatacgacaagtggcaatgcggaccacggacgtttggaggaggctctgaaggccatcaagcaggtgacactgcacatcaacgaggataaaaggcggaccgaatcgcgcatggccatcttcgatatattcaacgatatcgaaggatgtccggcgcatttagtgagttccaaccgcagctttattttgaagtgtgaggtgaacgagctctccgattcgctgagcggtcgtggtgatagcctggtcctgtacctgttctccgattccattgagctatgcaagcggcgttctaaaggattcaacactgcaaaatcgccaagcacggccaagacgcataagcatctcaagctgatatctttgaatacgatccggttagtgattgacatctcggatagtccaagagcttttggtttgctcttgcggggcgataaggagaagctctatacgtttacgatcagtgatgaggagacagataagtcggtctacgtaaagaaattgtgcaaccagattgcagcccacacctgccgtactgatgcggacaaacttttgatttgtcgcacctcccaggaactggaggtggacataagtgatgtgaatgtcagcacgctcagcaaagcctttaaactggcggccaaaacgcgactcaaggtgggtcgtgctttctcctttaacaaaacgcccaacaaactgaaacgggccgtatccacgatgatgacttcgccgtttggcagcaccaactctctaacacctgcctctcaattggcccagatgcgtttggccagctgcacgaatataaatgaggttgatgatgaggactgtgcaagcatgcgaagcagttcgccgtcaacacaatccgagatgctagtggtaccgccactttcggtgcaacccacgcggaaaaacaaggccgttgtgggccgcatttagagctgatgatgatgatgactccacagtcaaattgtgtattccattttggaagtctctttttggagagactcgcttgcagtgctattccttgagcattggtcgcccatgtccgagtgcatatacaagcttc

SEQ ID NO: 17883 - protein, 851 aa, DROSOPHILA
METIEEQSKCEMSITTLPTRICLVGGVGQDADTLQAAESFGLPIVTSDTGLDILGESSDWRTFYVLDDFEGASFEAIHKQKECILGPPALKYAAEMKQTLGQNSRPIYNYAMRGVVTCFTGIRKKDELTKLVNLIHSMGGCIKKDLNTKTTHLICNHSGGEKYQYAKTFRLTVVRPAWVFAAWADRNSLEFDATQENFTKTHRLKAFEGQKICFFGFPVEEHQHMVDVLLENGGVCAELDDPECSHVVVDEHTTLTKPEPKNNHTHILKSDWFWYTIQNGYANEMDYLFGDYLDSITNTPNTDRRDSLPISFNKRKRKRFSQRIQLEGTPLGSGKRRSSVSDAGLLSVSNSLFDCTTSPDKLESDKLLHAEPEASDATPAKKSMRFNHFMDFYTTESNYVGILDTILNLFKNKLEELAETNDPLLNKSEIKTIFGNFLPIHEVHQSMLEHLRKLHANWREDCLIGDIIIQHRDELIKAYPPYVNFFEQMKEQLQYCDREYPRFHAFLKINQTKPECGRQGLQDLMIRPVQRLPSISLLLNDILKHTTSGNADHGRLEEALKAIKQVTLHINEDKRRTESRMAIFDIFNDIEGCPAHLVSSNRSFILKCEVNELSDSLSGRGDSLVLYLFSDSIELCKRRSKGFNTAKSPSTAKTHKHLKLISLNTIRLVIDISDSPRAFGLLLRGDKEKLYTFTISDEETDKSVYVKKLCNQIAAHTCRTDADKLLICRTSQELEVDISDVNVSTLSKAFKLAAKTRLKVGRAFSFNKTPNKLKRAVSTMMTSPFGSTNSLTPASQLAQMRLASCTNINEVDDEDCASMRSSSPSTQSEMLVVPPLSVQPTRKNKAVVGRI

SEQ ID NO: 17884 - DNA, 3784 bp, DROSOPHILA
tcttcagttcgtttcgtgtctttgaacttcccagctgaaccctaaagctatggtttcttattttacatcaggctgcctgatgctaacttatgaaatactacgtgagcattgacgagtgcgtccttggaagagcattcctcggcggcatggcatcctccgcctaaccgcagagattcgcgatggcctgagccgcattagcggctgccacctgtggagcgtcctctgccggaatgcgtttgcgtcggaatagaatcacatgcggctccggcgcgtggaccatgtagtgcacccagccggggctctgctgcacgcccaggttgcgccactccgtctcggtcatcagatgagccttcggcacatgtttggccaaatccggtggcaagataacatgcctgcagggagggaaagtggtttgtgtgtaaacaaacagttcacggatgctgaaacgcaagttgaacgtacctgtattcaaagttgtcgtcgaagtacttctctgagtattgaatttgatcggccggcattgcgaaaagccagaaaacctgaggtaaattaagcaattttaccaaaataggtcaataaattcagatagatatgccacaactgattcgattctaaatactattgttatcgctgcacgtatcgaacataaagttatcgatttggttatcagctgtccagttaacagcacctttggcggtaaactcaaatgtactgtttttaatggcacgatcttagcgggctttaatatattgaacataaacttttttctgtataacaatatttttgcaatgtttaaagccattttaaagccattttgttaaaaaaacgagtactttgtaaaaagatgctgttagaaaatgttaacatatttagcgaatgaaaaactcaattggataatatgtgatttccagtgtgaccggaactcgcaggctcgcacattttccaaatgcaatcggcaatttctccgttactcgcccatggccacatttgtgcatgtgcgtttgaggttcctttcctttttatataagcccctcgtctcttgccaacaaaccaacaacaacaacaaccagccaggccagcgggcaacaacaacgcacaacaacgcgtataaataaacgtgaacgcatgtacttaatattagcatagagttgtcgcctgcgtgcatttcatatacataacataacatccacttactcccatgacaacgggactttagacagtaacggtggagcagctagaagaagaggaaaggcgaagtagaacgggaacaagaagaaaaagcagtggaagaggtgaggacgatacgtaaatacagtcaaacttccataagtagatacgactttactactacaataaaaagtgtcctttagtgatgaagaaaatgggttctaagaacctaaaacctttatgtatatgtactccctattgtcgcttaatgaatttaccgttacggtatgctagtaaataaatgcatacaatgtacatatgtagatacataggcacagcaaaaccacctataaattcgattgattttatgaagttctagttgaggaagtttgactgtatgtatgcgcgcattggtaaatacgagcagaccgcaattagcaaatatttttcagtccagcaggtatcactcaccacgtaccgcccaaaggtcccaatgctggcgtagagaagccgaaacacctgctgctgccagtggaaaagcgggaggagctgctccaaactgcccaggtgacatccaatcatttagaggcgacgcacctgccgccttgaggaactggtcgccacgcaggaggacacggatacggcaacggttacggactcgtttccgcagtagcgggcaccatgaacgccagcctcatctatgagatacttatgtatctgaactcgttctactttggcatgtacgccgccttcgaagtgggcgtgggcgttcttaaggcgattaatctaaactacggcgagaacgcgttgtcccgggaggccagcatcctgctctcactgtgcatcatcgagaccgtgcgcattgtcttcgggcggaagagcagtctaagcgatcgtggtgagtaatccccatgatccccatgttactgcaagggtgggaaaagtccaccggcagcgatgatgacatggcgaaattatttgtttgcccggtcacaatgcccatttcatgccatccccctacctccggggccataacccataaacgtttggacgggcatacatacatatatgtatgatgtagcccactcggcgtatgcgtaattatggtcatcaccccggatgaaaacacgcgttttatggtggcaggggaaaggcgcccttctggcacattaagcaatatgcaaaggaaatctatcaaagcgaatcatcgaaatgagttattggaaaagcaattggagctgttaatattaattatcgcaatgtgtaaacatgaaattattagtataatactttaaaacactgaatcactttcaatcgaatacacttaattataaacaagtagacgaactatacgattttccgtgcatctgtagctaacattttccttgtttttctctctttgcaggctggcaagcaaccgcatccgtaatattaacactgcccagtcttgctattgttatctacttgtgttgttttcaaacctttgttctcaaactcgaaattattctgagtgccttaatgatcaccctacaaggtgctgaactagtctacgccagcatattcatttgtacaatgtgtcgccccgtcacatacacctagcagttgataagccgcgttgccgccgccacgtcaacgaccaagatcgagatcaagaccaagccagcactaacactcccacctggaggagaaggagtagaagcatccacagccgagcgacgactacgacgaagacgaaacactttcctctggcaatttcacatcaaacgattcgccaaggcctcaaaactaagccacttaaatgcacactaagccaccgcacataaaaacaaaacaaaaaatctagatcctactagacctcctaggaatccgtgccaagacaacccgataacatacccaatggctggcagttgaggaggactttcaacaaggtacgtgaacctttataaacttatataatccgcacagatcattcgcgcccgcggaaatcacatcgcagcgaaacacgacgcgtccgattctatcaaaagcaaagctgcatttaatttgcatttcttggttgcattcttttgcccggcctttgtggcgttgcctccctgctggcgcagttgctcctcggacccgctcggttctggtatttttatacggctctgatggtctaaaattatatgcgaactgcacggctcgtgcaacaccgctgctgtcccctaggtgcaatgtacacttctaatttgaatgtaatatacacggcccactgcgggcaagttagcctgactgtaatggccaagatgagagggctctccgtttggtctttggtctagtgaacatgccctgtacgattcacaggagagagattcacgggactttagcgaggcataacgctttgagtttttaaaaataattaaaattccaacaatggttttcatatattcaccctaaacctatcctgaatttcaaggtaaccatttaatggccctgggccctgtagagcataacgcccagggagtttttagtagttttttccccccaactagccgccagtgaaatcattctcccccacatttctaggcaggcgatctgccggccaatgctgacccaaacagcgagcagagaaaacaaa

SEQ ID NO: 17885 - DNA, 950 bp, DROSOPHILA
tttgaggttcctttcctttttatataagcccctcgtctcttgccaacaaaccaacaacaacaacaaccagccaggccagcgggcaacaacaacgcacaacaacgcgtataaataaacgtgaacgcatgtacttaatattagcatagagttgtcgcctgcgtgcatttcatatacataacataacatccacttactcccatgacaacgggactttagacagtaacggtggagcagctagaagaagaggaaaggcgaagtagaacgggaacaagaagaaaaagcagtggaagagtccagcaggtatcactcaccacgtaccgcccaaaggtcccaatgctggcgtagagaagccgaaacacctgctgctgccagtggaaaagcgggaggagctgctccaaactgcccaggtgacatccaatcatttagaggcgacgcacctgccgccttgaggaactggtcgccacgcaggaggacacggatacggcaacggttacggactcgtttccgcagtagcgggcaccatgaacgccagcctcatctatgagatacttatgtatctgaactcgttctactttggcatgtacgccgccttcgaagtgggcgtgggcgttcttaaggcgattaatctaaactacggcgagaacgcgttgtcccgggaggccagcatcctgctctcactgtgcatcatcgagaccgtgcgcattgtcttcgggcggaagagcagtctaagcgatcgtggctggcaagcaaccgcatccgtaatattaacactgcccagtcttgctattgttatctacttgtgttgttttcaaacctttgttctcaaactcgaaattattctgagtgccttaatgatcaccctacaaggtgctgaactagtctacgccagcatattcatttgtacaatgtgtcgccccgtcacatacacctagcagttgataagccgcgtt

SEQ ID NO: 17886 - protein, 136 aa, DROSOPHILA
MNASLIYEILMYLNSFYFGMYAAFEVGVGVLKAINLNYGENALSREASILLSLCIIETVRIVFGRKSSLSDRGWQATASVILTLPSLAIVIYLCCFQTFVLKLEIILSALMITLQGAELVYASIFICTMCRPVTYT

SEQ ID NO: 17887 - DNA, 2489 bp, DROSOPHILA
catttgtatctttatatttgggtagcttcgaatcgatggcggctgtttacgttacgctgaggtcgtcaagtttaacagttgaaggtcggcggaggcgtttaaaaacgctagaaaaacgcgcacgcacagtgggacgaaagcgaagccaagtgggacgttggcaagcgggggtgtggctgggtggtgggtgttttagatgtttgtgtggttaagtacattagcagatttatatccggcaacaataaaaagaacgattcgctaaaaagctaatgacttggataatgatttcgattttgttttcaatttcgctcgcttgggcttttttcctactttttgtggctaccccccccccccccccttcgtcactgttgtttggcttttcaatatttcaattttccatttcccattttcctttttttttttattactcattttccttttgtttttggtgcttctgcgggattcgtgcgtcaataattagatcatctccgcgctgtttgttgtagacgattagcgaaatcaaaagccagcggcgcacaaagaaagcggaacgacaaacacaaacatatagactaaatgggaaatatcatttccatttcgattttgattttcatttgtgtttggttttcctttcagtgtccaattttagcacatttcttgggggccacagcgggcgttatggaatagtgatgcattacgcaggggattcccaaatcgaacatttatacatatgtagatttatctattcaaattcatactaattacatgctaatcacaacggttaagaaatgattaagtagaaatattgcataataaatccgaaatatttagaccttaatcaagttgggttgtaaagttgccgagtaaaaaccttcatttaccttgccgttcctgtcagcttagacatctctcagtgacctctcaacttctcacaatctaaaaattgtgctttccggtttcgttgaataaattcactaaactttctttcgattttgcagccatgtccatggaaatacgcatcaagtgccgcgagatgttggcaaccgcattgaaatcgggcaacatgccaccaggatgtggcgatccggatgacatggccgctaaactggaggacgcaatttacggcgacttgaacggctgcaaggtgaagtacaaaaatcgcatacgttcgcgtttggccaacttgcgcgatccgaagaatccagagctgcgccagaagttcctattaggtcaaataacgcccgaagagttatccaagatgacgcccgaggagatggccagcgatgatatgaagcagatgcgccagaagtacgttcaggactcgatcaatgcggcacagatggccaaggttcagggcaccaagacggatcagttcaaatgcgaacgctgcgacaaacgcaactgcagccaattgcatatccgtgatggtgacgagcccattatcacctttgtgatatgcgacgagtgcggcaaccgctggaagagctagacaaccgtggagagagtcccttgaaggagtcacccgtcttggctggataccaagcaaacgaactcacacaattcacaatatctcatatcaataaacagactgatcttccgttggcttccacaatatgtaaataatactttaacaagaatacatacaacatacaacatacaacatacatattatggaaatatattacatgtcataaaaatcttattcattcgttttaaataccagagggtatcaatgagtccatcatcgatggatgctcctttgttcgcctgcgaaagcagataaactagcaccgaaagtccgaaagaaagcaaatctttgtttcataaacattcaacaatatacgagtttgcttgtataaaaaacgagcatagcgcgagcgttaatttaatgaatttttcgactattagttagcactttacactttaatgaatcattcggcgcgatgatctcggagtgggtgggatcggatgggattgaattggattgaattgaattggatgagatggtatatatagtatagtatactatgtttagtatgcgtgggtcgtttccaagtgcagacaaattatagacgttaaagcatttgctttatggcccacattaacggcattgaatgggattatgggtttgggattcaggtttggactgcgaactgggatgataggtggactcttgatgggcacaatgggaattgctccccagagacgggccaattaattaatatccgccgtcgtaaagcaacaacaaaatgcaaaagcgtatcaagtaaatcgcattaattggccatttggccaaaaaaaaaaaaaaaaagaaaccattaaaaagagcttcagagctccgaataaacaaagtggaaatgcgcctttcccaggcttcctttccgtttcttttggcgtttttatgtccgtctggcgccgatcatcatcatttctccccacaaacaaaatcgcttatttgttttcggatttcatttgtattactttttcgc

SEQ ID NO: 17888 - DNA, 489 bp, DROSOPHILA
atgtccatggaaatacgcatcaagtgccgcgagatgttggcaaccgcattgaaatcgggcaacatgccaccaggatgtggcgatccggatgacatggccgctaaactggaggacgcaatttacggcgacttgaacggctgcaaggtgaagtacaaaaatcgcatacgttcgcgtttggccaacttgcgcgatccgaagaatccagagctgcgccagaagttcctattaggtcaaataacgcccgaagagttatccaagatgacgcccgaggagatggccagcgatgatatgaagcagatgcgccagaagtacgttcaggactcgatcaatgcggcacagatggccaaggttcagggcaccaagacggatcagttcaaatgcgaacgctgcgacaaacgcaactgcagccaattgcatatccgtgatggtgacgagcccattatcacctttgtgatatgcgacgagtgcggcaaccgctggaagagctag

SEQ ID NO: 17889 - protein, 160 aa, DROSOPHILA
MEIRIKCREMLATALKSGNMPPGCGDPDDMAAKLEDAIYGDLNGCKVKYKNRIRSRLANLRDPKNPELRQKFLLGQITPEELSKMTPEEMASDDMKQMRQKYVQDSINAAQMAKVQGTKTDQFKCERCDKRNCSQLHIRDGDEPIITFVICDECGNRWKS

SEQ ID NO: 17890 - DNA, 3556 bp, DROSOPHILA
gaaaatttttttgtaaaaagaaaaatatcgaaaaacagccgaaaaacaaatttgatgtgtggaaataataatttataatagttcacagatagctcgaatcttaaaaagaattgtaaaaaaatcagtggaatgtctcacaaaatctagtcagcatcaaaatcatgaaaaacaaatggccgaaaggccattaaaaaaattcattaccactaagagtcagcgtttagtagttcataccaatattcaaaaggcggagaacaacataattaagcccagttaaaagtctagaccatgtgtgtactttaatgaaactactttatataaacctagcaaatagcgtaaataacattttcaagacgtcactaaaaacaatgcaaacccgagcgggcaaccgtttactagaaagcgaacaacaaattagctaaatcatataaaacatttatagagtgttaaaaactaggcgaaaaccctccattacacttctccccaattcagcctattggcaactcgaaacgccctttaaatcacgctcaattatccccgcctgataggatccgaggattgcagctcctccaatgctagtcactaatgttcacaaacattttctaagctagaccgaagattgtgtaataatttgataagacctttgtgtggtttcatagcaaaataacgcacaaatcgataacaaaaactctcaacagtccacaaatctcatgcttttaaaacaaaagaaataattttactgaaaccaaacagctggaagctagaagctgaaagaaaaccaaagccacatcctacgttgaataatttacctgtataatatttatgtcatttcgttaaacgcaaaatgttaacatacttttaaagcgcgtgtaaaacggatagttaataaaataacgacaacaatatttaaaagaacatatacactcgatgaaaatgaatattaaagatcgaaaaaaagaaaaaggaatctgttattagtaggccgtgggttcaataagatcttttcgagtatgataggtgtatttcgttttgtgcctccaaaatttcagatattattcagctacacacagacaggcctcccaaatttgtaagctctgtaaattcaaaaccagaactgctgcaggccagtggcgaagttaatttgtcagaggaaaactcaagccatctccatggataaaaaccacaagtcgggtgagtcaagccgagtgtggcatccttaagttgttaaaactatgtgtgttctttgctccagaagaggggtttggacgttcaatgtctagtagcagtcgccgcgtcatgtggaagctcaacgaggaggaggagacattcgactccttggtcaattatcggcggcttccttcgcgcagcctaaaccgaagtcaggtgaccgatgtgcccaccaagggacacactacctccgaaaattgccagctgccagcgcaagagttggaaacaaagagcgccaccaacgaacaaggtgcattgggcataatgtcggttagcctaccgcaaacaaccaggaattcccatcaatcgtcggccacgtcactgccggaggccaagggatgcactgccaccgaaaactgccagttgctagcgcaagaggcggaaacaaagaacgccagcaacgaacaaggtggattgggcaaaatgtcggttagcctgccgcaacaaaactggaacgccaatcaatcgtcggccacgtcactgccggaggccaaggagatcagctccaaagagcaggcgatcatctactggcggcgtcttttcgatggtatccacaagcgccagcgtggcgaaagaaaagttgcagcaatgcagcccgaaaataccacagatgtcgtgctgacgtccaagccaaacctggcattgcgctacaagccctcccatgagtcgcttaaaaacaagcggatcaaggacctggctcctgaacgatgcccgagcacgtcccggggatcaacgtcctgcaaactggtatcggacctcaagatggagacgttcagcctgccgccgcagcagacgtgtgtggtgcgcgaggtggagcctcggtttggccagcgccgacgcatgttgttggccaacgacacggattcgtgctactccggcgagctggaggtccccaaaaacagtcccgtccaggagccaggaccctatccgcgcagcgaactgatcagtgtccatgtctcggcgcccaccagctcctcttttacgggagcaacacggcggagtctgtctccaactaggcagcgcactgcgacgagcaaggtggccgccgggacgaagggcggaccatcaccagcagttgggggcaacaagtgctcgagcgtcagcagcgggagtgcaggtaccagccagctgcctaatttccgccagcggcagcaagagctccatcgctatcgcgttatgatcgagcaacggcgcctcgatctactcgagctcaagatagcccgcgaacgcgaggaggcgctgcacagcgaggttctgtttcacaaggaactgcagatcaaggagaacatgatcaaggtgtacgaggacaacgactgctccaacgcctaggacttcctttattcctaactctttcgaccccaaattcagaaaggtattttacacttggcaatggccctggcctcagtagttcaaaacactcagtcaaataaaaccgaaattcatttagacatcccaatctaggttttttattaactacctgagaaataagtatcaaaactgcaatatatgaaattcaacttagcgggtaatttcaaatctaatgtgcccgttcgtttacagcactggcagtgtgtgcgcatcgctgtgaatggacattagccccaaacaactttttatttcatttgtttaaaccgaaaacgtgaaatgttaataaatgtgtgccgagtttgcggcaggagcaggctgtgccccaaagccgtggagctcttcaaacctggcagacaggatattcttcgccgcatccaactaataaccggaattctcgtgagttaaggaatcaaaatggatcgcgcaatttacatatgtgcgagcgcttccttttttgtattctgcagcttcagcagattcccaatgctccggatatggtgtgcttttgctgccagacagatctgcaatcggccatgattttccggaggcagtgcatcctgcagcagaagaaatgggtgccattgctacaaagtgataaagtgggagccagcgaggaaaagaaggtggaacccaatgatccctcaaccaagaagaaaacgaccaagcggcgaagggggcgacccaggatgccactggaaattgtagatatagtcgtaacgaacgagagtaaggcttcagcaggtgaatcagttggtggtgatgaatttgatcagccggtggagatctccaatgaaccggatgccaccgatagcgatgttaatctggaggaaatagatcttccggatgaggatggcttggagtcggatcacgatttacccaatgttcaaatccacaagtgcgatacttgtggaattatcaaaaataataaatcatctctggtcaggcatcagtttgaacataa

SEQ ID NO: 17891 - DNA, 1495 bp, DROSOPHILA
cttttcgagtatgataggtgtatttcgttttgtgcctccaaaatttcagatattattcagctacacacagacaggcctcccaaatttgtaagctctgtaaattcaaaaccagaactgctgcaggccagtggcgaagttaatttgtcagaggaaaactcaagccatctccatggataaaaaccacaagtcggaagaggggtttggacgttcaatgtctagtagcagtcgccgcgtcatgtggaagctcaacgaggaggaggagacattcgactccttggtcaattatcggcggcttccttcgcgcagcctaaaccgaagtcaggtgaccgatgtgcccaccaagggacacactacctccgaaaattgccagctgccagcgcaagagttggaaacaaagagcgccaccaacgaacaaggtgcattgggcataatgtcggttagcctaccgcaaacaaccaggaattcccatcaatcgtcggccacgtcactgccggaggccaagggatgcactgccaccgaaaactgccagttgctagcgcaagaggcggaaacaaagaacgccagcaacgaacaaggtggattgggcaaaatgtcggttagcctgccgcaacaaaactggaacgccaatcaatcgtcggccacgtcactgccggaggccaaggagatcagctccaaagagcaggcgatcatctactggcggcgtcttttcgatggtatccacaagcgccagcgtggcgaaagaaaagttgcagcaatgcagcccgaaaataccacagatgtcgtgctgacgtccaagccaaacctggcattgcgctacaagccctcccatgagtcgcttaaaaacaagcggatcaaggacctggctcctgaacgatgcccgagcacgtcccggggatcaacgtcctgcaaactggtatcggacctcaagatggagacgttcagcctgccgccgcagcagacgtgtgtggtgcgcgaggtggagcctcggtttggccagcgccgacgcatgttgttggccaacgacacggattcgtgctactccggcgagctggaggtccccaaaaacagtcccgtccaggagccaggaccctatccgcgcagcgaactgatcagtgtccatgtctcggcgcccaccagctcctcttttacgggagcaacacggcggagtctgtctccaactaggcagcgcactgcgacgagcaaggtggccgccgggacgaagggcggaccatcaccagcagttgggggcaacaagtgctcgagcgtcagcagcgggagtgcaggtaccagccagctgcctaatttccgccagcggcagcaagagctccatcgctatcgcgttatgatcgagcaacggcgcctcgatctactcgagctcaagatagcccgcgaacgcgaggaggcgctgcacagcgaggttctgtttcacaaggaactgcagatcaaggagaacatgatcaaggtgtacgaggacaacgactgctccaacgcctag

SEQ ID NO: 17892 - protein, 427 aa, DROSOPHILA
MSSSSRRVMWKLNEEEETFDSLVNYRRLPSRSLNRSQVTDVPTKGHTTSENCQLPAQELETKSATNEQGALGIMSVSLPQTTRNSHQSSATSLPEAKGCTATENCQLLAQEAETKNASNEQGGLGKMSVSLPQQNWNANQSSATSLPEAKEISSKEQAIIYWRRLFDGIHKRQRGERKVAAMQPENTTDVVLTSKPNLALRYKPSHESLKNKRIKDLAPERCPSTSRGSTSCKLVSDLKMETFSLPPQQTCVVREVEPRFGQRRRMLLANDTDSCYSGELEVPKNSPVQEPGPYPRSELISVHVSAPTSSSFTGATRRSLSPTRQRTATSKVAAGTKGGPSPAVGGNKCSSVSSGSAGTSQLPNFRQRQQELHRYRVMIEQRRLDLLELKIAREREEALHSEVLFHKELQIKENMIKVYEDNDCSNA

SEQ ID NO: 17893 - DNA, 2853 bp, DROSOPHILA
tcgaatcttcactgtactgcagttgacgaaggcgcacattttatgtatgtatttgccgtgaatctccaactccatcctacttcataagtcgcctgatttattccggccacgtagcactcactgcacagtttgattgccacattcgcatgtaaatgctggcctctaaaaagtattcaaaccaagcgacccaatcccacaaatctgtcccacgtcatcgcgcataatcgagcttttaatttcgggtaataaaactttgccgatttaatatcaggtacgtggcgccttcattctacaaaagaaagccataaaatgtggaactgacttcgagggaagccataaacttatgtttttcaatgaaggataaataagaaaaataactagttgttacacctttcaaatttttaaagcatattccccaatttattgtcaagtgattcatcaacgatttctgtggcctgcaaagtttgccttgaaaggcaaaagattttgttcattaaacaacgtgatacacgaaaccaaactgaaaaaaactttgttctacgagtatttcaaacttttcgccaagtttacgcataattttttacgatattttccgcagtttttccttttgacggctcatcttattcttattgttgttcgaaaggacttacccagcatccagggatctctaatagatttccggcaaacaattttattcactttctgctattgaatttggtattattaatgccgcatttcctaagctgtgggcattaagtatatggctaacttttctacttcaggatattaaacgaattcattacaatatttttcataattttatttcttttggcaagaagatattaaagtagaccagcatttaaaagaaaacttgtctgcacagaaaactacgttttgttgagtagcaactgtagataaaaagttacgaaaatgtttttcgctctgacattgctgtcaaaactcatcaaaaaaatactatttgaacatttaaaaatataaaatggattcagatgccgatggtggcgagaccgtttcgaatttctctgaaaattcgacggattttgaagaaactgaggagtatattgtagagaggattttggatcgaaggcattatatgggccaattacaatacttggtcaaatggctggattatagcgatgaagataatacctgggaatcggcagcagatctcgattgccattcacttattgattcgattgaatcacaaaaaagtctgaagaggggtcaagagctgaataatcaatatgaaactaaagctaaacgactgaaaatcgatccatgtctagtagtagatagtccttttaatcatggtttcactgcacaagagattctaaaaggcgctaaaaacaatggtgaaatatcgtttttaattaggttttggcatctcgatcaaccacaagtggtgccaagtggaattgcatatgtggaaataccgcagatggttctgaaattctatgaaaatcattgcaattttcacgattatttaaataattatatatcatgacttgcaattctggatcttcaaaaaaaaaaaacttatgaatatgtgtgtgagcttcttatattttatatgttaggttaaattgctttactttttataataaaaggtgtccctttgcacagcattacaaacaataatgaaggcaaaatgccaagttttaagtgatttttggggcgtgtttgcccgacaggcagcgtaaacactcttaattgcaacaacagtgccggcaaacaagggccaggaatgtacgacggccaaaatgaagcgaaaatatttgcattccgtttttgtggccattcccttgtctcatcgcaagtaccaaaagtcgtaagacctattctctgtttttggctgatggggcgtggtggccggacgtacttttgccctatatattcgtgtttgtttttcgtcacttgggtccttttttttggagggggggggggggggctctggtgctacccagttgcgtccagtgggcacgtagccacaatagcagcaaaaaggtttcgtttaagccttctgcacttttgccgagaattgatactgcaatatccggtcgagcaagttcaactccaatcaattgctcttcgatattggtaagtttttgtcggcggtaaaagaaactaagacctatttgaatttataggcacacgcttgattcaacttttgttttgacgttatgcttgcactggtgttcaatactatttctattcaaaatattcttagattaagctagataactgatccatgaaactagtgaagcatttattcacgctgtgcttttttagattttgtgagttaaaaaagaataatgttttttttcgattttcacagaaataattgaaaaaaaggaggggggaaacaaaaaattaatttggcgcctacattctattgcccacattccaacctatccactttcttttgtttcgcatgaggtcaagggttaaatgtacacacgcatacatacatacatgcatgatgaccgtatttgtttacgtgcctcggtcgaccctcaaaacaatggactgccattgtttttagttttcccaccccgcttcacccctcgcgggcatggcacaagatgtagattaggtgtgcgaaatgagggtagatttatgctaccctggaactcattatcgaaattatgaataatgcagtcgactttgcccttttcgggcctcggctaatttgaatataaatttaactcataaatatatacaagacgatttccggcagacggcgccaagggaataacttccttttttttgcgatggtgagcaggggtggcaggggtctgagacctaagtaactagcatacaacaaataatcaa

SEQ ID NO: 17894 - DNA, 483 bp, DROSOPHILA
atggattcagatgccgatggtggcgagaccgtttcgaatttctctgaaaattcgacggattttgaagaaactgaggagtatattgtagagaggattttggatcgaaggcattatatgggccaattacaatacttggtcaaatggctggattatagcgatgaagataatacctgggaatcggcagcagatctcgattgccattcacttattgattcgattgaatcacaaaaaagtctgaagaggggtcaagagctgaataatcaatatgaaactaaagctaaacgactgaaaatcgatccatgtctagtagtagatagtccttttaatcatggtttcactgcacaagagattctaaaaggcgctaaaaacaatgtgccggcaaacaagggccaggaatgtacgacggccaaaatgaagcgaaaatatttgcattccgtttttgtggccattcccttgtctcatcgcaagtaccaaaagtcgtaa

SEQ ID NO: 17895 - protein, 160 aa, DROSOPHILA
MDSDADGGETVSNFSENSTDFEETEEYIVERILDRRHYMGQLQYLVKWLDYSDEDNTWESAADLDCHSLIDSIESQKSLKRGQELNNQYETKAKRLKIDPCLVVDSPFNHGFTAQEILKGAKNNVPANKGQECTTAKMKRKYLHSVFVAIPLSHRKYQKS

SEQ ID NO: 17896 - DNA, 2735 bp, DROSOPHILA
gactgcacaatgacaatgacatgggaaattacacagaatgttgggaggcggggtaaagaggcccgcatcatcagctgccgcggtgccaaggtgcagttttatgactccgccaggatgcgatcctgtcgccgatcacgggctaatcacaatagtcctttctcttccgctgccacacgcccctgaagaactcgaattgctattgctattccgattccgatttcgattctaatggcaatttgataaagtctccaaaggcgacgaatgaagtgcgcgatcattaaaattttcagcccgctcgtaaatgccaaatgataaatccctgaagtcgcaggcaaaacaattgatcggcgattttaagtgcacttttagtgcacttttactgcacttttattcgctgccggccggcccaacaaatttctggtgttttacgacacggatttgaactacaaacaattcattaaacacaaacactacaaacacacatattgaattcgaaactttttacgcatttttacgatccatcttttgtggacaaacattgtgtgcagcagcagacaatggatatctttcgggttttcgaggagtaaggactctttaggagattaaggactgattagaatgcatttaaggggaatattactttaatggggaggttgttttcttatttggtctttattaaatgcacaattggtttttttttttttgtcaaatatttagaacacattaagcattttatgtttccaccttcctgtaaaacatacaaacctatttgcgtttgttgcgaattcaaacttgctgcattctgctgcattggcagcactgattgttaaaggtagctttgcaaaattagctatcgataaccgcaataaatgccacttggcaaaagttcaatgaccccaaaactgtaggaacgtcaattaattagttatcgaactagttgagagtctcgattttaaattccttctttattttcggaattccatcaacacgtgcatgtgcgatgacttctgccgataacaagtatccgaccaacaatctggagacaaaccacctactccgcgagattgcacttcgtccatcgatctgggacagtcgcatcaaattctcgctgcgtcggccgcaaatccctatcgactggctggatgtctccaatgcggtaggacttggcgttgacgagtgcaagcggcgttggaagagtctgcgtaacaactaccgcactaagatccaccaaggcaacgcctggagctggccgcactccaaacaaatggagttcgttcgcgatgtcttcccgccacacaagcccaagactcctgcgcgttgccgtgttcaggtgaagaaaagcaagctaattctacatccgcaacaatatctgcaatcggtggcgagctattcggcattcaaaaagggtggcatcgaattcgaggcggaggagagactctttctggttacggacgagccggcattcgatctggatgtggacgaggaggtgaccaggctattgggcaccgatcaatggttgtggcaaaccaatctggacttcatactactgcccatttttcgagcgccaccgccatcagccatggccaaaatatccaacgaatcgaaccgccatttcctgctcagcatggtgcccatgctccgatctttgagcgatcgcagcaaggaacgtttccgcagttggacacggcgagtgctaagggagatgctcatcgcggagaagaagctgctgacgtgatcgatggtggaccatcgatgtggtcacaaaactgatttttgaacaattattatatattccattgttagtagagctgcgcgtttggcgtttataccaaatggaatggatgcgtttgaggaacttgtaggttttccaaaggattaaaggatcatcatgttaattgaaaagcttttatgtttatgttttatgtttccaaatgaatttctgaatctttacacaaagccgtgaatactgaaaagataataaaaatgcattattaataaatgagaaaaatgaatgataatgcgaaaattctgtatgtttttaatgtagagttatttatgtagttcatcaaatggatatcgcaatgcatttcaacgagtctgcctaccggtttaaaaaagaagtgaatacatttcggagctcatcatagattataaagcatttaaaactcatacatagaactaaaccgcaaggtaaacaaagccgcataagttcacttcacatcaaattggcttaagtgcttacccgaaggtccagcccccttcactcctttaacttttcgtccttgcacagcatccgcaacctcgttgatccttttggctgaccgtaaatatgcttaattacccccggatggacggcgatcaaaatgtatctattagtttgcatttggcattgtgccgagagctaaagtttgtcgggcaaacaacatttacataggcaatcggtatcgcaatctgaagatctaaggatctgcagatcgaggactacaaccctttgcctgccgtcgtctgctatgcaaatcgattggattctttgatcctgcggtctgccccgactcctgacctctcctcacctcatccctctgaagaaagtgtgagtatttcggattggatccccaagatgaacgcagggggattaccgaaaaccacagtcaggacattcgtttggcgcgcaaaccaactcaagatgtcctccttttaaagagcgagatggaaacagaggaagacagagatagggc

SEQ ID NO: 17897 - DNA, 735 bp, DROSOPHILA
atgacttctgccgataacaagtatccgaccaacaatctggagacaaaccacctactccgcgagattgcacttcgtccatcgatctgggacagtcgcatcaaattctcgctgcgtcggccgcaaatccctatcgactggctggatgtctccaatgcggtaggacttggcgttgacgagtgcaagcggcgttggaagagtctgcgtaacaactaccgcactaagatccaccaaggcaacgcctggagctggccgcactccaaacaaatggagttcgttcgcgatgtcttcccgccacacaagcccaagactcctgcgcgttgccgtgttcaggtgaagaaaagcaagctaattctacatccgcaacaatatctgcaatcggtggcgagctattcggcattcaaaaagggtggcatcgaattcgaggcggaggagagactctttctggttacggacgagccggcattcgatctggatgtggacgaggaggtgaccaggctattgggcaccgatcaatggttgtggcaaaccaatctggacttcatactactgcccatttttcgagcgccaccgccatcagccatggccaaaatatccaacgaatcgaaccgccatttcctgctcagcatggtgcccatgctccgatctttgagcgatcgcagcaaggaacgtttccgcagttggacacggcgagtgctaagggagatgctcatcgcggagaagaagctgctgacgtga

SEQ ID NO: 17898 - protein, 244 aa, DROSOPHILA
MTSADNKYPTNNLETNHLLREIALRPSIWDSRIKFSLRRPQIPIDWLDVSNAVGLGVDECKRRWKSLRNNYRTKIHQGNAWSWPHSKQMEFVRDVFPPHKPKTPARCRVQVKKSKLILHPQQYLQSVASYSAFKKGGIEFEAEERLFLVTDEPAFDLDVDEEVTRLLGTDQWLWQTNLDFILLPIFRAPPPSAMAKISNESNRHFLLSMVPMLRSLSDRSKERFRSWTRRVLREMLIAEKKLLT

SEQ ID NO: 17899 - DNA, 4055 bp, DROSOPHILA
agctaatcctgccaccatgtcaactcctacatatatgctaatccttctagaaggatgaacatcgactgattgcatggaacgatgtcatacttgtcgtcccagaagaaatcctgcagggtcacaatgtacttgtgcttgagttcccggaggaggcgtatttcggtgattaggttttcccgcgaggtttgcgacaacgtcgacatttccacatacttgatggcatgataagtgcgctgtttctgcaatgacaaaacgtaaatattaagaccctttgctctatgtgatgtgtatgtaactggtgtcccactttgtgccgcgctttgtacacggtcgcatagctgcccgctccaagtttctcgagaatttcaaagtccgtgatccgcggcagtgacatgttgggccggtcatctagttctgataccaaatatttttaaaattatatgtttatgttttccattggtcgattgttttcgctctcctctgctcacacacacacgcgcgcgcaatccagggcttcgcaattcttaacgatatcacagtgaaattgctgaaacaaatcgatagcaatcaatcgaatttaaatcattcggcgatataaaaaatttgattttgttgaatatataaaaagtttttactcaggaatcagaattaaaatgtatatatgatttaactaatccagcagacataaatgaagttcggttatgttgttttataaacatggcaataacttcaaatttacaatgaaccaaatctatattatttttttcaattttataagtttatgaactgaacgtctcgtaaccatatgcatctcagttatgaataccaatttaatcatttttcttatatcctatattacatttaaactgataaataaacaggcgcccaactgcacagctgattagccaatgctgacaacatcgatagcacttgttgctctatcggtatttgctacttttgcttatcgcatccctggaaatatctaagccctgattcgtatgttttgtttttgatgcgttgcgtggtgattaatatttcgtttttttggggtaaataaatgctatggtatttcaattattgtttttcggagcctctgcagatactgcaacagtataacataaaaatatatgtagttaaccaccttggaaagtgtttaaaacgcggctaaagtcttcgaaaacgttaagccttgcttgacacacccaaaatacacaaattaagcaaacacgccctggtcaataaacgaaaatccacagaactcgcttactaacggttatgtttcaaatgttttagtagctgattaaaggattgataaaggacttgccttcttatacacgtgacgagacttaaaaggcttcatgatgaattacggtaggaaaacgccctccacatatcggtccaatccgtcggtttattcccatgccacgggaaggtaagtttcccttataacctttatagtaatatgaccaagctaatcttctatatataatcttctagatcctcgacgaatttacactccaagatgtcccgatccacgcgatccgtcaggattccttggtaccagcgaccgttgcttaaaaacaatcagtacatcgatatacagaagggtgccatgctggtcggattgtttgccattgtaggagcggaaaatccttattgagaaagttcttttttgtaacacaaaactcccttgcagtttctgtccctcttcaccatcgccacgagcatctttgacatctactgctatgctatggctgcgccaggatccacacattatggctactacatcatatcctatgagttcgtctatgtgggcaacaagcatggtgagctttatgggggtatccttcgattttaaatcgaattggaatcgtattcttcgattttaaatcgaattggaaatcgttgttttaacttgaaatatcttttcataacccacctgaattatttgtagttcgcaatatgctcattgtctttgccctgttctcgcttatcatggcgctgataaactttgtgaccagtgtccttctctgcgtggctctgcgcaaggtaagttagggctggaaatcttacagattttgcatgcaattcatttacatttctcattgcccgaaagcataaaaagctgggagaacagaaacgcttactgagcaaaagggtaacaaacgcattctgcacagtcataaagaagaaattagcacaaaatgcaaacaattggcatacaagtttttttttgttaaaacccattataatatatgatttttataatactactataggaatacgagaggaaggttatgccatggctgtggtcctttgccatatttactgtttggcgggctttggcactgatcttctttgccattgtcaatgatctgtactttgcctacaatgtgattatggtgctcctttggaccattttttgtgtactgtctatatatggatgggccgtggtgtactctctgtttttggaactggtggatctgaccaagctggaggatctagcccatttacgcgtacgttcattaagttatcatatctgaaatatgactaatgagtataattacctttccagatgggcacaatggcttccctgcacgcatcgacagcaaactcacttgcaggatcacggccaaccactcctcacagcaccgtgtccaccatgcccgtgggctaataaaagtatttgccatccatctatggggctcacaacgaaattgcacaatctagaccgtccgaatgcagctcaagataaccctgatgcttcgcactcaaacattgcttaaactatagtgtacattccatccaccagtttagtgccttagagatgcgcctctcgaataccacaaattttaaccgcgaatcagcgtaattagttgtaagtctattccgtccaaacgcatatgttttttgtatactgttgaagaatcgctgtctttatgtatgaatgtcaaaatatcgtgttttttatattcatatatagatgtacaacccgaattgtagctatgtatctaaaatattaagcgacaagcaatataaaaaatacgaaaccgaaaatatgagtctaatgacacttcagttgggtccattttcgggcgttaaccaaaaacgcccacatttgacagcagttcatctgaactcatctgcgtcaagcgaaaaaatgatatgtacgataatctaattcaaagaaattccttaaactttattgttttctatatgcaatttcaaattaaatcctttcaaaaattttccgaagaaatgtatctttaaagtgctcttttaaaagttcaatagatgctcaagtctcaaccttatggcaaaagttaatctgcaagttgttgggatttttgaaattaccaaagaatcgaaaggggatcccactatgtgcatctggaatttcctgaccgcccatcaatcttggaagcacaattgctgggacttgtttgctgcgttgagtgtcagtgctctggtcattaacacccgaaattattagccccacaccgcaaagtggggcatttcaagtacacacgggcacaaacattcgccgtgggatgtgcggaggccaaacaaagttcaatcaactgtttttgttaatcattccatggatgacgacaactccggcgatttcgtagtactatccacatacgcatttgtatgcgtgcttctatttgcttggtggtgtcggtgataaaccccaagctcgagctttcccaccctatgtgtcacacacattttcctatgctgaatattttctaagagcattctgctttcctcattcaagtggggtaatttgaacaattgcatttggaattcagctggaaaacaaactacgtcatcgagtggcgattctttgtggcctttgtgtgcttatcttattcttagggctgaaacgtttatcttttttgattgccatcttgtgcaattaaaaaatgaaccaacgacaacaatacttatagtaaaatataataacatagtaagaatcccttttcagtttatataaattaaacaaaaagcttaaatttgattacatttggattagatgaactttaaatgat

SEQ ID NO: 17900 - DNA, 1269 bp, DROSOPHILA
gttttgtttttgatgcgttgcgtggtgattaatatttcgtttttttgggtagctgattaaaggattgataaaggacttgccttcttatacacgtgacgagacttaaaaggcttcatgatgaattacggtaggaaaacgccctccacatatcggtccaatccgtcggtttattcccatgccacgggaagatcctcgacgaatttacactccaagatgtcccgatccacgcgatccgtcaggattccttggtaccagcgaccgttgcttaaaaacaatcagtacatcgatatacagaagggtgccatgctggtcggattgtttgccatttttctgtccctcttcaccatcgccacgagcatctttgacatctactgctatgctatggctgcgccaggatccacacattatggctactacatcatatcctatgagttcgtctatgtgggcaacaagcatgttcgcaatatgctcattgtctttgccctgttctcgcttatcatggcgctgataaactttgtgaccagtgtccttctctgcgtggctctgcgcaaggaatacgagaggaaggttatgccatggctgtggtcctttgccatatttactgtttggcgggctttggcactgatcttctttgccattgtcaatgatctgtactttgcctacaatgtgattatggtgctcctttggaccattttttgtgtactgtctatatatggatgggccgtggtgtactctctgtttttggaactggtggatctgaccaagctggaggatctagcccatttacgcatgggcacaatggcttccctgcacgcatcgacagcaaactcacttgcaggatcacggccaaccactcctcacagcaccgtgtccaccatgcccgtgggctaataaaagtatttgccatccatctatggggctcacaacgaaattgcacaatctagaccgtccgaatgcagctcaagataaccctgatgcttcgcactcaaacattgcttaaactatagtgtacattccatccaccagtttagtgccttagagatgcgcctctcgaataccacaaattttaaccgcgaatcagcgtaattagttgtaagtctattccgtccaaacgcatatgttttttgtatactgttgaagaatcgctgtctttatgtatgaatgtcaaaatatcgtgttttttatattcatatatagatgtacaacccgaattgtagctatgtatctaaaatattaagcgacaagcaatataaaaaatacgaaaccgaa

SEQ ID NO: 17901 - protein, 258 aa, DROSOPHILA
MMNYGRKTPSTYRSNPSVYSHATGRSSTNLHSKMSRSTRSVRIPWYQRPLLKNNQYIDIQKGAMLVGLFAIFLSLFTIATSIFDIYCYAMAAPGSTHYGYYIISYEFVYVGNKHVRNMLIVFALFSLIMALINFVTSVLLCVALRKEYERKVMPWLWSFAIFTVWRALALIFFAIVNDLYFAYNVIMVLLWTIFCVLSIYGWAVVYSLFLELVDLTKLEDLAHLRMGTMASLHASTANSLAGSRPTTPHSTVSTMPVG

SEQ ID NO: 17902 - DNA, 8586 bp, DROSOPHILA
cattaacattttgctatcaaatcactagcacactcctcgaactgggcgcctcgccgaattaccgagatgggcgtggcatcaccccgctgtacatctccatcaccaggaagtgtgaggcgaagatcacagagagtctgctgcatgaccatgccacgttgggaatccaggacagccagggctggaacgaggttcatcaggtgagtcggtggcggtccgttatgatcctggtgatcctggcgatccctaacagcaactgctttgaccccgagccaatccccggtgaaatggtgttggcccacaaacgttgaacgccaattaatgattgaattctttatctctctctctcttctttcttgaaactcttctactctaactctaaaacaaacaaaaccaaaacaaaacaaaacaaattcgcttgctaatactttgtaacccgcggtttggcatatgcatctctgctgcatcctttggctctctccgctcacccgatcgacacgtaggcctgtcggcatggcctggtccagcacctggaacacctgctgttctacggtgctgatatggacggccgcaatgcgtccggcaatagtccgctgcatgtgtgcgctgttaacaaccaagaggcttgtgctagaatgcttctctttcgcggcgcacagcgcggcgcacagaactttgccaatcaaactccctaccaggtaaagcccagtgtctggactcaagaacctacacagagaaaaaaaatcatgcgaattacttttacccgtttgccaatgaaaagatttaaaaccgcatgcaacgatattttctctgtgtatattctgggacctaaaactttttgaattttgttaacaacttagtagttgatagcctttaagttggtacttttgtgctgctgtagttatgcttgtagttcagtctagtacttaagctagtttttgatttaataacttggtttggtatatggaactatggttttttaatccaattcgatttcccataggtggctgttatagccggcaacttggagctggccgaaatcattgagaactacaagtcggaggatattggtaagtggtggcctactttaaaaatcattccatcattcaccacccgaaaagcaatcgactcgtactcgcaaccgaactaacttcatactcatcaaaactcaaatcaaaaatcccatttacacggaatgtgtttcgaacaccttgaaatatcattctgatttatactttcttaagtttctgtttcaatattcgtttgctctactcagtctaatttattaatattggccacaatcaaaactagtttcctttccacttgtttcgaatcagtttaccccatgagcgtctttatatctctatttgaatacacttgcatatcatcaatcaatcattcgacaatcaatcaatcaatcaatcatccaacttgatcatctaggtctcattccccatatcagtgtatattactcgtattatataaatatctgtactactctcaatttctatataaatcgcaacctatatgtactttacccaaaacacttttttcgtattttgcatatgcttgtttgagatacgtgctccataaatgtaatcaaatcaaaatagttttgttaatgccacacttccaatatcttggctgttcttgatccatgttttgttcaatgttttttcgtgtttttccatacatattatacatatatattccatttcctagtgagttgatttgttggcaggacattagtagagtgtcctgcccttggttttgcttttcatctcagtcacttatccttcgataaatgagcagtaagtaagtgtaagtaaagtgtgccaatcattccttggaatattccataactttgccttgggcattagggtgttagattatttctttaatttttttatattcaaagttttcactttattagattgagtagagagcaaactgaaacaggggaattggattaataataactgtatgagaaaagaaggccttctaaaattaaatttgatcttcagctataaaaataagatcgattttttatatgtataaattgattttagaagaaactctattcaaaaaaaataaaagctgtgatgacagccagacctgacgaccaactaaacacacaactaaactgattactcccaaacctattcctttcctaatcctttgcccaccaactcgaacacattttaagtgaatatccttgatcaccacacagttcccttccgcggaccgccgcgctacaatccgaagcgacgctcgggtatcgggtggttgagcgccaatggagccgccggcgcagctctgctggcagcggctggaggtggtttcggtggtgcgatggtcggctcgaatggtgccgccaacggaaacaacggggctggcggtgttggtctgatgctcagccatcagaaccaccagcagcaccacgccggccaccatcagcaacagcatatgcaccaccagcaccaccagaatcaccaccagcagctgcagcagcagcagttgccccacctgcacacactgcagctccacggcccgccatcgccctgcccatcggagcacatgctgggagcctacagctccgccagctccagcctctccgagggctcctccggccaccggtcccacgaggacgacatcagtattgtgacaggtgaggaatggttttgtttttcggtttgatttcgacctcatttgcatttgcctaagtttaagttatgttaagaggggtacttaaagcataggtctgctattattgtaaataatggcaattaatgaatatatctgcatcgatcggataagtatacatataactctacatctctatatgtaactgaaagcatgcgtttaattagattttgactaaacaaggaataattgcatgtgtttctgcctcgcactgattctattatctaaatcacatatcattgacaaagaaatcattattttaagagaaaatacaatactttataagcccaagaaccctttactatggtatattcaattttttacgcaaatagggactattatgattcttcgataaaaaagattgctttgagctcttttctaaatacttgatcattttccctcaaatatgtattgtatatttcactgaaaatttaccatctatgatttccagttcattcctctgtcatatttctaccatgttggtactcgtttaaagctttgactccacttaattggaggctcctgttgtgcgttcaaacatttgcatgccactcgtttgtcttctgcctcatacacattaaacacgtagtcctaaaaaaacaaaccactcattcactcatcgtcctcccccgaacagacaaatccctgggcgataccagcgacataatcagcgattcgtcgggcgtgggaacgaactcggattcggcagcatgttccatcgggcatcccagcaccacagtggtgtgcatggagccatatgctggcaataccgtgggtcacattcgcctccagccaggtgatgtgatcgaagtggtgggcagcaccgactgcggattgctcgagggctatgtgcgaggcactaatcagtccggtttctttccggccgactgtgtccaggaggtgagtctacgccagaagcacatcaccaatgtgatgaccgccagcacgggcatggctccacagcagcagcagcaacagcatttgcagcaggctccggcaggctcatcagccgcctcctaccagggatcaccacagttgagcttgggtggacattctggcagttccagcactctgctccagcagccccatcagtcgccatccctgtcggtggccagtaatggatcatgccagcagccgttggagagcaatgaaggtggagcctctggcaatggcatcaacaatcgaaacaataatcactccgtgggacagtacagcagcgctactgcgccacgcatcaaaaagaggtaggaaagcaaattcatttctatgagttgcaaactaatgccacatctcttctaattccaacagcgcctataacgcccctcgatcggtggtactgcatcgagccaagcgcggatttggcttcatattgcgcggcgccaaggcaagttcccagctgatgcagctgcgtccgtcagagcgcttcccggcgctccaatacctggatgatgtggatccgggtggagtggcggacatggccggactgcgtccaggtgacttcctgctgaccatcaacggcgaagacgttacctctgcctcgcacgaacaagtggtcgaaatgatacgttcggccggcgctttggtcaacttgacagtggtttcgccacaattcccccaccagatgcaggccagtgctcagtatctgcccagtggagcgcgagcgggtagccaccatttgaacagtggaccaagtactcctcaaagttcgcatcgtcagtgcgccacgttgccgaggaagatgacgggtccgggaggaagtggtcctggctcctcctcaggaggcagtgtacgaatggctccgatgccaccgcgcagggatcccaagaccacgttgagtgtaggcagagccagggccaaatccatggtggctggtcttgaaaatggaggtgagaaggaggacgatttgccgcacaccaaatccaactcagtggagtcgatcgcaacgccaacacctaccggtatccaaacgggacctggaacacccgttcagctgcgcacggcgagcattaaggcgcgacccacgtctagtaggatcacagctgccgaattggaggagctattccagcgacagcaaggcgagggcagtgcagcaaacgccagtcggtatgccaccatgatgaccagctcccgtttccagtcgggcacggacagcggcgcagccactccgccagcatccaatggatctcccatgaggagtggaccgctggtgtacggcagtgtggctgagatgaaacgtaagacagcgaggagcaagcatggtagtggcacgctgcgtggaaaacccgtagccacacccacagtcggcccaggtggagctggaggcggtcgtgacctcaaacggttccattccacacccgatttgcatggtcctcagctgcacggttcagcctcatccatttggcaggcatctggaaagggtcaccactcgcaggacgatgtggccacgctccatgcctcactccaacgcttgaactctaaccaaggagaactgaaactgggaggattaggagcaggatctgctacaggagcgggaggagcggtactaccgccgcccaatcacccacctccgccaccaccagtgggtcaggttgttaaagtggaaacacgcagcagtgtttcggagtatgagagcaccatctccttacaacaaaaactaaagaagcgaacggaaaacgatgctgtgaccagtgcagccatcgatggcgtccagagcagcttcaatccctcggcaaatgccaagatctatgcctcgccgcaggaactgcgcaacgttatggcctggaagttgcggcaggcgcaggagaagccatcgcaggagacatccgctggatcccagcagccagttagtcagtacgctgctcccacgcagatgcgaccagcacaacaacagcagcaagcacagcagccacctacagcattggcctctcactatgcggctccacaagtccaggtccagcaagtgcaacaggtgcagcagtcacctcagcagtctgcccctcaatccccacctgctccaccgctgccacaagcagcacctgtgccggcacaaaatggtaatggcaatggcagtacaagtggagccggatcagctcctcctattcccgaacctgactacagctgcagtgaatcggatggcgaggatgagaactctattctggtggcacggaacaccaagctcaacgagaagattgcactgttcgatgtgccagagactagtggaaatagtcaggctaggtaattatctatcaagtacaattcgatttacgttccccattaataatccttcattcatccacagtgggagtagttccaactcaggcagtgcctcgatttctcattccctatctgtggaggagatccagcgcattcgcagcaatctaaagacatcaaagtcatcgccaaacggttttgccaagaaaccggaggaggagaaaccacaacaagaacagcagcaatcccaccaacaaccacagcaacttttgcagccaggcgaagatgagtgcgacaacagcagctccggcgttagcagcgagcaggaacagctggcactggccgccggggttacactgccaggtggtggtaagcccaccgataccattaagaagaaaccatcggtgaccattgtcgaggaacccaagactattcccgatcagcccagcagcaacaccagtcacactacaaagcctatggccaagaccactattagcataggcggcggtggcagtgctgtgcccacagccacacttacagtgaagcaacttgtgcaacagcaacatgcacccgttatccaacagcagcagcagcaactgggcagcaagcaaccagtgacagcagccagcaccaacaagtttacgcaacagagcaatatcaacagcaatgtgatgagtccccaggttttggggcgcattcccagccatcatcatcagcagcagtcgtcgaatcccaaccagaagttaatcgccacccaacagcagatactgcagcagcaacaacagcaactggcccaccaacaacatctccagcagatcctcaaggcaaaggccgccgcggccggaggtgccagcaacactgccgtcctagtggcgaagcatcagcagaaactacataagggcaccagcagtggccacgaatcggaaatggagactcgttccgatctggaggatgatgacggagatctgagtccctcgccgccggccaaggcgttccagcgtcacaattcgctgacgcgcaaacaggcagcggcaattgccatgcagagaggtgccaccagaaccacggcagtgtcccttatgcaacttccgccgccactggaagcggacagcgatggagagccgtcacagctcacgcttcagcgccagcagtcacatcacccctcacagacacacccacatccccaccagctgcagcaacaactgcaactgcaacagcagcagcagcagcagcagcagcaacaacaaccaatggccgctcacattgtgggcatgctgcccagcggacagttggtggctgttgcctctggcgctgttgctggcgttccgggcgttggggcgactgcggtgcagcaaggcaacaacaatctgcagcaactgtgcaccgataatctggtgttggcacctccgccgcagttctgcgattgcaatgatgccaagcacgcgccgcagccgcatctgccaacgagccaatatcatccacagcagcaacagcagcagcagcatcagcagcaacaacagcagcagcagcaactgcaacagcaactgcagcagcaacagatgctgcagatgcaccagcggctgtccgggggcgctggcgctggagcggtgggcaccttgggaagggtccggattgtgggggccatgcccaaggcgaaccaccataggttgcactaaactaagcctggggaatcaaatcaaccgtttgccaaatcgttaaatcgttagttagtgtaagtcaacaacagtcattgccactcacaacgaatagccgcaactgcctgcacccagaaaatgaagcgtgacgaccacaaatcagacacaaatctaattgttgccacatctgttcaatggcacgaggatgttcgaattagaattttcttgatttcgaaatcttaagttacttttattatatttattgcgtgtgatataaatttatgcaagctgcccgcgagcagcaactaatcgctatttgtaatcaaacagcaagtatgtatgcaatatttaatgattagttaacagatacccaacatcctaccattgaaaacaaactgaaaggcagccgccggaaattctttctcaatactgggcttttagtttgctttcgagctgcacaatgtgtcaaatgttagtgtggacttcagtccgcatccgatcttagttcgtaatgttagaagggcgccagcgacaggcaacttcatttattcagtatccatccattgatcattcgtgttcgtgtttgactagtgcacaaaacatttaaacgacattaacattactctaattcacaactagtgtaggttttatatgcctaatgaaagcagggaggcggaagttgcaccgagtaacaataatatttgaatttgagcatttagccgaatttccagtcaagtcaagtcaactaaactaaactaacaaatactaaatgaataaaacgtataatgtttttaaacaaaatatttataaaacaaatatttcaataggcggctattttataatcgagcaaaaaaaaaaaaagaaacaagaaagatcgaaattgaaaacaaaacgtaaatttttgctagtaaaatttacagatttttacttttaaaagattttttgtataattgtttttttagagacaaactttaacttgccagaaatattacagaatattagagaacgtaattggagttga

SEQ ID NO: 17903 - DNA, 4626 bp, DROSOPHILA
gtggctgttatagccggcaacttggagctggccgaaatcattgagaactacaagtcggaggatattgttcccttccgcggaccgccgcgctacaatccgaagcgacgctcgggtatcgggtggttgagcgccaatggagccgccggcgcagctctgctggcagcggctggaggtggtttcggtggtgcgatggtcggctcgaatggtgccgccaacggaaacaacggggctggcggtgttggtctgatgctcagccatcagaaccaccagcagcaccacgccggccaccatcagcaacagcatatgcaccaccagcaccaccagaatcaccaccagcagctgcagcagcagcagttgccccacctgcacacactgcagctccacggcccgccatcgccctgcccatcggagcacatgctgggagcctacagctccgccagctccagcctctccgagggctcctccggccaccggtcccacgaggacgacatcagtattgtgacagacaaatccctgggcgataccagcgacataatcagcgattcgtcgggcgtgggaacgaactcggattcggcagcatgttccatcgggcatcccagcaccacagtggtgtgcatggagccatatgctggcaataccgtgggtcacattcgcctccagccaggtgatgtgatcgaagtggtgggcagcaccgactgcggattgctcgagggctatgtgcgaggcactaatcagtccggtttctttccggccgactgtgtccaggaggtgagtctacgccagaagcacatcaccaatgtgatgaccgccagcacgggcatggctccacagcagcagcagcaacagcatttgcagcaggctccggcaggctcatcagccgcctcctaccagggatcaccacagttgagcttgggtggacattctggcagttccagcactctgctccagcagccccatcagtcgccatccctgtcggtggccagtaatggatcatgccagcagccgttggagagcaatgaaggtggagcctctggcaatggcatcaacaatcgaaacaataatcactccgtgggacagtacagcagcgctactgcgccacgcatcaaaaagagcgcctataacgcccctcgatcggtggtactgcatcgagccaagcgcggatttggcttcatattgcgcggcgccaaggcaagttcccagctgatgcagctgcgtccgtcagagcgcttcccggcgctccaatacctggatgatgtggatccgggtggagtggcggacatggccggactgcgtccaggtgacttcctgctgaccatcaacggcgaagacgttacctctgcctcgcacgaacaagtggtcgaaatgatacgttcggccggcgctttggtcaacttgacagtggtttcgccacaattcccccaccagatgcaggccagtgctcagtatctgcccagtggagcgcgagcgggtagccaccatttgaacagtggaccaagtactcctcaaagttcgcatcgtcagtgcgccacgttgccgaggaagatgacgggtccgggaggaagtggtcctggctcctcctcaggaggcagtgtacgaatggctccgatgccaccgcgcagggatcccaagaccacgttgagtgtaggcagagccagggccaaatccatggtggctggtcttgaaaatggaggtgagaaggaggacgatttgccgcacaccaaatccaactcagtggagtcgatcgcaacgccaacacctaccggtatccaaacgggacctggaacacccgttcagctgcgcacggcgagcattaaggcgcgacccacgtctagtaggatcacagctgccgaattggaggagctattccagcgacagcaaggcgagggcagtgcagcaaacgccagtcggtatgccaccatgatgaccagctcccgtttccagtcgggcacggacagcggcgcagccactccgccagcatccaatggatctcccatgaggagtggaccgctggtgtacggcagtgtggctgagatgaaacgtaagacagcgaggagcaagcatggtagtggcacgctgcgtggaaaacccgtagccacacccacagtcggcccaggtggagctggaggcggtcgtgacctcaaacggttccattccacacccgatttgcatggtcctcagctgcacggttcagcctcatccatttggcaggcatctggaaagggtcaccactcgcaggacgatgtggccacgctccatgcctcactccaacgcttgaactctaaccaaggagaactgaaactgggaggattaggagcaggatctgctacaggagcgggaggagcggtactaccgccgcccaatcacccacctccgccaccaccagtgggtcaggttgttaaagtggaaacacgcagcagtgtttcggagtatgagagcaccatctccttacaacaaaaactaaagaagcgaacggaaaacgatgctgtgaccagtgcagccatcgatggcgtccagagcagcttcaatccctcggcaaatgccaagatctatgcctcgccgcaggaactgcgcaacgttatggcctggaagttgcggcaggcgcaggagaagccatcgcaggagacatccgctggatcccagcagccagttagtcagtacgctgctcccacgcagatgcgaccagcacaacaacagcagcaagcacagcagccacctacagcattggcctctcactatgcggctccacaagtccaggtccagcaagtgcaacaggtgcagcagtcacctcagcagtctgcccctcaatccccacctgctccaccgctgccacaagcagcacctgtgccggcacaaaatggtaatggcaatggcagtacaagtggagccggatcagctcctcctattcccgaacctgactacagctgcagtgaatcggatggcgaggatgagaactctattctggtggcacggaacaccaagctcaacgagaagattgcactgttcgatgtgccagagactagtggaaatagtcaggctagtgggagtagttccaactcaggcagtgcctcgatttctcattccctatctgtggaggagatccagcgcattcgcagcaatctaaagacatcaaagtcatcgccaaacggttttgccaagaaaccggaggaggagaaaccacaacaagaacagcagcaatcccaccaacaaccacagcaacttttgcagccaggcgaagatgagtgcgacaacagcagctccggcgttagcagcgagcaggaacagctggcactggccgccggggttacactgccaggtggtggtaagcccaccgataccattaagaagaaaccatcggtgaccattgtcgaggaacccaagactattcccgatcagcccagcagcaacaccagtcacactacaaagcctatggccaagaccactattagcataggcggcggtggcagtgctgtgcccacagccacacttacagtgaagcaacttgtgcaacagcaacatgcacccgttatccaacagcagcagcagcaactgggcagcaagcaaccagtgacagcagccagcaccaacaagtttacgcaacagagcaatatcaacagcaatgtgatgagtccccaggttttggggcgcattcccagccatcatcatcagcagcagtcgtcgaatcccaaccagaagttaatcgccacccaacagcagatactgcagcagcaacaacagcaactggcccaccaacaacatctccagcagatcctcaaggcaaaggccgccgcggccggaggtgccagcaacactgccgtcctagtggcgaagcatcagcagaaactacataagggcaccagcagtggccacgaatcggaaatggagactcgttccgatctggaggatgatgacggagatctgagtccctcgccgccggccaaggcgttccagcgtcacaattcgctgacgcgcaaacaggcagcggcaattgccatgcagagaggtgccaccagaaccacggcagtgtcccttatgcaacttccgccgccactggaagcggacagcgatggagagccgtcacagctcacgcttcagcgccagcagtcacatcacccctcacagacacacccacatccccaccagctgcagcaacaactgcaactgcaacagcagcagcagcagcagcagcagcaacaacaaccaatggccgctcacattgtgggcatgctgcccagcggacagttggtggctgttgcctctggcgctgttgctggcgttccgggcgttggggcgactgcggtgcagcaaggcaacaacaatctgcagcaactgtgcaccgataatctggtgttggcacctccgccgcagttctgcgattgcaatgatgccaagcacgcgccgcagccgcatctgccaacgagccaatatcatccacagcagcaacagcagcagcagcatcagcagcaacaacagcagcagcagcaactgcaacagcaactgcagcagcaacagatgctgcagatgcaccagcggctgtccgggggcgctggcgctggagcggtgggcaccttgggaagggtccggattgtgggggccatgcccaaggcgaaccaccataggttgcactaa

SEQ ID NO: 17904 - protein, 1478 aa, DROSOPHILA
MVGSNGAANGNNGAGGVGLMLSHQNHQQHHAGHHQQQHMHHQHHQNHHQQLQQQQLPHLHTLQLHGPPSPCPSEHMLGAYSSASSSLSEGSSGHRSHEDDISIVTDKSLGDTSDIISDSSGVGTNSDSAACSIGHPSTTVVCMEPYAGNTVGHIRLQPGDVIEVVGSTDCGLLEGYVRGTNQSGFFPADCVQEVSLRQKHITNVMTASTGMAPQQQQQQHLQQAPAGSSAASYQGSPQLSLGGHSGSSSTLLQQPHQSPSLSVASNGSCQQPLESNEGGASGNGINNRNNNHSVGQYSSATAPRIKKSAYNAPRSVVLHRAKRGFGFILRGAKASSQLMQLRPSERFPALQYLDDVDPGGVADMAGLRPGDFLLTINGEDVTSASHEQVVEMIRSAGALVNLTVVSPQFPHQMQASAQYLPSGARAGSHHLNSGPSTPQSSHRQCATLPRKMTGPGGSGPGSSSGGSVRMAPMPPRRDPKTTLSVGRARAKSMVAGLENGGEKEDDLPHTKSNSVESIATPTPTGIQTGPGTPVQLRTASIKARPTSSRITAAELEELFQRQQGEGSAANASRYATMMTSSRFQSGTDSGAATPPASNGSPMRSGPLVYGSVAEMKRKTARSKHGSGTLRGKPVATPTVGPGGAGGGRDLKRFHSTPDLHGPQLHGSASSIWQASGKGHHSQDDVATLHASLQRLNSNQGELKLGGLGAGSATGAGGAVLPPPNHPPPPPPVGQVVKVETRSSVSEYESTISLQQKLKKRTENDAVTSAAIDGVQSSFNPSANAKIYASPQELRNVMAWKLRQAQEKPSQETSAGSQQPVSQYAAPTQMRPAQQQQQAQQPPTALASHYAAPQVQVQQVQQVQQSPQQSAPQSPPAPPLPQAAPVPAQNGNGNGSTSGAGSAPPIPEPDYSCSESDGEDENSILVARNTKLNEKIALFDVPETSGNSQASGSSSNSGSASISHSLSVEEIQRIRSNLKTSKSSPNGFAKKPEEEKPQQEQQQSHQQPQQLLQPGEDECDNSSSGVSSEQEQLALAAGVTLPGGGKPTDTIKKKPSVTIVEEPKTIPDQPSSNTSHTTKPMAKTTISIGGGGSAVPTATLTVKQLVQQQHAPVIQQQQQQLGSKQPVTAASTNKFTQQSNINSNVMSPQVLGRIPSHHHQQQSSNPNQKLIATQQQILQQQQQQLAHQQHLQQILKAKAAAAGGASNTAVLVAKHQQKLHKGTSSGHESEMETRSDLEDDDGDLSPSPPAKAFQRHNSLTRKQAAAIAMQRGATRTTAVSLMQLPPPLEADSDGEPSQLTLQRQQSHHPSQTHPHPHQLQQQLQLQQQQQQQQQQQQPMAAHIVGMLPSGQLVAVASGAVAGVPGVGATAVQQGNNNLQQLCTDNLVLAPPPQFCDCNDAKHAPQPHLPTSQYHPQQQQQQQHQQQQQQQQQLQQQLQQQQMLQMHQRLSGGAGAGAVGTLGRVRIVGAMPKANHHRLH

SEQ ID NO: 17905 - DNA, 4178 bp, DROSOPHILA
gtagtgtaagcagtgaatatatattacaattaaattcatttataaacaaacaaagattaaaccttatacacacgtaaatacgatcattaaatatatatattcttatacacgatacgattttaatcaatcaatacatcaatcaattcagcaaacaatcgagcgatatacttcaatttgcaaaaaagtaagtgttaaatataaaattcttaatcaattaaagataatgtaatccttattaatccttattattttgaaagtaatcacattctttaaggagctatacaaaatatgtgattttcgatgtaattttaataggattaatccctttcagctacttcaaagaaatacctacaaacatactcagacgctgctgtggatcaggcgtagcataaatcagcaaacaataagccatcaagtattattagcaactaaaacgaactcagactcggaatcagcctcagaaatctcagctcgagatcatcaaacttaactcaacttaacgcaactcagtcgaactcatctcatcgtcaacagaagaagcctcaaccagaatacaacagatacacgtatatatttagacatatggtaatgatcaagcaactgtgggcaggtataggaacaacgctaagctaaacgtaaggactaaggacaacaacaaattctctagattacaatagaatacagaagaagaggacaactttttcatgcaactttgaaggctgacaaaacaaatttttgataatccaaaagcagaagcgaacaaattactaaaaaaccacaaacagcaacaaaacacgcgttaagaagaagagactgattttaaaataaaagagctaggcagcggaaaggataaaaggcagcagaagtgaggcaaaagtgattaaggatcaaatccaattaaaaagaaaacaaacaaacgcaactttccatacaacatatttagaatatatatctaagaaacattgatatttttgagcgattatcccttctttgatatatcatgttgaagaaactcaaatgcatggaggcggtccaggcagcagcggctgcaacatcatccggaggatcttcaggcagtgttccgggttccggttccggatctgcatcgaaactgatcaagaccgagcccattgactttgagatgctgcatctggaggagaacgaacggcagcaggatatcgagcgggagccgagcagcagcaatagcaacagcaatagcaacagtttgaccccccagcgatacacacacgtgcaggtgcagaccgtgccaccacgccaacccacaggtctgaccacgcccggtggcacccagaaggtcattctgactcctcgcgtagagtacgtgcaacagcgagccaccagttccacaggtggtgggatgaagcacgtatacagccaacagcagggcactgctgcatcgcgatccgctccacccgagaccacggccctactgaccaccacttcgggcacaccacagattatcatcactcgaaccctaccctccaatcagcacctgtcgcgccgtcattcggccagtccctccgccctgcaccactaccagcagcagcagccgcagcgtcagcaatcgccgccaccgctgcaccaccaacagcagcagcagcagcagcatgtccgcgtgatccgcgatggccggctgtacgatgaagccacggtagtggtggctgcccgtcggcattcggtgtcgccaccaccactgcaccaccactccagatcggcgcccgtgtctccggtgatcgccaggcgcggtggtgctgccgcatatatggatcagcaatatcagcaacggcagacgccaccgctggcaccaccgccgccgcctccaccaccgccgccaccaccaccgccaccccaacagcagcagcaacagtacatctccactggtgttccaccacccacggcagcggctcggaagtttgtggttagcaccagcacgcgacacgttaatgtgatcgcctccaatcactttcaacaacagcagcagcagcaccaagcacagcagcatcagcagcagcatcagcagcatcagcaacatcagcagcatgtgatcgccagcgttagttctagcagcagctcatcggccattggatcaggcggctcttcttcttcgcacatctttcgcacgcccgtggtttccagcagcagcagcagcaatatgcaccatcagcagcaacagcaacagcagcaatcgagcctgggcaactcggtgatgcggccacctccgccgccgcctccgcccaaggtcaaacacgcctccagctccagcagcggcaactcgagcagcagcaacaccaacaacagcagcagcagcagcaacggcgaggagccgtctagctcgattcctgatctaggaatactcaataatgcgcattcccgcaacttgaatgggggacacgcgatgtgccagcaacagcagcagcacccacaactgcaccaccacttgacagccggagctgcccgctacagaaagctagattcgcccacggattcgggcattgagtcgggcaacgagaagaacgagtgcaaggcggtgagttcggggggaagttcctcgtgctccagtccgcgttccagtgtggatgatgcgctggactgcagcgatgccgccgccaatcacaatcaggtggtgcagcatccgcagctgagtgtggtgtccgtgtcaccagttcgctcgccccagccctccaccagcagccatctgaagcgacagattgtggaggatatgcccgtgctgaagcgcgtgctgcaggctccccctctgtacgataccaactcgctgatggacgaggcctacaagccgcacaagaaattccgggccctgcggcatcgcgagttcgagaccgccgaggcggatgccagcagttccacttccggctcgaacagcctgagtgccggcagtccgcgacagagtccagtcccgaacagtgtggccacgcccccgccatcggcggccagcgccgccgcaggtaatcccgcccagagccagctgcacatgcacctgacccgcagcagccccaaggcctcgatggccagctcgcactcggtgctggccaagtctctcatggccgagccgcgcatgacgcccgagcagatgaagcgcagcgatattatccaaaactacttgaagcgcgagaacagcacagcagccagcagcaccaccaatggcgtgggcaaccgcagtcccagcagcagctccacaccgccgccatcggcggtccagaatcagcagcgttggggcagcagctcggtgatcaccaccacctgccagcagcgccagcagtccgtgtcgccgcacagcaacggttccagctccagttcgagctctagctccagctccagttcgtcatcctcctccacatcctccaactgcagctccagctcggccagcagctgccagtatttccagtcgccgcactccaccagcaacggcaccagtgcaccggcgagctccagttcgggatcgaacagcgccacgcccctgctggaactgcaggtggacattgctgactcggcgcagcctctcaatttgtccaagaaatcgcccacgccgccgcccagcaagctgcacgctctggtggccgccgccaatgccgttcaaaggtatcccacattgtccgccgacgtcacagtgacagcctccaatggcggtcctccgtcggcggcggcgagtccggcgcccagcagcagtccgccggcgagtgtgggctcccccaatccgggcctgagcgccgccgtgcacaaggtaatgctggaggcgtaagagcgggaggaggtaggtggttttacgcggagaagtgggagagacagagactgggagtggcagttcagcgaagcaggaagcaggatcacttggagcggcgggagttgaattaaattattttaccatttaattgagacgtgtacaaagtttgaaagcaaaaccaacatgcatgcaatttaaaactaatatttaaagcaacaacaaacaaaacaactacaagttattaatttaaaaaacaaacaaacaaacaaacaacaaaaaacccaagcttgaatggtattacaaaagaaaaagaaaaacagaaaaaatataaatatattttagcagttaaacttttaacgtagcaagaaaccaacaaacccaaggcagcgctctgatttcgcattaacttttcttcagc

SEQ ID NO: 17906 - DNA, 6577 bp, DROSOPHILA
atgttgaagaaactcaaatgcatggaggcggtccaggcagcagcggctgcaacatcatccggaggatcttcaggcagtgttccgggttccggttccggatctgcatcgaaactgatcaagaccgagcccattgactttgagatgctgcatctggaggagaacgaacggcagcaggatatcgagcgggagccgagcagcagcaatagcaacagcaatagcaacagtttgaccccccagcgatacacacacgtgcaggtgcagaccgtgccaccacgccaacccacaggtctgaccacgcccggtggcacccagaaggtcattctgactcctcgcgtagagtacgtgcaacagcgagccaccagttccacaggtggtgggatgaagcacgtatacagccaacagcagggcactgctgcatcgcgatccgctccacccgagaccacggccctactgaccaccacttcgggcacaccacagattatcatcactcgaaccctaccctccaatcagcacctgtcgcgccgtcattcggccagtccctccgccctgcaccactaccagcagcagcagccgcagcgtcagcaatcgccgccaccgctgcaccaccaacagcagcagcagcagcagcatgtccgcgtgatccgcgatggccggctgtacgatgaagccacggtagtggtggctgcccgtcggcattcggtgtcgccaccaccactgcaccaccactccagatcggcgcccgtgtctccggtgatcgccaggcgcggtggtgctgccgcatatatggatcagcaatatcagcaacggcagacgccaccgctggcaccaccgccgccgcctccaccaccgccgccaccaccaccgccaccccaacagcagcagcaacagtacatctccactggtgttccaccacccacggcagcggctcggaagtttgtggttagcaccagcacgcgacacgttaatgtgatcgcctccaatcactttcaacaacagcagcagcagcaccaagcacagcagcatcagcagcagcatcagcagcatcagcaacatcagcagcatgtgatcgccagcgttagttctagcagcagctcatcggccattggatcaggcggctcttcttcttcgcacatctttcgcacgcccgtggtttccagcagcagcagcagcaatatgcaccatcagcagcaacagcaacagcagcaatcgagcctgggcaactcggtgatgcggccacctccgccgccgcctccgcccaaggtcaaacacgcctccagctccagcagcggcaactcgagcagcagcaacaccaacaacagcagcagcagcagcaacggcgaggagccgtctagctcgattcctgatctagatagcgccaagacttctgtgatctgcagcacggtgagtgccagcatgctagcaccaccagctccagaacagcccagcaccacagcaccacccattttgggggtaacaggtcgatctcacctggaaaatgccctgaaactaccgccaaacacaagtgtttcggcttactaccagcacaacagcaagctgggcatgggccagaattacaatccggaattcaggagcctggtagcacctgtcacagatctggatactgtgccacccacaggtgtgaccatggcgagttcttcgaattctcccaactcctccgtcaagctgccccacagcggcgtgatctttgtcagcaaatcgagtgccgtcagcaccaccgatggtcccactgcagtgttgcaacagcagcagccgcagcagcaaatgccccagcacttcgagtccctgccccaccaccacccccagcaggaacaccagccacagcagcagcagcaacaacatcaccttcagcaccacccacatccacatgtgatgtatccgcacggatatcagcaggccaatctgcaccactcgggtggtattgctgtggttccggcggattcgcgtccccagactcccgagtacatcaagtcctacccagttatggatacaactgtggctagttcggtaaagggggaaccagaactcaacatagaattcgatggcaccacagtgctgtgccgcgtttgcggggataaggcctccggtttccattacggcgtgcattcctgcgagggttgcaagatgcaagaggttgctgccgtgcagcatcagcagcagcaacagcaactccagttgccccagcagcaacagcagcagcagcagacaacacagcagcaacatgcaacaactatagtgctgctgacgggcaatggcggcggtaatctgcacattgtcgccacaccgcaacagcatcagccgatgcatcagctccaccatcagcatcagcatcagcatcagcaccagcagcaggccaagagccaacagctgaagcaacaacactcggcgctggtcaagttgctggagtcggcgcccatcaagcagcaacagcagacgcccaagcaaattgtttacctgcagcagcagcagcagcaaccgcaacgcaaaagactgaaaaacgaagcagcaatcgtacaacagcaacaacaaacacctgcaacactagtaaagacaacaaccaccagcaacagcaacagcaacaacacccagacaacaaatagtattagtcagcagcaacagcagcatcagattgtgttgcagcaccagcagccagccgcggcagcaacaccaaagccatgtgccgatctgagcgccaaaaatgacagcgagtcgggcatcgacgaggactcccccaacagcgatgaggattgccccaatgccaacccggcgggcacatcgctcgaggacagcagctacgagcagtatcagtgcccctggaagaagatacgctatgcgcgtgagctcaagcagcgcgagttggagcagcagcagaccaccggaggcagcaacgcgcagcagcaagtcgaggcgaagccagctgcaatacccaccagcaacatcaagcagctgcactgtgatagtcccttttcggcgcagacccacaaggaaatcgccaatctcctgcgccaacagtcccagcaacaacaggttgtggccacgcagcagcagcagcaacagcagcagcagcaccagcaccagcaacaacgaagggatagctccgacagcaactgctcgctgatgagcaactcgagcaactccagtgcgggcaattgttgcacctgcaacgctggcgacgaccagcagctggaggagatggacgaggcccacgattcgggctgcgacgatgaactttgcgagcagcatcaccagcgactggactcctcccaactgaattacctgtgccagaagttcgatgagaaactggacacggcgctgagcaacagcagcgccaacacggggaggaacacgccagctgtaacagctaacgaagatgccgatggattcttccgccgctccatccagcaaaagatccagtatcgcccgtgcaccaagaatcagcagtgcagcattctgcgcatcaatcgcaatcgttgtcaatattgccgcctgaaaaagtgcattgccgtgggcatgagtcgcgatgctgtgcgttttggacgcgtgccgaagcgcgaaaaggcgcgtatcctggcggccatgcaacagagcacccagaatcgcggccagcagcgagccctcgccaccgagctggatgaccagccacgcctcctcgccgccgtgctgcgcgcccacctcgagacctgtgagttcaccaaggagaaggtctcggcgatgcggcagcgggcgcgggattgcccctcctactccatgcccacacttctggcctgtccgctgaaccccgcccctgaactgcaatcggagcaggagttctcgcagcgtttcgcccacgtaattcgcggcgtgatcgactttgccggcatgattcccggcttccagctgctcacccaggacgataagttcacgctcctgaaggcgggactcttcgacgccctgtttgtgcgcctgatctgcatgtttgactcgtcgataaactcaatcatctgtctaaatggccaggtgatgcgacgggatgcgatccagaacggagccaatgcccgcttcctggtggactccaccttcaatttcgcggagcgcatgaactcgatgaacctgacagatgccgagataggcctgttctgcgccatcgttctgattacgccggatcgccccggtttgcgcaacctggagctgatcgagaagatgtactcgcgactcaagggctgcctgcagtacattgtcgcccagaataggcccgatcagcccgagttcctggccaagttgctggagacgatgcccgatctgcgcaccctgagcaccctgcacaccgagaaactggtagttttccgcaccgagcacaaggagctgctgcgccagcagatgtggtccatggaggacggcaacaacagcgatggccagcagaacaagtcgccctcgggcagctgggcggatgccatggacgtggaggcggccaagagtccgcttggctcggtatcgagcactgagtccgccgacctggactacggcagtccgagcagttcgcagccacagggcgtgtctctgccctcgccgcctcagcaacagccctcggctctggccagctcggctcctctgctggcggccaccctctccggaggatgtcccctgcgcaaccgggccaattccggctccagcggtgactccggagcagctgagatggatatcgttggctcgcacgcacatctcacccagaacgggctgacaatcacgccgattgtgcgacaccagcagcagcaacaacagcagcagcagatcggaatactcaataatgcgcattcccgcaacttgaatgggggacacgcgatgtgccagcaacagcagcagcacccacaactgcaccaccacttgacagccggagctgcccgctacagaaagctagattcgcccacggattcgggcattgagtcgggcaacgagaagaacgagtgcaaggcggtgagttcggggggaagttcctcgtgctccagtccgcgttccagtgtggatgatgcgctggactgcagcgatgccgccgccaatcacaatcaggtggtgcagcatccgcagctgagtgtggtgtccgtgtcaccagttcgctcgccccagccctccaccagcagccatctgaagcgacagattgtggaggatatgcccgtgctgaagcgcgtgctgcaggctccccctctgtacgataccaactcgctgatggacgaggcctacaagccgcacaagaaattccgggccctgcggcatcgcgagttcgagaccgccgaggcggatgccagcagttccacttccggctcgaacagcctgagtgccggcagtccgcgacagagtccagtcccgaacagtgtggccacgcccccgccatcggcggccagcgccgccgcaggtaatcccgcccagagccagctgcacatgcacctgacccgcagcagccccaaggcctcgatggccagctcgcactcggtgctggccaagtctctcatggccgagccgcgcatgacgcccgagcagatgaagcgcagcgatattatccaaaactacttgaagcgcgagaacagcacagcagccagcagcaccaccaatggcgtgggcaaccgcagtcccagcagcagctccacaccgccgccatcggcggtccagaatcagcagcgttggggcagcagctcggtgatcaccaccacctgccagcagcgccagcagtccgtgtcgccgcacagcaacggttccagctccagttcgagctctagctccagctccagttcgtcatcctcctccacatcctccaactgcagctccagctcggccagcagctgccagtatttccagtcgccgcactccaccagcaacggcaccagtgcaccggcgagctccagttcgggatcgaacagcgccacgcccctgctggaactgcaggtggacattgctgactcggcgcagcctctcaatttgtccaagaaatcgcccacgccgccgcccagcaagctgcacgctctggtggccgccgccaatgccgttcaaaggtatcccacattgtccgccgacgtcacagtgacagcctccaatggcggtcctccgtcggcggcggcgagtccggcgcccagcagcagtccgccggcgagtgtgggctcccccaatccgggcctgagcgccgccgtgcacaaggtaatgctggaggcgtaagagcgggaggaggtaggtggttttacgcggagaagtgggagagacagagactgggagtggcagttcagcgaagcaggaagcaggatcacttggagcggcgggagttgaattaaattattttaccatttaattgagacgtgtacaaagtttgaaagcaaaaccaacatgcatgcaatttaaaactaatatttaaagcaacaacaaacaaaacaactacaagttattaatttaaaaaacaaacaaacaaacaaacaacaaaaaacccaagcttgaatggtattacaaaagaaaaagaaaaacagaaaaaatataaatatattttagcagttaaacttttaacgtagcaagaaaccaacaaacccaaggcagcgctctgatt

SEQ ID NO: 17907 - protein, 2065 aa, DROSOPHILA
MLKKLKCMEAVQAAAAATSSGGSSGSVPGSGSGSASKLIKTEPIDFEMLHLEENERQQDIEREPSSSNSNSNSNSLTPQRYTHVQVQTVPPRQPTGLTTPGGTQKVILTPRVEYVQQRATSSTGGGMKHVYSQQQGTAASRSAPPETTALLTTTSGTPQIIITRTLPSNQHLSRRHSASPSALHHYQQQQPQRQQSPPPLHHQQQQQQQHVRVIRDGRLYDEATVVVAARRHSVSPPPLHHHSRSAPVSPVIARRGGAAAYMDQQYQQRQTPPLAPPPPPPPPPPPPPPPQQQQQQYISTGVPPPTAAARKFVVSTSTRHVNVIASNHFQQQQQQHQAQQHQQQHQQHQQHQQHVIASVSSSSSSSAIGSGGSSSSHIFRTPVVSSSSSSNMHHQQQQQQQQSSLGNSVMRPPPPPPPPKVKHASSSSSGNSSSSNTNNSSSSSNGEEPSSSIPDLDSAKTSVICSTVSASMLAPPAPEQPSTTAPPILGVTGRSHLENALKLPPNTSVSAYYQHNSKLGMGQNYNPEFRSLVAPVTDLDTVPPTGVTMASSSNSPNSSVKLPHSGVIFVSKSSAVSTTDGPTAVLQQQQPQQQMPQHFESLPHHHPQQEHQPQQQQQQHHLQHHPHPHVMYPHGYQQANLHHSGGIAVVPADSRPQTPEYIKSYPVMDTTVASSVKGEPELNIEFDGTTVLCRVCGDKASGFHYGVHSCEGCKMQEVAAVQHQQQQQQLQLPQQQQQQQQTTQQQHATTIVLLTGNGGGNLHIVATPQQHQPMHQLHHQHQHQHQHQQQAKSQQLKQQHSALVKLLESAPIKQQQQTPKQIVYLQQQQQQPQRKRLKNEAAIVQQQQQTPATLVKTTTTSNSNSNNTQTTNSISQQQQQHQIVLQHQQPAAAATPKPCADLSAKNDSESGIDEDSPNSDEDCPNANPAGTSLEDSSYEQYQCPWKKIRYARELKQRELEQQQTTGGSNAQQQVEAKPAAIPTSNIKQLHCDSPFSAQTHKEIANLLRQQSQQQQVVATQQQQQQQQQHQHQQQRRDSSDSNCSLMSNSSNSSAGNCCTCNAGDDQQLEEMDEAHDSGCDDELCEQHHQRLDSSQLNYLCQKFDEKLDTALSNSSANTGRNTPAVTANEDADGFFRRSIQQKIQYRPCTKNQQCSILRINRNRCQYCRLKKCIAVGMSRDAVRFGRVPKREKARILAAMQQSTQNRGQQRALATELDDQPRLLAAVLRAHLETCEFTKEKVSAMRQRARDCPSYSMPTLLACPLNPAPELQSEQEFSQRFAHVIRGVIDFAGMIPGFQLLTQDDKFTLLKAGLFDALFVRLICMFDSSINSIICLNGQVMRRDAIQNGANARFLVDSTFNFAERMNSMNLTDAEIGLFCAIVLITPDRPGLRNLELIEKMYSRLKGCLQYIVAQNRPDQPEFLAKLLETMPDLRTLSTLHTEKLVVFRTEHKELLRQQMWSMEDGNNSDGQQNKSPSGSWADAMDVEAAKSPLGSVSSTESADLDYGSPSSSQPQGVSLPSPPQQQPSALASSAPLLAATLSGGCPLRNRANSGSSGDSGAAEMDIVGSHAHLTQNGLTITPIVRHQQQQQQQQQIGILNNAHSRNLNGGHAMCQQQQQHPQLHHHLTAGAARYRKLDSPTDSGIESGNEKNECKAVSSGGSSSCSSPRSSVDDALDCSDAAANHNQVVQHPQLSVVSVSPVRSPQPSTSSHLKRQIVEDMPVLKRVLQAPPLYDTNSLMDEAYKPHKKFRALRHREFETAEADASSSTSGSNSLSAGSPRQSPVPNSVATPPPSAASAAAGNPAQSQLHMHLTRSSPKASMASSHSVLAKSLMAEPRMTPEQMKRSDIIQNYLKRENSTAASSTTNGVGNRSPSSSSTPPPSAVQNQQRWGSSSVITTTCQQRQQSVSPHSNGSSSSSSSSSSSSSSSSSTSSNCSSSSASSCQYFQSPHSTSNGTSAPASSSSGSNSATPLLELQVDIADSAQPLNLSKKSPTPPPSKLHALVAAANAVQRYPTLSADVTVTASNGGPPSAAASPAPSSSPPASVGSPNPGLSAAVHKVMLEA

SEQ ID NO: 17908 - DNA, 4501 bp, DROSOPHILA
tatttagttatatatgaaaataaagtttcaaaggatctcaactatagaatttgaaggcacctattggcctattaaaacgatttatacagatatgtttcttttcgtattcaagtaaagtaaaaaggcgaaaaaattaaaaatggaacagtagctccaagatgaccaacgatgacggtcaagagacggatgcgggctccacagtccaagaaggtgatatcgttcttcaagaatcatcgccgcatgctccgcaggcagggcatcgaggatctgctgcatctggccgaacgtggccacgtcgaaccgattagagatagagactaggagatcggcatcgaatgctacatatacggtatttattccacatttccattcaaatttgaaaagcttagtttaagttctaggattattgaattcctcttgcatttaaatattttgtagtctacttttagccgtctttaagaacgacttcaaccctctgctaatcagaatgttaattctaaagctggtcgcatttcttattagaatagcgttagatgttttgcgtactcatcaaaaatttcccaattgaattaatcattacttatgctactacttatgcagcattgtccttcctggcattgactgtgactattactatattattgtaggaaggactgcacgcataccaagagcgcgataaatagcgatgacagcagcgaattttcccgcaacgaagccgacgaccagcgaacttaagctcttttggccatctaaaggatggaaacattcgatatattagccaagccgctagccagtaacttatataacccatattagctatttcaagatttaataaattgttccggaggccatatatttaaaaaatgttggtttgctcatatttgatttttaaccattacatataaggctgaacagctttttctagccaggctggcagcactgccggatcagctgactgacttttctgtgtgcgcgccatccctagaaattaacgtgctagtggaagtggaagcgaattgaaatcgcgcgctgctctattcgcttgtttatgccaaagtccatggctacattggatcggatctgtaattagtcgtctggaggaactggacggattggctcagtgacaccattagccattgacttttctagtgagttcgagttccacacaatgttctattctagcgcagatatggaataaaaaaaaatatatttggcttggtttgttatgtaaaacgcgtatcaattctctggcgcgttgataacagcagcaattcagttgataaacaaacacaaaacccatgcggaaacaattgaaacgaccccacaccccaacaccgccacccaccacccacacgcaccttgggttgtcgctcaaggttgcgctagagatgagcaggaagcagtgactgctatcgtgattgccattaatattagtattagtattagtatagtgataacacagttttttatatatatgtacatatatagtgatactttcagttgaatctatattttagtttcattatactcatgtcaccggttttctgtcaaagtcacactgttctgcgcatctctatcgccactatttgttactgacgttagcgccaaattcgaaatgtcaagaacagaaatccgaacgtaacagcggccatatcgcttatctagcgacggcggcagatagtggcaacctgctcctccgtctcgctctgctccgcccatcgcagcagatttgcatcgttgtttggagccatgcggctatttcacctctttcacctgtctgtttgcctcgtttcacacacacacacagcatgcccaggaattggcttcacctcgcattgtggataaactgagacggtaaagtcgttgtcgccgccaccgcctccgccacgcccaccaagcggacagcacccagatctccggttgcgaactagtagtgacgccaacgtggtcgatcgccgtcgtcgtcatcaacaacgttgtgttcgtcgaactgtgagattatttaatgttggccaccggttttctggctcgcagaaccgtacttaaccagccggcgttcaattcatggagcacactcctccggaccgctagaaaacgacccacatccacggttgccgccagagttccattaaagcttcagtcacagcagcaatttacaagagcatactcgtcgtaagaattgaaagatgtacatacatatgtatttaacacatgattgaaaactatttgtatcccacgatttagctccaaaaccatggacacgccggcggatgtattccgcggcattacggatcgatttgccggagtaacagtcgatgggcgcgaggagaacgtggacaaatccagtttccgggacaagctcacaagtaagaatatatatcttaaaatatgtcggtatctttgcctggacgtatattttttgtatcattgtatcttctaagtcttcgtgctatcataagttgattaaaagtttatctatctaaagttggggtactaaattaaatttccaaaatcattgctctccacttttatcaatttaaaagttgtctatgactataaatagtcatagacaataaacggcttataattttaattaaatctgtgtcaccaattaccaaattatattaataacgaaataccttttagaatccctggacttttggacgacgaacaagaaccgggccatttggttccgcgtgtacaaggagcaggctgattgggtgcccattctggcggagaacggctttgatttccatcatgccaagaccggtgtggtggtcatgtaccgctggttgccggagcacgagtctagcaacctacccacctacgcccacacgctaatgggcgtcggcggactggttatcaacgaacaggacgaggtgctggtggtgtccgatcgttttgcaatgataccaaacagctggaagctgcccggcggctatgtggagccgcgggagaatctcatcgatgcggcaatacgagaggtggccgaggagacgggaatccgcaccgaattccgctcagtggtcagtctgcggcatgcccatggcggcaccttcggctgctccgacatgtacgtggtcatcgccctaaagccactgaatttggactttacgcgctgcgaacgcgagatagcgcgcatccagtggatgcccatcgcggagtatctgaagcatccgcaggtccacgagacgaacaggcagttcgtctgcacctttttggactaccagaagcgcggcctgaccctcacctgtcgcgacgaagtgcatcaggtgctaaagaagaaatacaatctgtattacgtggatcgggagcagccacaggagcagcaggataaaaagaattcgtgagacttgtcggtgcaatggccaaatccttagtgcaatttttataaagtcctttcttccaaaagccagcagcatcacaactgcgcattcaaatgttcacaatgtagtcaataaatgaatttttttgtatataattatatgcatatatcaattaaagctcacacagccttttacaaaagcttttcttttgataccatttttagaaacgccaataatttaaaatatggcattattttgaatatgacgcccaaacatggtaaatacttccttagaaggtaagccaataaggattaaggatgtaagcttcatactttgaaaaatatgtttattaaaaacaaaaatgaaaagaaattattattctctcctgtttttttcaacttattttcaatgatatgcaaaaaccagaagtcgcacaaatgagacgaaactcgcatacgtaatgattctaaaaagttgtggtttgatgtactataatttccaaacgaaacataggccatttattgggtcaagttgattttaaactctttgttgtacgaatgccatctatagacccgtggcctcggatatcggccagatgcggcagagcacgcggctccggatgaggcccaccggaatgggtccgtagtagcgggaatccgagctgtttcccttgttgtcaccctcaatccaaacgtgtccgcgcggcacatagtccttgaccatcacgggcttcttcttgtcatccgaattaccactaaactccgcctcaatgggaatgggcttctggattagcacctgatcaccggaaacggccacgatacgcttgcaaatgaactgatcggctttgatgggcgatatggcgatgactatgtcgccgggctggtaggttcgccagtgtttcgacaagcgctcggtgagaagaacgttgtccgagtgcagggtgggctccatggagggtcctttgcactggaaatggttgcattaatgtgagtgtacgtacttttccgcaaaagaaggatatcaagtggaagttacacaaggtggaaaaacaagtggagagtaccttaatgcattcacacgaactatgtgatgctggcacatgttgggcaagtatacccgcccaggaacttcatcctagacgccttaccaggacgaaatcgccaatgtactcgaag

SEQ ID NO: 17909 - DNA, 1490 bp, DROSOPHILA
tggaagtggaagcgaattgaaatcgcgcgctgctctattcgcttgtttatgccaaagtccatggctacattggatcggatctgtaattagtcgtctggaggaactggacggattggctcagtgacaccattagccattgacttttctacatgcccaggaattggcttcacctcgcattgtggataaactgagacggtaaagtcgttgtcgccgccaccgcctccgccacgcccaccaagcggacagcacccagatctccggttgcgaactagtagtgacgccaacgtggtcgatcgccgtcgtcgtcatcaacaacgttgtgttcgtcgaactgtgagattatttaatgttggccaccggttttctggctcgcagaaccgtacttaaccagccggcgttcaattcatggagcacactcctccggaccgctagaaaacgacccacatccacggttgccgccagagttccattaaagcttcagtcacagcagcaatttacaagagcatactcgtcctccaaaaccatggacacgccggcggatgtattccgcggcattacggatcgatttgccggagtaacagtcgatgggcgcgaggagaacgtggacaaatccagtttccgggacaagctcacaaaatccctggacttttggacgacgaacaagaaccgggccatttggttccgcgtgtacaaggagcaggctgattgggtgcccattctggcggagaacggctttgatttccatcatgccaagaccggtgtggtggtcatgtaccgctggttgccggagcacgagtctagcaacctacccacctacgcccacacgctaatgggcgtcggcggactggttatcaacgaacaggacgaggtgctggtggtgtccgatcgttttgcaatgataccaaacagctggaagctgcccggcggctatgtggagccgcgggagaatctcatcgatgcggcaatacgagaggtggccgaggagacgggaatccgcaccgaattccgctcagtggtcagtctgcggcatgcccatggcggcaccttcggctgctccgacatgtacgtggtcatcgccctaaagccactgaatttggactttacgcgctgcgaacgcgagatagcgcgcatccagtggatgcccatcgcggagtatctgaagcatccgcaggtccacgagacgaacaggcagttcgtctgcacctttttggactaccagaagcgcggcctgaccctcacctgtcgcgacgaagtgcatcaggtgctaaagaagaaatacaatctgtattacgtggatcgggagcagccacaggagcagcaggataaaaagaattcgtgagacttgtcggtgcaatggccaaatccttagtgcaatttttataaagtcctttcttccaaaagccagcagcatcacaactgcgcattcaaatgttcacaatgtagtcaataaatgaatttttttgtatataattatatgcatatatcaatta

SEQ ID NO: 17910 - protein, 330 aa, DROSOPHILA
MLATGFLARRTVLNQPAFNSWSTLLRTARKRPTSTVAARVPLKLQSQQQFTRAYSSSKTMDTPADVFRGITDRFAGVTVDGREENVDKSSFRDKLTKSLDFWTTNKNRAIWFRVYKEQADWVPILAENGFDFHHAKTGVVVMYRWLPEHESSNLPTYAHTLMGVGGLVINEQDEVLVVSDRFAMIPNSWKLPGGYVEPRENLIDAAIREVAEETGIRTEFRSVVSLRHAHGGTFGCSDMYVVIALKPLNLDFTRCEREIARIQWMPIAEYLKHPQVHETNRQFVCTFLDYQKRGLTLTCRDEVHQVLKKKYNLYYVDREQPQEQQDKKNS

SEQ ID NO: 17911 - DNA, 2962 bp, DROSOPHILA
tacgagatataacagttaaatgaaccgatgcagcaatgtcgtatgaataacagaaacatatatcttaagtataaatgagtatatatatagcctatatatacacgcatatgtatatctgataaatgagaaatcgctaaactgataaaattaaacctaagtaaaattaaaagaaaatacaaaacacggaaagaaatggaactaataaagagaattattctgagaaatataagccacctgactttcaattgagcgaaaaagggtgaatatattattaagtgtgttggccgaaaatatattttcagttctttctttattgtatcattgcaattaagatcacctgcttttatttagcattttaagattgattctgatgcttcataatgagaactaatggaatgatcaacaactcagcccactgcaatctctgattgtgcgcaatagaatattttttagataagacgtggtccggggtatcaagcaaaagcaactgtaaacatatatctgcggttggggaactccacagtgaaccgtctctcgagatcagttctccactggtcttcgtagagatcggtccgctaaaagtaccttctaaaaattccttttaaaacgtgagaagagcaaatattcaaagcgtgacccacattgaaagctgtgaatatgtcaaccgtacagaccggtgagtttgaatcccggggagataagagcttatctcagctcatcagataatgaaattttccgctgtttttgcatccagttctgggcaccattactcccaatctgctgggtcgaactttgacccacgaacatgtcgccctcgatttcgagcacttctatcgcccaccgcctccggatttcgagagcgaactgaaggcgaagatcagcatgtccaccctgggctatgtgcgtctatatccgtattccagcaaggagaatgtccgcttctacgatggagaagccctcgaggcggccaagaaggatgtgctgctctacaagaagcacggtggtggcagcattgtggagaacagtagctacggcctgaaacgcaatctggagttcatagtggagctggccaagagcacgggtgttcactttattgccggcaccgggcactacatccatgccatgcaggatgccagtcatgccagcctaaccgtggagcaaatgagcgacttgtactccaaggacatcatcactggactgcaggtcaatggcaaggtggtcaagtgcggattcattggcgaggtggccagcgtgtatcccattcatggtaggtctgagcaaagtctattaagaatccaaatatatatactgatatattattttaagattttgagaagaatgccatcaaggcggccggtgagattcaggaagtccttggctgtggtgtttctatgcatccgcatcgtgttaccaaggctccttttgagatcatgcgtctttacttggaggcgggtggacgtgccgacaaatgtgtcatgtcgcatttggatcgtaagtaatatagtctcttaaacatacccagtttgattgaacgttccatattcattaggcaccattttcgacatcgatgagctgctggaattcgccaagctgggctgctacattcagtacgatctctttggaacggagtgctccttctatcaactgaataccagtgtggatatgatctccgatggccaacgtatcgacaatctgataaagctgattaaagagggtttggtggacaagctgctcatgtcccacgacatccatacaaaacatcgattggtaagctaaaattaactcgattgtaaatctcttctatatatatctctatttatttagacctcctatggcggtcatggctatcatcacatccataccaacatcctgcccagaatgttcgatcgcggagtaactttggagcaagtggagcaaatgacggtcaccaatcctgcaaaatggttggcctttgacccctaaacctaaaaagtttgttattctggtagcatctcttatcatgtttttcttgttgataagattagcgcggttcttttggcaataaaaaatgggcgtgtcttcgaactcaagctaatcactttgtttttattacaaaacacgaaaatgggggctcgtacgattttttttagatgcaattagaaagtgattaataaaaacttgggcgaccacaaaaataagtcctctacctttgttctatatcagttgattaaatatatggatatataaagaaaaagtatgtaatagaatagaacttctcggtcaacgaatttctaaaaatttccaatattttagaatatttccactgccgattagagataagtctccgaaatccttatcgttttcggcccactttcaaaccacgtacttaacttcccgtggacttgatatcctatcggcatcgggaacagttccgatggatgttgccaaaaaaggaggaaaacgggtgaaaacgttatcgttgttattgtttcatttaaggttgccagaacaactcttatcagctcgtcgtcaggccaggccccataaagtgaccagccggcaattgaaacgcaaaggtgccgtatttacgacccaatggagtctcctcatccactcatccactatatataccagttccgattattgtcgcactcatcagtattcggcgagctgtttaacccggaggatcctagattgatttttttttgcaatgtcccaggcagtgaaaacggaaacgcccaaggaaccaaatgttgtggctgccaaagccaatggcggcaccgctgtcaatggaaagttggaagcccagaagagaccccggcatgtttctggtggtgtggaggaaatcatcgatcccttttgcaatccggagaaaccgcaacgcatatccttccatgacgtcacatccgctgcctttctcatccgcggtggcgtggaacgcactccttgtccggtagatattcatgcaattgatattttggag

SEQ ID NO: 17912 - DNA, 1140 bp, DROSOPHILA
gtccgctaaaagtaccttctaaaaattccttttaaaacgtgagaagagcaaatattcaaagcgtgacccacattgaaagctgtgaatatgtcaaccgtacagaccgttctgggcaccattactcccaatctgctgggtcgaactttgacccacgaacatgtcgccctcgatttcgagcacttctatcgcccaccgcctccggatttcgagagcgaactgaaggcgaagatcagcatgtccaccctgggctatgtgcgtctatatccgtattccagcaaggagaatgtccgcttctacgatggagaagccctcgaggcggccaagaaggatgtgctgctctacaagaagcacggtggtggcagcattgtggagaacagtagctacggcctgaaacgcaatctggagttcatagtggagctggccaagagcacgggtgttcactttattgccggcaccgggcactacatccatgccatgcaggatgccagtcatgccagcctaaccgtggagcaaatgagcgacttgtactccaaggacatcatcactggactgcaggtcaatggcaaggtggtcaagtgcggattcattggcgaggtggccagcgtgtatcccattcatgattttgagaagaatgccatcaaggcggccggtgagattcaggaagtccttggctgtggtgtttctatgcatccgcatcgtgttaccaaggctccttttgagatcatgcgtctttacttggaggcgggtggacgtgccgacaaatgtgtcatgtcgcatttggatcgcaccattttcgacatcgatgagctgctggaattcgccaagctgggctgctacattcagtacgatctctttggaacggagtgctccttctatcaactgaataccagtgtggatatgatctccgatggccaacgtatcgacaatctgataaagctgattaaagagggtttggtggacaagctgctcatgtcccacgacatccatacaaaacatcgattgacctcctatggcggtcatggctatcatcacatccataccaacatcctgcccagaatgttcgatcgcggagtaactttggagcaagtggagcaaatgacggtcaccaatcctgcaaaatggttggcctttgacccctaa

SEQ ID NO: 17913 - protein, 350 aa, DROSOPHILA
MSTVQTVLGTITPNLLGRTLTHEHVALDFEHFYRPPPPDFESELKAKISMSTLGYVRLYPYSSKENVRFYDGEALEAAKKDVLLYKKHGGGSIVENSSYGLKRNLEFIVELAKSTGVHFIAGTGHYIHAMQDASHASLTVEQMSDLYSKDIITGLQVNGKVVKCGFIGEVASVYPIHDFEKNAIKAAGEIQEVLGCGVSMHPHRVTKAPFEIMRLYLEAGGRADKCVMSHLDRTIFDIDELLEFAKLGCYIQYDLFGTECSFYQLNTSVDMISDGQRIDNLIKLIKEGLVDKLLMSHDIHTKHRLTSYGGHGYHHIHTNILPRMFDRGVTLEQVEQMTVTNPAKWLAFDP

SEQ ID NO: 17914 - DNA, 4179 bp, DROSOPHILA
cagtgtggatatgatctccgatggccaacgtatcgacaatctgataaagctgattaaagagggtttggtggacaagctgctcatgtcccacgacatccatacaaaacatcgattggtaagctaaaattaactcgattgtaaatctcttctatatatatctctatttatttagacctcctatggcggtcatggctatcatcacatccataccaacatcctgcccagaatgttcgatcgcggagtaactttggagcaagtggagcaaatgacggtcaccaatcctgcaaaatggttggcctttgacccctaaacctaaaaagtttgttattctggtagcatctcttatcatgtttttcttgttgataagattagcgcggttcttttggcaataaaaaatgggcgtgtcttcgaactcaagctaatcactttgtttttattacaaaacacgaaaatgggggctcgtacgattttttttagatgcaattagaaagtgattaataaaaacttgggcgaccacaaaaataagtcctctacctttgttctatatcagttgattaaatatatggatatataaagaaaaagtatgtaatagaatagaacttctcggtcaacgaatttctaaaaatttccaatattttagaatatttccactgccgattagagataagtctccgaaatccttatcgttttcggcccactttcaaaccacgtacttaacttcccgtggacttgatatcctatcggcatcgggaacagttccgatggatgttgccaaaaaaggaggaaaacgggtgaaaacgttatcgttgttattgtttcatttaaggttgccagaacaactcttatcagctcgtcgtcaggccaggccccataaagtgaccagccggcaattgaaacgcaaaggtgccgtatttacgacccaatggagtctcctcatccactcatccactatatataccagttccgattattgtcgcactcatcagtattcggcgagctgtttaacccggaggatcctagattgatttttttttgcaatgtcccaggcagtgaaaacggaaacgcccaaggaaccaaatgttgtggctgccaaagccaatggcggcaccgctgtcaatggaaagttggaagcccagaagagaccccggcatgtttctggtggtgtggaggaaatcatcgatcccttttgcaatccggagaaaccgcaacgcatatccttccatgacgtcacatccgctgcctttctcatccgcggtggcgtggaacgcactccttgtccggtagatattcatgcaattgatattttggagtcccagattaagtgattgacttacagaaatccacatcatcggatctatatggcatggagttatatctgaaaaaggatttcctacaatatacaggcaggtaagttatcaaaatttaaaagagatgatcaggtctttcctcctgtctgtctactttttaattgcacttatatgtaggtccaaagtgcatttgcagttcggctttattattgtttatactgataggtttcgctcaacatttagtaatcaattagtatactataaatattgtctgggagaattatttgagtactttgataagcggctgtatttacatgcatttcacactcaaaataaagctgcaaaatacgattatacaattttgacatgtattttacataattattacatattatgcatttttagctttaatacttttgtttgtttttaccttagccactttatttcgcgtcgtttaatagagtacgtcgcatttctattattacgccaaaaatttcgttgataaatttggctgcacataaaagtcaaagatccgataagatagggtttaattggtagatatggttcgattggctcaaattaattgctgttgctaattgatatttgattttgtgaacaacatgtgactgatatgcccaattcacaattttgacagcttcaaggagcgtggcgcacgctatgccttgctatcattgaccgaggaacagaagcgaaccggagtgatcagtgcctccttgggtaatcacgcccaggccctgtgctatcatggctggaaactcaatataccagtgaccgtggtgatgcccaaggcggcgcccatcatgaagatccaaaagtgccggaactacaaggcacgcgtcatcgtcgacggaaatgacatgggcgaagccaagtccctggccatgcgaatgtcccgcgaggagggactcctgtacgtgaatggctacgatcatccgcacattatggccggccagggaactattggtttggagatactcgaacaggtgccggaaccggatgcagtggtggtgccagtgggcggcggtggactgattgccggtattgccacagccgttaaagctttgtcccccaaaaccaagattattgtaagctatatttttattattactttctttgtatgtcaccttattgttttttaacagggtgtggagtcggagaagtgcgccagcttcacccgggccatggaaaatgatggacctattcacacgcccatcaagaacacattggctgatggcttggccgttcctaaagttggctataatgcctatgccaccgcaatgccgctaatagatcgcatggtggtggtcaaggaggagtggatcgcagtggctatcctaagattggtggaggaggagaagtgcgtcgtcgagggagcgggtggtgcgggtctggcggccattctggccggacacttggatgagctcaagggaaagaagtgagtgctttcagtttacttaactataatttctaaacatttctttgttttttttttatgatagagttgtggtgcttctgtgtggaggaaacatagacaccaccgtttttggacgttgtttggagcgaggtttggctgccgttggacgcctggttaagtttaatgtggaggttagcgatcgtcctggcggaatcaacgatctttgcgccctgcttgtccgagtaggcgtgtccattaaggacatcatgcacgagcgagcctggctgagggatgtttataccgtggaagtgaaggtcgtgtgcgaaaccgtggactggacccatagtttgcagctaaaaaacgagctgaagaagttctactcgaaagttcagttctccgatgttccgctggccctgtcaaatgataccgattcgtaggattctcttctgtatatatatatatatagtacacatatgatttattcacttcagcagcgcagcaaaacttaaagctttaacttagagcttagttgtattagagtaaacataatcgtagtcgaagtagaaatgtaaattaggtgtaaataaatatacatagaatacaaagtctagaaacaaattgacaaacgtagggattgcataatatacaaattatgaatcactgcctaaaaactaaaacacaaacaactaaaaatatataaattcatgagcttaggttacgaacgccgttcttcaagcagacacacaatatcagttttattttattttctcttatctttttttcgtttcacttttttttttgttttaagatctcttgcggtttttggcacattaaggatttataacatacgctcagtcaggcaaacacacactacagtacacatcgaaatttacatttacatggctagaaaatatatatgtctctatataaatatggtttatatggtaaaatgtatagtaggtatgtgctatctcataaatacaggcaactcgttgtcaagtcctcggacgtaacgtactttaaaagcgctgactaaatctacgttgagtatacgctaagtgttccgcatggagccgctcttagtggctgttgtccaggcgcagaatcagtgcatccaccacattgtagatctcatcgaaatgcggtcgggattcggcgtcggctgcccagcactggagcatcagtcggtacatctcctcgggcgtgctcttcggcgttggcatacgatatcctagagatcataagtcacatatcatattcttttcctattaaaagcaaatctagtagtatttacccgtatcgatgcgctctctggctctggagttggtcatgccggagtagggtgtgtcgcccttggagaagatctcccacatcagtatgccataggaccacacatcgcacaacgaagtgtacttgccgaaattcaaggcctcggga

SEQ ID NO: 17915 - DNA, 1447 bp, DROSOPHILA
tttaacccggaggatcctagattgatttttttttgcaatgtcccaggcagtgaaaacggaaacgcccaaggaaccaaatgttgtggctgccaaagccaatggcggcaccgctgtcaatggaaagttggaagcccagaagagaccccggcatgtttctggtggtgtggaggaaatcatcgatcccttttgcaatccggagaaaccgcaacgcatatccttccatgacgtcacatccgctgcctttctcatccgcggtggcgtggaacgcactccttgtccgaaatccacatcatcggatctatatggcatggagttatatctgaaaaaggatttcctacaatatacaggcagcttcaaggagcgtggcgcacgctatgccttgctatcattgaccgaggaacagaagcgaaccggagtgatcagtgcctccttgggtaatcacgcccaggccctgtgctatcatggctggaaactcaatataccagtgaccgtggtgatgcccaaggcggcgcccatcatgaagatccaaaagtgccggaactacaaggcacgcgtcatcgtcgacggaaatgacatgggcgaagccaagtccctggccatgcgaatgtcccgcgaggagggactcctgtacgtgaatggctacgatcatccgcacattatggccggccagggaactattggtttggagatactcgaacaggtgccggaaccggatgcagtggtggtgccagtgggcggcggtggactgattgccggtattgccacagccgttaaagctttgtcccccaaaaccaagattattggtgtggagtcggagaagtgcgccagcttcacccgggccatggaaaatgatggacctattcacacgcccatcaagaacacattggctgatggcttggccgttcctaaagttggctataatgcctatgccaccgcaatgccgctaatagatcgcatggtggtggtcaaggaggagtggatcgcagtggctatcctaagattggtggaggaggagaagtgcgtcgtcgagggagcgggtggtgcgggtctggcggccattctggccggacacttggatgagctcaagggaaagaaagttgtggtgcttctgtgtggaggaaacatagacaccaccgtttttggacgttgtttggagcgaggtttggctgccgttggacgcctggttaagtttaatgtggaggttagcgatcgtcctggcggaatcaacgatctttgcgccctgcttgtccgagtaggcgtgtccattaaggacatcatgcacgagcgagcctggctgagggatgtttataccgtggaagtgaaggtcgtgtgcgaaaccgtggactggacccatagtttgcagctaaaaaacgagctgaagaagttctactcgaaagttcagttctccgatgttccgctggccctgtcaaatgataccgattcgtag

SEQ ID NO: 17916 - protein, 469 aa, DROSOPHILA
MSQAVKTETPKEPNVVAAKANGGTAVNGKLEAQKRPRHVSGGVEEIIDPFCNPEKPQRISFHDVTSAAFLIRGGVERTPCPKSTSSDLYGMELYLKKDFLQYTGSFKERGARYALLSLTEEQKRTGVISASLGNHAQALCYHGWKLNIPVTVVMPKAAPIMKIQKCRNYKARVIVDGNDMGEAKSLAMRMSREEGLLYVNGYDHPHIMAGQGTIGLEILEQVPEPDAVVVPVGGGGLIAGIATAVKALSPKTKIIGVESEKCASFTRAMENDGPIHTPIKNTLADGLAVPKVGYNAYATAMPLIDRMVVVKEEWIAVAILRLVEEEKCVVEGAGGAGLAAILAGHLDELKGKKVVVLLCGGNIDTTVFGRCLERGLAAVGRLVKFNVEVSDRPGGINDLCALLVRVGVSIKDIMHERAWLRDVYTVEVKVVCETVDWTHSLQLKNELKKFYSKVQFSDVPLALSNDTDS

SEQ ID NO: 17917 - DNA, 3331 bp, DROSOPHILA
agacatatagctggcatgagctggcatttcgatatcaagggcgatcgcatggttaatgcttactttggttaaaggctcgggctgcttgtccatcgacggcgtccaggagggcggaggttacataacaccagccggagatcacatagttggtggacatgaaccagaaggcgatcagggccagaacgatgcgggcgtagcctggaaaagatcaatataaatcagcacatatgcgtgcatcatacgtatagaatcattggaggtgactcaattgggttggacgaagcggctcttatcgctgaacttgcgcttcgcattgcactagctgccaaacagcccctattaatccaattagggaacactagaatcgctattattgcgccgcataaatcgaacatgcgatttgtttacctagctggagcacggaataaaacctacaaacagccactcaccgatcagatttggcacaaagatgaagacgttatcgtgctcggcaattgtcattttgtttcgccactttggtttttcgtttattttgcgatcttctagctttgcggcttgtttttatccaattaaatgccaaaagtgctgcagaaaaaacagtggaaacagaatttgctgtatctggtgtgaccgcagcgtgacctttggaaaaaacaaacaaagacttgagagaaaataccgaactatactggccaacaagatttcagatggtttccactgacacacatctgtttctagtttctatttttctcttccaatagaaatttagtaattagtatatcattttaaatgtatcaaatacaaattaaaggtcactagattattaacatgagctaccaaaaccgggcaactagtgtagttgcttgttaaatgagttttgacagcgatttgcgtgccgttttgatacattttcgctgccgttgagcagtgtaaatggatctttgcataccgcttctaagctagtatattcctcagcgggacatggcatggtcacaccgcccgcgataaagttttcacaaataataataaaaacacaatacaggcgaaaatataatgcacaagtagcgcgacccgaagtaacctgcgcggagaaccacatgctgtagcatggataaactccgcggcggcagtctgggcggcggcggatcctccagcggcgcgccatcgacggctccgggccatgagcaccaccaactggagcagtatcagtaccccaaaaacctgatcgagcaatatctaagggcctccagcaagatcaagaagttcgagcgggccggcttcttcaagtgagtagctacggcccaagtatgggcaatcagataccttgcagatcattgcgtttgattagcaagtcattgcccaatttatcgcttttcctccatcttcaaactatgtttagaaatacgggtgtattagaagccctcgaatcacggaatacaatctcaatactccactgtttctctaattcccagacgctttgcgcccagcgtggtcgatgtgcaggcggacttccagcgactggcctacagcttcgaggagtcgggcatacagcagtatgcggccatgtgccacattggctatgccaagtgcgagtcctacggcggcgcaccgcagcgcgaatcggaggcctatctgcgggcagctagatccttcctagcggcgcacaacgagtccgggcgactgcatctgcgcacccgccactcgggatttcgggagggagcggtgcactgctatcaccgtgcggcggatcgagcggtggacggttgcgtcttcaaggcggccattctgcgcgagttgaagcagctgcagcggcagctggacagcaccagcagctttgcctcgcccacccatcagatccatgacctggaaatcagcgccgaaacgagtggccagcgcggcgattttcgcagtgcactgcagcattacgacgacattgtggacaatgtttacgagcgacgcggtgctcgcatgtacggtgaactattgcggcgcgttgaggtgctgcgtctgctgctcctagtccatttgaacctgcctcccgcacgccagtcacccgcccacatcaagctgatcgagtactactacaacctggcgcagttcgagtcgctcccctgttcggcggacgacggtggatccgcggagcgtccgggagcatttgtgcccgaacagcagcagtatgcgctggcggagattacgtgcgcctgggtggagcgtaaaatgtgcgatctaaagcacctgctgcgcgactttggagccgaatttggatcgctgagcgacatggaaaggcagctgctggcggtgatgcatgcagaactggcccgaagctactagattttagacctaagatcgtactgtacattatttactactggatcattaccactgaatgagaatgacacatgcaactatcgcttaagtgtaaccaagtctaccaactaacctttgaacgtgcctacacgcataaaaattgaattaaattaacaaacgaatgaccaggtgaatgcagcaataaacagaaggtgcgaagcgcaatgaaatgtaataggatttgtgatttgtacaataaatgaagaggaatgcgcatgatagtgcgaagataaagatgactaacaaaccaccaacttgtttctaatcaatccaacagatgttctatgaagccccctattaatagtaatgcaatattttggtcatttaatttgtttattttacctttgtcaagcaacttctgttttttgtttcttagcaatttctcaattaagttagctaattaatgcgacactcttcgggtgccacaactgatattccgaatcgaatttcgtgatttctttgtgtttgcttacaaaactttttttttttttgtttttcgctggagtttacaattccaatttgttaaatatcctataatatctgtttgtttatgtaatttgtaaattttcatatatgtatgcatgtacgtttcatgtaatacccattaatccttcctaagcctgttacaatttccatttactttgcattgtgttttaaatcgaatcgaagaatatttaattgtcttgttcgaatccgcgagcaactaaatcacggttccgatttgggagggcagtttaacatcgtttctcacacaatttgctgcgactactattcgcttaatcattcatacgtctgttgttgtagtttagattttttaatttttaaatatatagttaaggcttaaataaattacaaaaaaataaagtacacttttcattttttatatatatgtttacatgaaacctagcgaagaattaaacgaaattatataagcgcaagatcacaagcagttttgtatatagtt

SEQ ID NO: 17918 - DNA, 1145 bp, DROSOPHILA
cgcgataaagttttcacaaataataataaaaacacaatacaggcgaaaatataatgcacaagtagcgcgacccgaagtaacctgcgcggagaaccacatgctgtagcatggataaactccgcggcggcagtctgggcggcggcggatcctccagcggcgcgccatcgacggctccgggccatgagcaccaccaactggagcagtatcagtaccccaaaaacctgatcgagcaatatctaagggcctccagcaagatcaagaagttcgagcgggccggcttcttcaaacgctttgcgcccagcgtggtcgatgtgcaggcggacttccagcgactggcctacagcttcgaggagtcgggcatacagcagtatgcggccatgtgccacattggctatgccaagtgcgagtcctacggcggcgcaccgcagcgcgaatcggaggcctatctgcgggcagctagatccttcctagcggcgcacaacgagtccgggcgactgcatctgcgcacccgccactcgggatttcgggagggagcggtgcactgctatcaccgtgcggcggatcgagcggtggacggttgcgtcttcaaggcggccattctgcgcgagttgaagcagctgcagcggcagctggacagcaccagcagctttgcctcgcccacccatcagatccatgacctggaaatcagcgccgaaacgagtggccagcgcggcgattttcgcagtgcactgcagcattacgacgacattgtggacaatgtttacgagcgacgcggtgctcgcatgtacggtgaactattgcggcgcgttgaggtgctgcgtctgctgctcctagtccatttgaacctgcctcccgcacgccagtcacccgcccacatcaagctgatcgagtactactacaacctggcgcagttcgagtcgctcccctgttcggcggacgacggtggatccgcggagcgtccgggagcatttgtgcccgaacagcagcagtatgcgctggcggagattacgtgcgcctgggtggagcgtaaaatgtgcgatctaaagcacctgctgcgcgactttggagccgaatttggatcgctgagcgacatggaaaggcagctgctggcggtgatgcatgcagaactggcccgaagctactag

SEQ ID NO: 17919 - protein, 345 aa, DROSOPHILA
MDKLRGGSLGGGGSSSGAPSTAPGHEHHQLEQYQYPKNLIEQYLRASSKIKKFERAGFFKRFAPSVVDVQADFQRLAYSFEESGIQQYAAMCHIGYAKCESYGGAPQRESEAYLRAARSFLAAHNESGRLHLRTRHSGFREGAVHCYHRAADRAVDGCVFKAAILRELKQLQRQLDSTSSFASPTHQIHDLEISAETSGQRGDFRSALQHYDDIVDNVYERRGARMYGELLRRVEVLRLLLLVHLNLPPARQSPAHIKLIEYYYNLAQFESLPCSADDGGSAERPGAFVPEQQQYALAEITCAWVERKMCDLKHLLRDFGAEFGSLSDMERQLLAVMHAELARSY

SEQ ID NO: 17920 - DNA, 2953 bp, DROSOPHILA
cttgccggcaccggccttggttcccttggctccagcagcgggcttcttcttgggctcgggcttggccttgggggccttcaccggcttgacgagcgcctcgcgctggctcttcagggccttgacgatcttctgctcctcgatgaggaaggcgcgcacgatacgctcgcgcaggcagctgtggcacagcactccaccgtaggtcctggacacggtcttcaggcgcttggacatgcgggggcgctcgctggggcgggagggggtgatacccttcaacttctccttgcactggccgcaacggggcacggtggggttcttcttcacatactggtaaaccagacgaccaccgggcgtgcgaacactgtaaattgcaaatgtgcgttatttttcatattggtgaggtgtattgcagttggatagttacatgcgccgcttgttggagcgtgtgttgtaggacaggcgtctccggagcgtcagacgttggaccattttgctgttgttgttgctgcttgtcgtggcgattcgtgggttacatgtgcaaaagcggtgaaaatcattattagtttggagttacactagggtgggtgcagtttgggctgcatttggtggtatattttcacaattttttcacacatttcggcgaatttgcgtgaaattgttaattgaacacgtgcatacctcaaagagacgaaactagaaagaaaggtggcaaccctgttcgcgcacgacgtgaacttggctgcgctgcccactgtacgacactttcgagcactgcagaccttgccagattgccatgaaaacatgggcttatgggggttgcaaattatttattttttgttagaaaagttaggattttatacacaatttaatgctatattcttttggttaagtatgctttggctaagtatatgcgtattaatatgaggttaaataatgcgttttataaatattgatcccttttactacgcccctgcgataacctgttgttgttttgcttgcgatgaaatctgttatcaaaccgcgaaaagataacatttaattgcagcaatatgagcaaaactagcaacagtaagtgtttctcaaaatttcaaagagatccacttaaatatttcttatttaatagtcatgcgtttggcgctgctgcagctcaagggttccaaggacaaagtggccaatgtccaaaacgccgtcaccaaaatcgaggcggcggtcaaggagcataaaccccgattgatcactctgccggagtgctttaatgctccatacggcaccaagtactttcgggagtactccgagaccattcccgatggctatacctcgcaacagctctccaatttggccaggaagcaccaggtgtacatcgtgggcggaacaatccctgaactgggcgaaaacgatgccatctacaacacctgcacggtttggtcacccactggtgaccttgtggccaagcatcgcaagatgcatctctttgacatagatgtcaagggtggcattcgcttcaaggagtcggaaacgctgtccgcaggcaatgatttcaccatcatcaacgtagatggccacaagattggcatcggcatctgctacgatattcgattcgaggagatggcgaggctctatcgcaacgcaggctgcgagatgatcatctatccggctgcattcaacatgaccactggtccactgcactgggagctattgcagcgatcccgtgccaatgacaaccaactctttgtggtcacaacatcaccagcccgtgacacaagcgccgagtatgtagcctatggccattccatggtggtgaatccatgggccaaggtgcagcagagtgccagtgaaggcgaggaaatcgtggtggccgatatagatttctccgaggtggagcaggtgcgtcagcagattcccgtctttgggcaaagacgtctagatctgtacgccaccgaaaggaaggccaaataaaggattgctttaaatgggaaatgggaaatcttcaaaaattcaagaatctgtcgttttaagcacctttaaagcattgcatttatgttatttgattgtatataaaatttattaggcctacacacacatataacattgatttctgtcgaaaaactattgcattttatctagctgctgattatcgcaggcaggagttacttcggatgcaggtgattgcacgtagtggggtcgctgggcctggtcgaaaagtgctcgtatggcttcatcggtggccatcaggggctgactaatgaattccaaggcctggtgggacggtaataaggtgtaccattaactggatgtttgaatcactttaactatcgctgtacttaccctaaccgcgtacttctccgcctcacaaagtggacttgtgctggcgctggacaactttagtgtctcctcgggaatgcccacgccagtgtgcaggaccatgcgttggagaatgttaaggttttcggcacttaggctgattacatcggtggcgggcaggttgaggaaacgaatcttggccaggaacttcagttgcttaagcatatctagctgaatttcgcggatctgatgggtggcatgaagcagttgcttcgttgactcgttcaatagctgattcttctgcgtgagatcggctttccagcgggctaactcctcaaccataacgctgctggcgaggaatttggaccgccagacctcacactggccggccaggaactcaatctgctcggtgtgggtggtcaaattgttggcagtgtccaatagagctctggccagctgtagtttgtcctcggtgaggagattaacccgtgtctgcagatcctcgcccacggaggccaccagcaggctcttcagctcgctattcacctgcgtttggaacttatactgggcttgaaagtaattgcgttcatcgcgcatcttggccagctcctctttaagtgagtttacctcatggctactggctgtgtctgtttct

SEQ ID NO: 17921 - DNA, 898 bp, DROSOPHILA
aaatctgttatcaaaccgcgaaaagataacatttaattgcagcaatatgagcaaaactagcaacatcatgcgtttggcgctgctgcagctcaagggttccaaggacaaagtggccaatgtccaaaacgccgtcaccaaaatcgaggcggcggtcaaggagcataaaccccgattgatcactctgccggagtgctttaatgctccatacggcaccaagtactttcgggagtactccgagaccattcccgatggctatacctcgcaacagctctccaatttggccaggaagcaccaggtgtacatcgtgggcggaacaatccctgaactgggcgaaaacgatgccatctacaacacctgcacggtttggtcacccactggtgaccttgtggccaagcatcgcaagatgcatctctttgacatagatgtcaagggtggcattcgcttcaaggagtcggaaacgctgtccgcaggcaatgatttcaccatcatcaacgtagatggccacaagattggcatcggcatctgctacgatattcgattcgaggagatggcgaggctctatcgcaacgcaggctgcgagatgatcatctatccggctgcattcaacatgaccactggtccactgcactgggagctattgcagcgatcccgtgccaatgacaaccaactctttgtggtcacaacatcaccagcccgtgacacaagcgccgagtatgtagcctatggccattccatggtggtgaatccatgggccaaggtgcagcagagtgccagtgaaggcgaggaaatcgtggtggccgatatagatttctccgaggtggagcaggtgcgtcagcagattcccgtctttgggcaaagacgtctagatctgtacgccaccgaaaggaaggccaaataa

SEQ ID NO: 17922 - protein, 283 aa, DROSOPHILA
MSKTSNIMRLALLQLKGSKDKVANVQNAVTKIEAAVKEHKPRLITLPECFNAPYGTKYFREYSETIPDGYTSQQLSNLARKHQVYIVGGTIPELGENDAIYNTCTVWSPTGDLVAKHRKMHLFDIDVKGGIRFKESETLSAGNDFTIINVDGHKIGIGICYDIRFEEMARLYRNAGCEMIIYPAAFNMTTGPLHWELLQRSRANDNQLFVVTTSPARDTSAEYVAYGHSMVVNPWAKVQQSASEGEEIVVADIDFSEVEQVRQQIPVFGQRRLDLYATERKAK

SEQ ID NO: 17923 - DNA, 3484 bp, DROSOPHILA
tgataatagttcattatgtacaccatctataggagcatagtgaccatgactattttgggtgttttttttttgtataattgcatcgaattgagcaacatcacgagcgccgaattcgatttcgattttcgagcttacgattgacaatcacttagaactcttgtcaaccacctgtggctgagtttgcacttgtattcgaattccgattcgtatctgtgtttgttttttacttttgcgaaggtgtgggggttcgctcacatcgatatctaaacttttgagtgcggattcatttgcttagcacctttgatgcttcacttatacttatatacgacacgatttggtttcgtttccacacgattctatatctatattatcggacgtatcttcgagcctttcaaaaattaacgcttacgttgtggttttctgtgcttaacactttctgcgtggggcacttcagcagtatcggttgctcttgaaagacaataaatactgcgtcgtcggcaaagtttgaacagtttgcaccgaacacaagtcaaaagcccgcgaaatttccttccgctttgacgtccgaacagctcgaaaagttaacgttaactagagctggggcactatcgacggtactatcgaggtatccgattcgattgttattttttgctatcgatgagcgttatctacagcatgtagaatagaacggatagaataatatttttgttatatctttagtcaacatcatttgaattttcttgtttcgttagggagtttatctctcgtttagtttccttttattattatttcattattattttgaaaggtgaagtgtactaaataacgagctaaaaattgaacgcaatcacgctattcgcggcgatgccagaccgcttgaaaacagttccagttggccagtggcggccagtgatgccatgcgtactaaatttcctaacggttttagttttagatcgaagtgcttaaaataaagttttcttttattaaataatatttagtatcatttaagcatttctaacgatttgtcagctgagtaaggggattgtgatttataagggtctcgactatagcattttcactactttccacctattaaatattttcaggaaactggtaaatccttttattctacaataaagtataatacaatttccatttattattgataagaaatagtacattttattcattcggtttcacaaagtggccctggaaataaatggtttccctatcgcgaatgacataggcaaaaggatgatcggcattaaaaaccatttgagatgacggcataggcatactatagcgcacgaaaagtaaagctggcaaaaataaaacatattatacaaatatatatataataaaattatatcatacctgttgcagccgctgcctcagctccttcttcattaacctcgatgaacgccttatgaatgacttttttcacatgaacgttactgttttcgaccagatctttgaagtcagcagatttttcgaacgcatcttgtatgcccatctatagatgaatatctataaattgtaagggtgtatcaagaataatctgtgaatactcaccgccacaagaactttgtttagttgagcgaagaattcgattttaaacttgggaagccttaaagttacatccattttggaaagtttcggtttgaatcctacaatctttttctccagctctgatagtccatcgacctggtccggtagaaaaattagcatggacaggcttgaatttctgtagggcagctcgataattttggcacccagttcactatcatgtgcggccctaaatgattgaaatagtgacatcatctcgacaggaacactcttttgatccgaaacacggaaattcctcttcttcgttaacttgggattaaatttgtactcccactggcctttaaagtatatggcatttaagacgatcaattccattttcgacatgtcattggatgaaactaagtctttgattttaccacgcgtctgattatctacccaattattgacaattgaagaagccttattgggatcgacaatgtcgattgcctccgcttcagccataaatgaatccttgaccatctgattgtaactcggtactagctggaactttttgttcacgtatatgcgattagccaaactgagagtggctaccttctcgcgtccttcgagtttactcagaaggtccttgtatttggctgccacttcctttttgtcatcgggcagtttcaaaacattcctcatttcttgggctgtctttgccctggctcccatgtaggccatgctcagtgcgatttccacggaaaggggagaggaaatgagattattggccgcattttccttggccaaaagttggtagaaatcgtcggcaaagcgacaagataccgacgtggccaaaagaagcagacctgcgttgcaattattacctattcctctttgattaacttgtattttattagtttacttacacaaatgcttcattttaaccgtcgatcgagattaagaacaaattagaaattacggattatatatagtctgcattataatcaaattagactcgccagcgcgatataaaatttatgcgcttcggttggatttcattaagccattcttaaagaatataaatgaatggcattacacaattaaacttaaatgtataaattccataacaacatatgtaatttgtcgaatctaatttgattagtaaaccaagtataaatagtctacttcgttttaaagatcagtaataatgaactaattttctaatagttttaaatactcaataaataaatcaggttgttttaaaaaacagaccaacttttgctacaaaaatggtatgattatttgtcaaacatccgtgtcgcaacattttaatcaattgcatgccatttaaagccccaacttcgcattcaatcatatctgcggctaacaaagcagtgacatggcatacaagtaacaagagtgatggccacttatcaattacagaaaacagattttaacggactcctgatgagtccgattttagccacattcatatggtttcgaatgcaaacacattcacattacgggagatcaagagatcaaactccagcgacacgctaggaacacaaacaataacatgtcgtgggtgtaattaaaattggatgaccacaaagttccataatatttccgacatttagagcggtctaatggatgaccgtctggccagtggagtttgagcaatcaattgagccgaacgatcactgatcgctgcagccaaataccgcttaatgcgcaaataattgtggatttcgggggaaacgaggccagcgaaagttccgtataaataggggttgagccgtccaggagtttacaaattcatccaaaacgcggagtgaacataatgttgcgtctgatttgcgtgttcctgctcagctgcgttggcttccaggcagccttggcttgcgtaagtatggcaggagctccgtggaccagatctata

SEQ ID NO: 17924 - DNA, 921 bp, DROSOPHILA
atgaagcatttgtgtctgcttcttttggccacgtcggtatcttgtcgctttgccgacgatttctaccaacttttggccaaggaaaatgcggccaataatctcatttcctctcccctttccgtggaaatcgcactgagcatggcctacatgggagccagggcaaagacagcccaagaaatgaggaatgttttgaaactgcccgatgacaaaaaggaagtggcagccaaatacaaggaccttctgagtaaactcgaaggacgcgagaaggtagccactctcagtttggctaatcgcatatacgtgaacaaaaagttccagctagtaccgagttacaatcagatggtcaaggattcatttatggctgaagcggaggcaatcgacattgtcgatcccaataaggcttcttcaattgtcaataattgggtagataatcagacgcgtggtaaaatcaaagacttagtttcatccaatgacatgtcgaaaatggaattgatcgtcttaaatgccatatactttaaaggccagtgggagtacaaatttaatcccaagttaacgaagaagaggaatttccgtgtttcggatcaaaagagtgttcctgtcgagatgatgtcactatttcaatcatttagggccgcacatgatagtgaactgggtgccaaaattatcgagctgccctacagaaattcaagcctgtccatgctaatttttctaccggaccaggtcgatggactatcagagctggagaaaaagattatgggcatacaagatgcgttcgaaaaatctgctgacttcaaagatctggtcgaaaacagtaacgttcatgtgaaaaaagtcattcataaggcgttcatcgaggttaatgaagaaggagctgaggcagcggctgcaacagctgacaaatcgttagaaatgcttaaatga

SEQ ID NO: 17925 - protein, 306 aa, DROSOPHILA
MKHLCLLLLATSVSCRFADDFYQLLAKENAANNLISSPLSVEIALSMAYMGARAKTAQEMRNVLKLPDDKKEVAAKYKDLLSKLEGREKVATLSLANRIYVNKKFQLVPSYNQMVKDSFMAEAEAIDIVDPNKASSIVNNWVDNQTRGKIKDLVSSNDMSKMELIVLNAIYFKGQWEYKFNPKLTKKRNFRVSDQKSVPVEMMSLFQSFRAAHDSELGAKIIELPYRNSSLSMLIFLPDQVDGLSELEKKIMGIQDAFEKSADFKDLVENSNVHVKKVIHKAFIEVNEEGAEAAAATADKSLEMLK

SEQ ID NO: 17926 - DNA, 5302 bp, DROSOPHILA
tcgcgcatcttggccagctcctctttaagtgagtttacctcatggctactggctgtgtctgtttctttaatatccgttgtctcagtctccaattcctgtgtgcgcagcgtggacacctgatccaccagcaccgcaatgtccaggttgttcttatcccgatggattttgtgtttattcgttggctcagagatcatgggattcacggcacccggatatggttcgtagggcacgaatttgggcgccttggtcttcttatgttcgggcagcgagtccgcgctggtgaccagtcttggccgcatctggaccagctcccccttgggcacaacgggcgccaaactccgggtgacgttctcgggtcgtctgtacagggtatgcaagccaggaaggggcaaatttgaggagtggccgctactagttgatgtcttcctgcccatgacggcctcctggacaacggagctgtcttttcgcgataattgtggcctctttaccttgttgtccacatcagcactcgctgggatttcgctctctgttttggccgctccactgttttccggttgctccatgccatcgccgctggtgcgacaagcttgggatttgtccgttcctggcatcgcactttcattcgcttccatttctgggcaatcttggccaggccaaataaaattttcctaatttaagaatttcttttgctgtgccagcaaaacaaaaacattgaccaagggctgccaactcgctgcaaagaagttttgtgtttctagtgttggtcaagacctaaatgtttgaaactatcatgattataaaaaagcattgttaattagaaatttatttgcctttaaaaatgctctcctacccaataaaatgggtataaataaataaattcccaagtgaacaccacagtccagtgtgaccagagcatgtcaacatgaaaacgcacgttacacttcatttaacagtgctgttcggcccacccacgcacacgttcacactttttgataaagtcgattgatttgattgaccgagaaaaaaaaacaaataaacacaacgaaggtgaactggtaccggcgtagtgaagataccaccaacgccagctcccaacacatcccggccacgccccccgaccgcccgcggagctccaaaggatgtcctcagtggaggccgaggtgctgcagaaaatcgatctgattgagcccacaaccggaaaattgtttttcgagcacaaaacggagctgcttttctgccggccacatctgatgccgctaaagacgcaggcgctggaacgcctggaggaaatgcatcgggacaccgctcgccaattgcagaagaagcgccagcagaagaagaagtccacggagcccacaggctcgctatgaaccagtccttaatcgcagaaatacatttgttataagcacatacacccacacgcacgcaccacaaatacacagaatcacagcaaagcacaagaactgagtacacccgtaccaggatcgggatcgggataagcactagtcacaatggcgtacctactaagctttggcatcgtggccgccctattcctggccagcatctcgctgtaccgttacggaaacataccacgtcagcacatcctggtcaccctgtccgtgctgaccgcctggtgtttctcctttctaattgtattcaccattccgctggacgtgacatcggtgagttggaatgtgaagctataagaccatttggaatagaatatagccgcaataggaaacaacagaaagcttaaaataacttaataaatagttgcattaatatgattttgtagatgtgcatatatagtacttttaaacgtgcaaatgcttctgtcctttctgccatatgttgtggttttgtatatgttttgtatatgttgcaggtaaaatatatattccaacgatcataaatatatacaagactagaacgactagaaattataaatatttaaaaacacgtttcgttcataaagaagtaatctttagatttccatttccatcaaaacacagtttgtcgcattttattgcatgtgaaacgttagtaatttttaaacaaaacttaaatttcgaacggaaattaattaactttttatctaaagcttcgccgacaccattcaaattgtaagcatacattgattttggtctggaatttcttatctgcaaatgaatcacccctaaagttagacaacaaaaaacccgaattgattatagaaacacaaattaaccgctttccggctttggatataccctattgtcatttggttatcaactccttcgattagagctaataacaattaacaatcaaattgtataattgccatttcagacgctttaccggcagtgcgtggaggagcaccgaccgaccccagccccaaatgtgaccaacacgtcgagcgccacggtgggtccgccgcctcagtgccaggaaccgtggggcatggtgcccgcctccgtgttcccaaacctctggcgcattatttactggagctcacagttcctcacctggttgattatgccgctgatgcagtcgtaccttaaggcgggcgacttcaccgtcaagggaaaacttaaatcggcactgatagagaatgccatctactacggttcctacctgttcatctgtggcgtactactcatctatattgccgtcaaaggagagtctctggattggcaaaagctcaaggcaattgcctcgtccgcatcgaacacatggggattgtttctgctcatcctgttactgggatatgctctggtggaggtacctcgatcgttgtggaacaacgccaagccgggatttgcactgcaatatgcctacttcaaggcagccaaattgagcactgagaaggccgaggctgaggagcatgtggatgatatccttgagtcgctgcaaggccttagccgcgtcatacccaacaatcacgagttgcgcccctgcctggagaccattctgcgcaaggttcccattgagctgcaagagcgagcgagtcgaaactttgcgcgcactggaggcagcggcatgggtgccacgagttccactatcttgccttcggaaaaggcgctggttcgcattcataagcaagtaatcaaatcgctgcaaacattgcagcgcaccgaagcgctatggagcgtgcaggtgcagacagtgctgcatctggaggatgtggccaagaatatacactcttcggaccggcgcttcaaatctgagtttccgcgccagcgcacgcagctggagaggatctgctacagcgcctcgctgcagtggtactgggagtgcctgctaaaggctccgttcctcaagaccatgtgcgttctgaccgccaccatgtcggccatggtggtgtggagcgagcttaccttcttcagtcgccaccctgtgctttccatattcgccaacgttatctacgtggccaaggagagctacgacttctttactattgaagtcttctctatggttgttctatgctacttcttctactgcacttactccacgatcttgaggatacgcttccttaatctctactacctggcaccgcatcaccagaccaacgagcacagtctgatcttcagcggcatgctgctgtgccgtctgacaccacccatgtgcctcaacttcctgggtctcatccatatggacacacacattattcccaacgtgagtagtaaacatgttcgtaaacactgaattactgaaaatttataaactattcctcagcgcattatggagacggtgtacacgcagatcatgggccacatggatgttattggcatcatctcgaacggcttcaatatctacttcccaatgtgtatgctggccttctgtctggccacttggtttagcctcggcagtcgggcactgaatgctctcggcttccagcagttcctgcaaaacgaaactattgctaccgaactggtgcaggagggaaaggatcttatagcgcgggaaaagcgccgccgccagcgtgccgaggaggcgatggccagacgccgtgacttcaaccgaaccgatcaggttctgggcagcgattacttgagcaaataccggagtggtggacccggtggactaaccagtagtcgcacgcccgccgacgggctgctgcgcgatggcgacggcagctttgactatgcggcagtggcttcttcctctgcactgggcgtaccgcgatccctgtcggaggagatcaacgaccgtttcggtgtgagcactcaggtgcaggtgggattccgagaccccgactacgaggcggagacagatggtcgaattgtcggcccaccaccccgaggactcttcgacgatgtctagactttggatatggataactctttatttcaattcgttaccgagtatctcaatatttcgctcgcgcttaagtatttcccgatgccactgctgctgctgctgttcctttacacccatgtagaccattcagttgaataaaccactaaagaggattcttatccatctttcgaagggagtagcgcggttcgttgctgctctcctggctagtgtccagaccactatccgtgctggtgtcctgcgcctccacgttcatcgagatgtccgtctccgatgagtagcttgagctgattgattcttctagatcaacatttgtgctatcctggtcgtcttccgacgtcggttttccactctgcagttgcgatatgggatgcggatttatgcgctttcggccgcgcagatagccactgcgagaggtaactggagtagtcggaaaatacatcttggtgccttgacttcaatgacttgaatgacttgaatgatgacggcctgtcagaaaggaaagctgtcactttcgtaaggcaactctaaaaaatgattgccaacaaaatatagattttcgatattgagcgcttagcctcaaattcaattcaatccagaatatttatatattaatgtttaggtttatgcaatgccttttgaacggtataaaaatatgcaaaatgctgttggtaatcttgtctgcttataaatcaacatttattcgtaacccagaaatcacagcaattgcaacatgagcttaacaaaggtggacatatttcttctgtacgtgtgtgaatgataaataatcgaacagtgaagaatccatataggaaatatgtacaaccgacgggcctcgaagcacaatatgctaaggcccaaagatccaatgtgttgtgccttcctaatgggttcccctgctagcctgttttggtgttcatgtgtgatcttgagtgggaagttaatcctattattcatcgccgccaccctcttcgtcttcatcgaattcgccctcctcatcggcagt

SEQ ID NO: 17927 - DNA, 2596 bp, DROSOPHILA
gattgatttgattgaccgagaaaaaaaaacaaataaacacaacgaaggtgaactggtaccggcgtagtgaagataccaccaacgccagctcccaacacatcccggccacgccccccgaccgcccgcggagctccaaaggatgtcctcagtggaggccgaggtgctgcagaaaatcgatctgattgagcccacaaccggaaaattgtttttcgagcacaaaacggagctgcttttctgccggccacatctgatgccgctaaagacgcaggcgctggaacgcctggaggaaatgcatcgggacaccgctcgccaattgcagaagaagcgccagcagaagaagaagtccacggagcccacaggctcgctatgaaccagtccttaatcgcagaaatacatttgttataagcacatacacccacacgcacgcaccacaaatacacagaatcacagcaaagcacaagaactgagtacacccgtaccaggatcgggatcgggataagcactagtcacaatggcgtacctactaagctttggcatcgtggccgccctattcctggccagcatctcgctgtaccgttacggaaacataccacgtcagcacatcctggtcaccctgtccgtgctgaccgcctggtgtttctcctttctaattgtattcaccattccgctggacgtgacatcgacgctttaccggcagtgcgtggaggagcaccgaccgaccccagccccaaatgtgaccaacacgtcgagcgccacggtgggtccgccgcctcagtgccaggaaccgtggggcatggtgcccgcctccgtgttcccaaacctctggcgcattatttactggagctcacagttcctcacctggttgattatgccgctgatgcagtcgtaccttaaggcgggcgacttcaccgtcaagggaaaacttaaatcggcactgatagagaatgccatctactacggttcctacctgttcatctgtggcgtactactcatctatattgccgtcaaaggagagtctctggattggcaaaagctcaaggcaattgcctcgtccgcatcgaacacatggggattgtttctgctcatcctgttactgggatatgctctggtggaggtacctcgatcgttgtggaacaacgccaagccgggatttgcactgcaatatgcctacttcaaggcagccaaattgagcactgagaaggccgaggctgaggagcatgtggatgatatccttgagtcgctgcaaggccttagccgcgtcatacccaacaatcacgagttgcgcccctgcctggagaccattctgcgcaaggttcccattgagctgcaagagcgagcgagtcgaaactttgcgcgcactggaggcagcggcatgggtgccacgagttccactatcttgccttcggaaaaggcgctggttcgcattcataagcaagtaatcaaatcgctgcaaacattgcagcgcaccgaagcgctatggagcgtgcaggtgcagacagtgctgcatctggaggatgtggccaagaatatacactcttcggaccggcgcttcaaatctgagtttccgcgccagcgcacgcagctggagaggatctgctacagcgcctcgctgcagtggtactgggagtgcctgctaaaggctccgttcctcaagaccatgtgcgttctgaccgccaccatgtcggccatggtggtgtggagcgagcttaccttcttcagtcgccaccctgtgctttccatattcgccaacgttatctacgtggccaaggagagctacgacttctttactattgaagtcttctctatggttgttctatgctacttcttctactgcacttactccacgatcttgaggatacgcttccttaatctctactacctggcaccgcatcaccagaccaacgagcacagtctgatcttcagcggcatgctgctgtgccgtctgacaccacccatgtgcctcaacttcctgggtctcatccatatggacacacacattattcccaaccgcattatggagacggtgtacacgcagatcatgggccacatggatgttattggcatcatctcgaacggcttcaatatctacttcccaatgtgtatgctggccttctgtctggccacttggtttagcctcggcagtcgggcactgaatgctctcggcttccagcagttcctgcaaaacgaaactattgctaccgaactggtgcaggagggaaaggatcttatagcgcgggaaaagcgccgccgccagcgtgccgaggaggcgatggccagacgccgtgacttcaaccgaaccgatcaggttctgggcagcgattacttgagcaaataccggagtggtggacccggtggactaaccagtagtcgcacgcccgccgacgggctgctgcgcgatggcgacggcagctttgactatgcggcagtggcttcttcctctgcactgggcgtaccgcgatccctgtcggaggagatcaacgaccgtttcggtgtgagcactcaggtgcaggtgggattccgagaccccgactacgaggcggagacagatggtcgaattgtcggcccaccaccccgaggactcttcgacgatgtctag

SEQ ID NO: 17928 - protein, 694 aa, DROSOPHILA
MAYLLSFGIVAALFLASISLYRYGNIPRQHILVTLSVLTAWCFSFLIVFTIPLDVTSTLYRQCVEEHRPTPAPNVTNTSSATVGPPPQCQEPWGMVPASVFPNLWRIIYWSSQFLTWLIMPLMQSYLKAGDFTVKGKLKSALIENAIYYGSYLFICGVLLIYIAVKGESLDWQKLKAIASSASNTWGLFLLILLLGYALVEVPRSLWNNAKPGFALQYAYFKAAKLSTEKAEAEEHVDDILESLQGLSRVIPNNHELRPCLETILRKVPIELQERASRNFARTGGSGMGATSSTILPSEKALVRIHKQVIKSLQTLQRTEALWSVQVQTVLHLEDVAKNIHSSDRRFKSEFPRQRTQLERICYSASLQWYWECLLKAPFLKTMCVLTATMSAMVVWSELTFFSRHPVLSIFANVIYVAKESYDFFTIEVFSMVVLCYFFYCTYSTILRIRFLNLYYLAPHHQTNEHSLIFSGMLLCRLTPPMCLNFLGLIHMDTHIIPNRIMETVYTQIMGHMDVIGIISNGFNIYFPMCMLAFCLATWFSLGSRALNALGFQQFLQNETIATELVQEGKDLIAREKRRRQRAEEAMARRRDFNRTDQVLGSDYLSKYRSGGPGGLTSSRTPADGLLRDGDGSFDYAAVASSSALGVPRSLSEEINDRFGVSTQVQVGFRDPDYEAETDGRIVGPPPRGLFDDV

SEQ ID NO: 17929 - DNA, 6669 bp, DROSOPHILA
ccatatcctaaagaaagttacaacagaattataatctattcaataaatcatatttaatagataattaatttacctatcattgccagtacaaccgtgctgaaatagaaagctccagcgaatttccactgaggtccggccttgtggggcttattttcaatgatgacgatttccatcacacggaaatcctcgtcagtcacattgtactttctaacaaagttgttcttaacggctacaattgattaaataaattcattactaagaaattaggttaataaatcaacaagcttctcactctgtaggaattcccatcttttggcctccgttggtgactccagggaatcgaacacggcggctccaattaaaagataggtgaaagtgcataccaccagggaaagggtacggacattctgtcgcttcatcatatagtctcaaatataatcactacgatctataatcaattaatatattttgcaccacgcgcctttttcgttcagttaaagatgctgcgtctgacaaaatcgatagttgtcagcaaaacaaacacacagcatccgccaaaaatggttgatttcggttacagtggccgaataacatatgatacaatgaattttaaaaatttcatcattctttaaatatgtaataagttttcttttatctattgatttgaccgttaatctcaataaaggattgtgattttaccgttagtttatcacaacagaagcaacagaatttgatggcgttgccacttggcggtatctgttaactctgtacagctaaaaagctgtaatgtcacgataactaaggataataataatttttttaaaggatcaatatacacaaacaacataagagttttattacattttctttaattgcctttaaagtttttgtctttctaagccattttaacaatttaacattttgcagttagcagcgccgataacttgacagcctatcgattttcgggaaaagcaaacatatcgccagatctgatttgtttatgctaaaaaaaaaccacgcaagttccaaccgattggattgttgcagttggctgctgtgtctctgacgtcgacgtttccatgcttaattaaccggaaaatgttgcgaatacgtcggcggttcgctttggtaatttgctccggctgcctgctggttttcctcagcctgtacataatcctcaattttgcggcgccggcagccacccagataaaggtaaataaatgcttctaaatcaattcgaatgtataataacttctttattttagcagcccaactatgagaacattgagaacaagctgcatgagctggaaaatggtttgcaggagcacggggaggagatgcggaatctcagggcgcgtcttgccgaaacatccaatcgcgacgatccaataagacctccacttaaagtggctcgttccccgaggccagggcaatgccaagatgtggtccaagacgtgcccaatgtggatgtacagatgctggagctatacgatcgcatgtccttcaaggacatagatggaggcgtgtggaaacagggctggaacattaagtacgatccactgaagtacaacgcccatcacaaactaaaagtcttcgttgtgccgcactcgcacaacgatcctggatggattcagacgtttgaggaatactaccagcacgacaccaagcacatcctgtccaatgcactacggcatctgcacgacaatcccgagatgaagttcatctgggcggaaatctcctactttgctcggttctatcacgatttgggagagaacaaaaagctgcagatgaagtcgtaagcatgctttccctatatagtattgatacaataatgaataacggtagttaacccacaaaacaaagtgcaatgccattttgctattgcattccataaaccttacacagttgttatgtgcagcagtgaaatattttacttcgttattgcgtcaaaagcgtttagataaacaaaatgcatgatcacgctgcttgttttccgaaacagctttgtacttatctacctaatatttataacccaaagcagaaataggaattgataagctttgcagtctcaacaactacaatatttagtttttaacaaaaaataataaattatttacttatttacagcattgtaaagaatggacagttggaatttgtgactggaggatgggtaatgccggacgaggccaactcccactggcgaaacgtactgctgcagctgaccgaagggcaaacatggttgaagcaattcatgaatgtcacacccactgcttcctgggccatcgatcccttcggacacagtcccactatgccgtacattttgcagaagagtggtttcaagaatatgcttatccaaaggacgcactattcggttaagaaggaactggcccaacagcgacagcttgagttcctgtggcgccagatctgggacaacaaaggggacacagctctcttcacccacatgatgcccttctactcgtacgacattcctcacacctgtggtccagatcccaaggtttgctgtcagttcgatttcaaacgaatgggctccttcggtttgagctgtccatggaaggtgccgccgcgtacaatcagtgatcaaaatgtggcagcacgctcagatctgctggttgatcagtggaagaagaaggccgagctgtatcgcacgaacgtgctgctgattccgttgggtgacgacttccgcttcaagcagaacaccgagtgggatgtgcagcgcgtgaactacgaaaggctgttcgaacacatcaacagccaggcccacttcaatgtccaggcgcagttcggcacactgcaggaatactttgatgcagtgcaccaggcggaaagggcgggacaagccgagtttcccacgctaagcggtgactttttcacatacgccgatcgatcggataactattggagtggctactacacatcccgcccgtatcataagcgcatggaccgcgtcctgatgcactatgtacgtgcagcagaaatgctttccgcctggcactcctgggacggtatggcccgcatcgaggaacgtctggagcaggcccgcagggagctgtcattgttccagcaccacgacggtataactggcacagcaaaaacgcacgtagtcgtcgactacgagcaacgcatgcaggaagctttaaaagcctgtcaaatggtaatgcaacagtcggtctaccgattgctgacaaagccctccatctacagtccggacttcagtttctcgtactttacgctcgacgactcccgctggccaggatctggtgtggaggacagtcgaaccaccataatactgggcgaggatatactgccctccaagcatgtggtgatgcacaacaccctgccccactggcgggagcagctggtggacttttatgtatccagtccgtttgtaagcgttaccgacttggcaaacaatccggtggaggctcaggtgtccccggtgtggagctggcaccacgacacactcacaaagactatccacccacaaggctccaccaccaagtaccgcatcatcttcaaggctcgggtgccgcccatgggcttggccacctacgttttaaccatctccgattccaagccagagtgagtagccagttaaagattacccatttatcaaaggaacaagaatcctttccgtactttctgtattaattgtacattttcgtaacacgtttcgctatgccgtttccttaaaccattatagagtgcaggttttatttattgatattaatatttcattaaccagatgccgtaattgtcttctatttatactatttatttatactttttcaataagcatttcaatgttacttacaggcacacctcgtatgcatcgaatctcttgctccgtaaaaacccgacttcgttaccattgggccaatatccggaggatgtgaagtttggcgatcctcgagagatctcattgcgggttggtaacggacccaccttggccttttcggagcagggtctccttaagtccattcagcttactcaggatagcccacatgtaccggtgcacttcaagttcctcaagtatggcgttcgatcgcatggcgatagatccggtgcctatctgttcctgcccaatggaccagcttcgccagtcgagcttggccagccagtggtcctggtgactaagggcaaactggagtcgtccgtgagcgtgggacttccgagcgtggtgcaccagacgataatgcgcggtggtgcacctgagattcgcaatctggtggatataggctcactggacaacacggagatcgtgatgcgcttggagacgcatatcgacagcggcgatatcttctacacggatctcaatggattgcaatttatcaagaggcggcgtttggacaaattacctttgcaggccaactattatcccataccttctggtatgttcattgaggatgccaatacgcgactcactctcctcacgggtcaaccgctgggtggatcttctctggcctcgggcgagctagagattatgcaagatcgtcgcctggccagcgatgatgaacgcggcctgggacagggtgttttggacaacaagccggtgctgcatatttatcggctggtgctggagaaggttaacaactgtgtccgaccgtcagagcttcatcctgccggctatttgacaagtgccgctcacaaagcatcgcagtcactgctggatccactggacaagtttatattcgctgaaaatgagtggatcggggcacaggggcaatttggtggcgatcatccttcggctcgtgaggatctcgatgtgtcggtgatgagacgcttaaccaagagctcggccaaaacccagcgagtaggctacgttctgcaccgcaccaatctgatgcaatgcggcactccagaggagcatacacagaaggtgagcttagaagtttattatattaatatcaaagaaagtggaaatggtatttatttataattaacaatattgtttgactaattgttcgttcgtcagctggatgtgtgccacctactgccgaatgtggcgagatgcgagcgcacgacgctgactttcctgcagaatttggagcacttggatggcatggtggcgccggaagtgtgccccatggaaaccgccgcttatgtgagcagtcactcaagctgatcgcaacgtgttatggcaaaggataaagcagaaactgaagccaagcgaccatctcacaacctatgaatctcggacgctaatccactgcaatacaggcaatcttcgtttaatgttcgacttaagcactgactgcaccgaaagacgtaatgcgtaatccatactacgtatcatttatttattcaagcttccacacgagggtttggaaattcaatcctatgacgcagcggtgtatttttcgcacccccgtgtaactacacgttttactctgtttcccctagttttttacgtttttttgtgatatccatccagtcccacagcaagcaatacatgtctgtactcgatatccccaatggggttattgcctataacaatgaatcgtaactataactaacgtttaactgtaaagtaggcttagtgataatgacgcaactgcaatgatattaatctcgacgtttgttttttacaaattgaataaaattgagtctcatttagaatcgacttttacgtgctattctaaactaaaaacataacgactgtttttattcgaaaaaggaaaggatttgtattactattcaaaatcgtcatttaggctttagttagaatcgtgttgttggtaagttatgaatgcactttctatgaatatttaatttttctcagtaaactaaaataaatacattttaatttaatttttaacattacatttaattttttttttaatattgtaagtaatgaatgttagtaaacagttgatctttgcattattaagttttgaatttatgtggattatgaaacgagcttttgagacgactaattaaagccataatcatgagttatagttttagtggatgaaaaacagaatgcaatcttatcagctccagtgcggggtactattattgccagaatgacctacagagatagagatactaagagcgcggaattggaaaatgcacaatggaaatggaaatccggattgagtgtaaagtggttgttttggatagagagcgaatcgctgcgcagttcgctctcttcaaaatccgaaacgagcaacgaaagcaaaaccgaatccgaatcggaatccgaattcgtatttgtatctgtaagatacgctctcgcgctctcttcaacgacgaccatcggaatttttctatacagaaacaaaaatctcagtcagctcgctgttttcaagtttggaatccgcatttcagttcagttggattcagtcacagagtcagagcgtcagattcagatcatcgtggtcgccagtgagtttgtttatatgtttgtggctgcctgtgtgtttgcttgtcaagttctgcaacaaaaacaaggcatctaaacaaaagtggttcaaaacaattacgaggaataaaatccaactaaaacgaataataaaacacacagtgtcgcttaaatcgcagagtatctgcagctctagttcttgttgttgttgttttttgaggcggactggaatttaatttaattaaatcaagtacgaatgtgtgcgtgagtgtgtgtgtgtgtgtgtc

SEQ ID NO: 17930 - DNA, 3951 bp, DROSOPHILA
atgctaaaaaaaaaccacgcaagttccaaccgattggattgttgcagttggctgctgtgtctctgacgtcgacgtttccatgcttaattaaccggaaaatgttgcgaatacgtcggcggttcgctttggtaatttgctccggctgcctgctggttttcctcagcctgtacataatcctcaattttgcggcgccggcagccacccagataaagcccaactatgagaacattgagaacaagctgcatgagctggaaaatggtttgcaggagcacggggaggagatgcggaatctcagggcgcgtcttgccgaaacatccaatcgcgacgatccaataagacctccacttaaagtggctcgttccccgaggccagggcaatgccaagatgtggtccaagacgtgcccaatgtggatgtacagatgctggagctatacgatcgcatgtccttcaaggacatagatggaggcgtgtggaaacagggctggaacattaagtacgatccactgaagtacaacgcccatcacaaactaaaagtcttcgttgtgccgcactcgcacaacgatcctggatggattcagacgtttgaggaatactaccagcacgacaccaagcacatcctgtccaatgcactacggcatctgcacgacaatcccgagatgaagttcatctgggcggaaatctcctactttgctcggttctatcacgatttgggagagaacaaaaagctgcagatgaagtccattgtaaagaatggacagttggaatttgtgactggaggatgggtaatgccggacgaggccaactcccactggcgaaacgtactgctgcagctgaccgaagggcaaacatggttgaagcaattcatgaatgtcacacccactgcttcctgggccatcgatcccttcggacacagtcccactatgccgtacattttgcagaagagtggtttcaagaatatgcttatccaaaggacgcactattcggttaagaaggaactggcccaacagcgacagcttgagttcctgtggcgccagatctgggacaacaaaggggacacagctctcttcacccacatgatgcccttctactcgtacgacattcctcacacctgtggtccagatcccaaggtttgctgtcagttcgatttcaaacgaatgggctccttcggtttgagctgtccatggaaggtgccgccgcgtacaatcagtgatcaaaatgtggcagcacgctcagatctgctggttgatcagtggaagaagaaggccgagctgtatcgcacgaacgtgctgctgattccgttgggtgacgacttccgcttcaagcagaacaccgagtgggatgtgcagcgcgtgaactacgaaaggctgttcgaacacatcaacagccaggcccacttcaatgtccaggcgcagttcggcacactgcaggaatactttgatgcagtgcaccaggcggaaagggcgggacaagccgagtttcccacgctaagcggtgactttttcacatacgccgatcgatcggataactattggagtggctactacacatcccgcccgtatcataagcgcatggaccgcgtcctgatgcactatgtacgtgcagcagaaatgctttccgcctggcactcctgggacggtatggcccgcatcgaggaacgtctggagcaggcccgcagggagctgtcattgttccagcaccacgacggtataactggcacagcaaaaacgcacgtagtcgtcgactacgagcaacgcatgcaggaagctttaaaagcctgtcaaatggtaatgcaacagtcggtctaccgattgctgacaaagccctccatctacagtccggacttcagtttctcgtactttacgctcgacgactcccgctggccaggatctggtgtggaggacagtcgaaccaccataatactgggcgaggatatactgccctccaagcatgtggtgatgcacaacaccctgccccactggcgggagcagctggtggacttttatgtatccagtccgtttgtaagcgttaccgacttggcaaacaatccggtggaggctcaggtgtccccggtgtggagctggcaccacgacacactcacaaagactatccacccacaaggctccaccaccaagtaccgcatcatcttcaaggctcgggtgccgcccatgggcttggccacctacgttttaaccatctccgattccaagccagagcacacctcgtatgcatcgaatctcttgctccgtaaaaacccgacttcgttaccattgggccaatatccggaggatgtgaagtttggcgatcctcgagagatctcattgcgggttggtaacggacccaccttggccttttcggagcagggtctccttaagtccattcagcttactcaggatagcccacatgtaccggtgcacttcaagttcctcaagtatggcgttcgatcgcatggcgatagatccggtgcctatctgttcctgcccaatggaccagcttcgccagtcgagcttggccagccagtggtcctggtgactaagggcaaactggagtcgtccgtgagcgtgggacttccgagcgtggtgcaccagacgataatgcgcggtggtgcacctgagattcgcaatctggtggatataggctcactggacaacacggagatcgtgatgcgcttggagacgcatatcgacagcggcgatatcttctacacggatctcaatggattgcaatttatcaagaggcggcgtttggacaaattacctttgcaggccaactattatcccataccttctggtatgttcattgaggatgccaatacgcgactcactctcctcacgggtcaaccgctgggtggatcttctctggcctcgggcgagctagagattatgcaagatcgtcgcctggccagcgatgatgaacgcggcctgggacagggtgttttggacaacaagccggtgctgcatatttatcggctggtgctggagaaggttaacaactgtgtccgaccgtcagagcttcatcctgccggctatttgacaagtgccgctcacaaagcatcgcagtcactgctggatccactggacaagtttatattcgctgaaaatgagtggatcggggcacaggggcaatttggtggcgatcatccttcggctcgtgaggatctcgatgtgtcggtgatgagacgcttaaccaagagctcggccaaaacccagcgagtaggctacgttctgcaccgcaccaatctgatgcaatgcggcactccagaggagcatacacagaagctggatgtgtgccacctactgccgaatgtggcgagatgcgagcgcacgacgctgactttcctgcagaatttggagcacttggatggcatggtggcgccggaagtgtgccccatggaaaccgccgcttatgtgagcagtcactcaagctgatcgcaacgtgttatggcaaaggataaagcagaaactgaagccaagcgaccatctcacaacctatgaatctcggacgctaatccactgcaatacaggcaatcttcgtttaatgttcgacttaagcactgactgcaccgaaagacgtaatgcgtaatccatactacgtatcatttatttattcaagcttccacacgagggtttggaaattcaatcctatgacgcagcggtgtatttttcgcacccccgtgtaactacacgttttactctgtttcccctagttttttacgtttttttgtgatatccatccagtcccacagcaagcaatacatgtctgtactcgatatccccaatggggttattgcctataacaatgaatcgtaactataactaacgtttaactgtaaagtaggcttagtgataatgacgcaactgcaatgatattaatctcgacgtttgttttttacaaattgaataaaattgagtctcatttagaatcgacttttacgtgctattctaaactaaaaac

SEQ ID NO: 17931 - protein, 1108 aa, DROSOPHILA
MLRIRRRFALVICSGCLLVFLSLYIILNFAAPAATQIKPNYENIENKLHELENGLQEHGEEMRNLRARLAETSNRDDPIRPPLKVARSPRPGQCQDVVQDVPNVDVQMLELYDRMSFKDIDGGVWKQGWNIKYDPLKYNAHHKLKVFVVPHSHNDPGWIQTFEEYYQHDTKHILSNALRHLHDNPEMKFIWAEISYFARFYHDLGENKKLQMKSIVKNGQLEFVTGGWVMPDEANSHWRNVLLQLTEGQTWLKQFMNVTPTASWAIDPFGHSPTMPYILQKSGFKNMLIQRTHYSVKKELAQQRQLEFLWRQIWDNKGDTALFTHMMPFYSYDIPHTCGPDPKVCCQFDFKRMGSFGLSCPWKVPPRTISDQNVAARSDLLVDQWKKKAELYRTNVLLIPLGDDFRFKQNTEWDVQRVNYERLFEHINSQAHFNVQAQFGTLQEYFDAVHQAERAGQAEFPTLSGDFFTYADRSDNYWSGYYTSRPYHKRMDRVLMHYVRAAEMLSAWHSWDGMARIEERLEQARRELSLFQHHDGITGTAKTHVVVDYEQRMQEALKACQMVMQQSVYRLLTKPSIYSPDFSFSYFTLDDSRWPGSGVEDSRTTIILGEDILPSKHVVMHNTLPHWREQLVDFYVSSPFVSVTDLANNPVEAQVSPVWSWHHDTLTKTIHPQGSTTKYRIIFKARVPPMGLATYVLTISDSKPEHTSYASNLLLRKNPTSLPLGQYPEDVKFGDPREISLRVGNGPTLAFSEQGLLKSIQLTQDSPHVPVHFKFLKYGVRSHGDRSGAYLFLPNGPASPVELGQPVVLVTKGKLESSVSVGLPSVVHQTIMRGGAPEIRNLVDIGSLDNTEIVMRLETHIDSGDIFYTDLNGLQFIKRRRLDKLPLQANYYPIPSGMFIEDANTRLTLLTGQPLGGSSLASGELEIMQDRRLASDDERGLGQGVLDNKPVLHIYRLVLEKVNNCVRPSELHPAGYLTSAAHKASQSLLDPLDKFIFAENEWIGAQGQFGGDHPSAREDLDVSVMRRLTKSSAKTQRVGYVLHRTNLMQCGTPEEHTQKLDVCHLLPNVARCERTTLTFLQNLEHLDGMVAPEVCPMETAAYVSSHSS

SEQ ID NO: 17932 - DNA, 3451 bp, DROSOPHILA
agccaaacctggcattgcgctacaagccctcccatgagtcgcttaaaaacaagcggatcaaggacctggctcctgaacgatgcccgagcacgtcccggggatcaacgtcctgcaaactggtatcggacctcaagatggagacgttcagcctgccgccgcagcagacgtgtgtggtgcgcgaggtggagcctcggtttggccagcgccgacgcatgttgttggccaacgacacggattcgtgctactccggcgagctggaggtccccaaaaacagtcccgtccaggagccaggaccctatccgcgcagcgaactgatcagtgtccatgtctcggcgcccaccagctcctcttttacgggagcaacacggcggagtctgtctccaactaggcagcgcactgcgacgagcaaggtggccgccgggacgaagggcggaccatcaccagcagttgggggcaacaagtgctcgagcgtcagcagcgggagtgcaggtaccagccagctgcctaatttccgccagcggcagcaagagctccatcgctatcgcgttatgatcgagcaacggcgcctcgatctactcgagctcaagatagcccgcgaacgcgaggaggcgctgcacagcgaggttctgtttcacaaggaactgcagatcaaggagaacatgatcaaggtgtacgaggacaacgactgctccaacgcctaggacttcctttattcctaactctttcgaccccaaattcagaaaggtattttacacttggcaatggccctggcctcagtagttcaaaacactcagtcaaataaaaccgaaattcatttagacatcccaatctaggttttttattaactacctgagaaataagtatcaaaactgcaatatatgaaattcaacttagcgggtaatttcaaatctaatgtgcccgttcgtttacagcactggcagtgtgtgcgcatcgctgtgaatggacattagccccaaacaactttttatttcatttgtttaaaccgaaaacgtgaaatgttaataaatgtgtgccgagtttgcggcaggagcaggctgtgccccaaagccgtggagctcttcaaacctggcagacaggatattcttcgccgcatccaactaataaccggaattctcgtgagttaaggaatcaaaatggatcgcgcaatttacatatgtgcgagcgcttccttttttgtattctgcagcttcagcagattcccaatgctccggatatggtgtgcttttgctgccagacagatctgcaatcggccatgattttccggaggcagtgcatcctgcagcagaagaaatgggtgccattgctacaaagtgataaagtgggagccagcgaggaaaagaaggtggaacccaatgatccctcaaccaagaagaaaacgaccaagcggcgaagggggcgacccaggatgccactggaaattgtagatatagtcgtaacgaacgagagtaaggcttcagcaggtgaatcagttggtggtgatgaatttgatcagccggtggagatctccaatgaaccggatgccaccgatagcgatgttaatctggaggaaatagatcttccggatgaggatggcttggagtcggatcacgatttacccaatgttcaaatccacaagtgcgatacttgtggaattatcaaaaataataaatcatctctggtcaggcatcagtttgaacataatggaataagaccatatccctgcaagtaagtaagaatcgcgacgaaaatatacatttactgatacttaaataggtccgtcgtctttatctttatctcttcgtatctggtccattatcacgatttgattagcatacattgtgcctacatacatacatatgtatgtaaattctttttctttgtacagtatctgcaatatgtatttttcagggagtgcccaaagacctttctggtagcgagtgagctgaaggcacacaatctcacccatcacaccttggagcccccgttcgcctgtcgctactgcgatcgtcgctacttctccgtggtgggcaggaagaagcacgagcgggtccacaccaacgagcgaccatttgtgtgcgatcagtgcggcaaggccttcaccaggacctgcattctgaaggcccacatggcggtccaccaagttgtaaggaagtataggtacttgatgaaattaaaaaaaaacatgtcgagatacattctgttataatctttcattcccgttttagttgcgatgtctgcgatcgttcgttcagcctgaagaaacatctcgctacgcacttcatctccaatacccacaagcggaatgctgaagccgtcacctcgtcgtcggagtacatgtccatgctcagttttgaatcggatgaaacctggtcccaaggcactccactgaccacttccattgacgaggatctggtgcagtcgcaattcgaccttttgtgtcaggaagtttaatacatctcaagatgccatatgttttatcaatataccaaaaaaaaaaaaaaaatttaggtaagagctaacccacaaagacttaataacagctgaaaccacaaaagacaatatcaaatatgggtctaaaaatattggtgacatttttgtaattccttaaaactcagcaacaaagagacaacttgggaacaaatttagctttttttagcacgtagtttttaaaaaacactttacagtggccatgttattgcaaattttagtttttgctatttttttttgcgtaatttacatctgcattgcaattgcttccttgaatataacaaaagtgcctatatagtcttatcttatacatacatactttattgggctagttttaaaataaaatatattcagacatgaggtacaaaaatgaacattgaatttagaatcaaatctttttcgaaatacattttacgaaacattttacgtggattatttcgatttaccgaaacagaaatatgaagctatatgttttgttttcaaaaattgatcctgcgcattattagcatgcaggtcgtacttatttcaagcacccatgaaatggttcagcttaacgatttgaccaatattatttacacctattattaagttttaatattataagcagtatctgttttatcagactgctccagttgttaacagatcaatagctatttaaataaagattttgactttcaaaaatccccgccttgaatgaataatttatctggtttgcctcaaaatgtaatcaccatacaattgcctttccatcagtcgagtttagtgatcgagatgctgaacatcgtgtgtagagtctgcggaaggcagaaaatctgtgagaagagcctgaatctcttcgatttggtcaaccgaaaatatctaaagcacttgcacatgataagcggactaagagtgagttaaaagacgttttaaaattgagataaataatatcagcaccagttggtggatttggacgatgttcctg

SEQ ID NO: 17933 - DNA, 1129 bp, DROSOPHILA
aaaccgaaaacgtgaaatgttaataaatgtgtgccgagtttgcggcaggagcaggctgtgccccaaagccgtggagctcttcaaacctggcagacaggatattcttcgccgcatccaactaataaccggaattctccttcagcagattcccaatgctccggatatggtgtgcttttgctgccagacagatctgcaatcggccatgattttccggaggcagtgcatcctgcagcagaagaaatgggtgccattgctacaaagtgataaagtgggagccagcgaggaaaagaaggtggaacccaatgatccctcaaccaagaagaaaacgaccaagcggcgaagggggcgacccaggatgccactggaaattgtagatatagtcgtaacgaacgagagtaaggcttcagcaggtgaatcagttggtggtgatgaatttgatcagccggtggagatctccaatgaaccggatgccaccgatagcgatgttaatctggaggaaatagatcttccggatgaggatggcttggagtcggatcacgatttacccaatgttcaaatccacaagtgcgatacttgtggaattatcaaaaataataaatcatctctggtcaggcatcagtttgaacataatggaataagaccatatccctgcaaggagtgcccaaagacctttctggtagcgagtgagctgaaggcacacaatctcacccatcacaccttggagcccccgttcgcctgtcgctactgcgatcgtcgctacttctccgtggtgggcaggaagaagcacgagcgggtccacaccaacgagcgaccatttgtgtgcgatcagtgcggcaaggccttcaccaggacctgcattctgaaggcccacatggcggtccaccaagttgtaaggaagtatagttgcgatgtctgcgatcgttcgttcagcctgaagaaacatctcgctacgcacttcatctccaatacccacaagcggaatgctgaagccgtcacctcgtcgtcggagtacatgtccatgctcagttttgaatcggatgaaacctggtcccaaggcactccactgaccacttccattgacgaggatctggtgcagtcgcaattcgaccttttgtgtcaggaagtttaa

SEQ ID NO: 17934 - protein, 321 aa, DROSOPHILA
MVCFCCQTDLQSAMIFRRQCILQQKKWVPLLQSDKVGASEEKKVEPNDPSTKKKTTKRRRGRPRMPLEIVDIVVTNESKASAGESVGGDEFDQPVEISNEPDATDSDVNLEEIDLPDEDGLESDHDLPNVQIHKCDTCGIIKNNKSSLVRHQFEHNGIRPYPCKECPKTFLVASELKAHNLTHHTLEPPFACRYCDRRYFSVVGRKKHERVHTNERPFVCDQCGKAFTRTCILKAHMAVHQVVRKYSCDVCDRSFSLKKHLATHFISNTHKRNAEAVTSSSEYMSMLSFESDETWSQGTPLTTSIDEDLVQSQFDLLCQEV

SEQ ID NO: 17935 - DNA, 20311 bp, DROSOPHILA
gtactacttagtactttaatttttccaataattccaatataaaacgttttatttgtcttttcgtttctacttaccatcatcttgcggccaagtaaataacaaatgatttggctaaaaacaagtttttattacaaattacagagagcgaatttcaactagaggtggcatcaggcggactagcgaataatcgataacacgcagctctaacatcgatatcgaaaaagcttgcgatcgaatttgaattgcgaaaatgaatataatggttcactcctacggaattaaatctttttatttctaccagcaaaatatcattaatattcgattaatatcataatttattgccacgagaatttatattagatttttggttgttttagctgtgacagtcatctttaaaacaaatttttataatacatttttcaaaaatttttcccatttttcactcaaagataaaatttatttagcgtgtatttaaccacacaagacgcgacataatgcttaattttgattagatgaaaagagccttggtagttagttatgatagaatcaagggagttgaataaaagccaattgatattgttatcatacccattgtatttgagtagtcgtaggtacatgcatacacaattcaagacaatcatttacatagataagtttaatcgacttagactacactaaatgtaaaacatgaaatggcattaatagtatataacatggagtgagtgtgtggtcctaaagctatatcagaatcttaacaatgccactaagtagtattgtttcttaaaggcccctaaacaattaagttgaaattttaacttttttttaaaaggttatatcgcgtacgattactttctgttaacaatttgttttcctaagatcaacaatagtcattacataagttgattatacaatatttaaaattttctatttaagatttcacttaaaactccaactgagctgcaaagaggtcctaaacttaatctaatggctccgggacgtcctaataccttcgttgctccttctcgttgacggtggacagtggctggtagctgggattcgagaaggcctccgtggaggctccagcagcagcacccccgccacctgttgtggttttgccgggtatattcttcctgggtggcttcatattcacatagttttcggatggctccccattgagtttggtctccacatgatggcgaggggacggtgtgggcgtgacatactgctgcttaagggcctgattgaagcgccttccctgttccggacttccatccgatccagtggagctgcgatgcagcataggtatctcctccggcgcctgatctgccacatccacagttggcatgccgttcttcttgcggagcggcttactcgatccgctgttgagattgttactcagcgtaggcgactgtcgcgcccctgggaaattgaaagtggtttcgctagagaaatccggaaagtctgaggactcgccctcgaggcgtgtgggtgagaatatggcggtgcaggcatcgggatcagaatcccggctcatctccatgtagtcatccggcagctcttcgatgcctgagttagtgtgccagcgagagtgtgtgcattaggatggccagatgggtgtgtaggtgattgtgcgcagttagtaacctgatacatggccatggctgaagtaatactcacgtatatcgggcactatgtgcccgttcacgtagcgcggagctgcaggcgccagctcgtcgggtgatcccatcagtgccaggtaatccgtagactgcttcttcatgtactcaatgttgctctgcatgtacggattgtttaggtccaggtagtgctgtaattgttcggcaatcgttccttatttattattctgtttaatattcaaaaatgtttatccacttacgctggctacatcctcgcccagcatgtttgcaaatcgcttctccagctcagcaaacaaaggtctgctctcgggactgaaagaataaagattaatatgacgatggattcggctgaaatgttgagtctagatacttacttctttcgccagcactctagcataatctcgtagagctcctggttggcaaatttcggcttctccatgcggtagccatcgttcagtttgttaaatagctcttggttgggatcgatgcccggatacggcaccttggccagcgagaacatctcccatagaacaattccgtaggaccaaacatcgctgtatgtgctgaacacatgatcgctcagcgattccagcgccagccacttgatgggcaatttgccattctctaattaatttgttttagtaatatttataaatagtcaagtaacaaatagattcacaattacctgacttcttgtagttatcacctcgatacatggatcgagccagaccaaagtcacaaatctttaccacattgtcctcgcagaggagaatatttctagcggccagatcgccgtgcaacaccttcttggaggacaagtaatccatgccccttgccacttggaatgcccaactgatcaaatccacagtggtcactgtcatcgcctccgtggagtcggttttgtaattggaacgccaggcgggttgtacggagttattggacattatttgatcgtctgttgattacgatataataagcacaaacatattgtaagaatcttctaggggtgaagctaccttctgggacggtggtcattacggtggcacaggtatccatctgacggtcgtagctgtaggtggctgttccggatccggttcgtccggctcgggtgcccgatcggggatcattgtccgaatttctgcgatgagttggcggttgcgtgttattgttgtgcggctcattaatgtaagagtggatcgggaaaccgacattggcgtacttcaagccaccaccattcgtatcgctgttagttggagttaggtcgccaccacaaggacacagtatagacacacagagcggggagcacagaggacgagagaccacaaccaggagcaggatcacaagcaccagtgcaagaacattcagggttttttgtttagagtgcgtgtattgtagtttagttaattgtatcgtgtttggttgttaggtacgagtagttggtggataaataatagtggtagtaccaaaaccatgaaacaaaacgttagaagagttagtcaacacaaaggttatcttagttaaagtcagttagcagctttgaggtttttagttacgtatatatatgtatcataatatcataataatttgttagacagttgaatagaccacaattacttaccggtgcagttcgtagttgtcggacatgcgctgggtcatgatgctggggtcaatgtgatcggtgtctggattgatttgattgataaagcactttctgttcctcagaaggaagttctgtatgttgccaaagcgacagtattccacaatgaccattagttcgcctaattcaatatgttaaatcattattaaaactaatgttcccaatgtggaaactttcttgaaacttacgcttcgcaatatttttggtaactgcacccaggagattgaccacattcaagtgctgtcccagatgtaccatgatcttgagctcggagaccagtgcccgcaccacctcgttgtcagccgtcgccttgaccattttgacggccaccgtggtggtgggctcctctcgccggatgcccttggcctcgcccttgagcacaacgccaaatgctccggctccgagttgcttgcccagtttcaggttttcccgtgggaactcgaattcccgattgtagggcagcagttccgcctgctcgtccagggtcagatcgggattgatgtgtcccacggcgccctcctcgaagttggccaatccggctgccttaagggccagatgccgcttgtgctccttctggtagcgcacggcgaggaagacgcacagaccgatcaggatgaggaatagtatcacaccgaaccacacccaggccatgctaatgccgggcagatctaagatgtatatccaatgtgaaaccataattttaactagcaattacaattgtaaactcacctgatatcactaccgtgaaggagcgttcgattctgtccaatcggttctccaccacacacttgtagacgccttcatctccgggatacaggtgagtgatcagcagcttggattccttttcaatgatgtgcctgagctttgattcggtcacttccttgtcgtccttaaaccaacgcacaattgccacgggaaccgctgtggaggcacactccagctccagcgtttggcttagtttgcgctttattttcgagtgaccctcctgtccgccgtttgtccactgaggagcagagggatcgtggacgtacaagtctatctcccggctgctgtaaacggcatccttgtcgttgtggtaggcccggcactcataggttccacgatccctgtcggatatcgttgtgatgtgtacagtgctcttgtaggagtacttggtatggctggtctcaatgtgaaccgctgtgtgggaaattgcataaaattatagaacagtatgtacagaaagcacttagagactcttacaatccgactccttcaaatcctctccattgatgaaccatttaagatttccatcgaagtgataggccagcgcctcgcaggtgaagttcacattgtcctccttggcgattttgtgatccttatcgaagccatatatggtcatgttctcggaaatgttgcccagcagaacgtgcgccttcgtcagggttcttcgttcctttccatcaatgatattttgggcaatgcatgtgaggattcccggctccgtgggcaggaaggatacctcgtatatgcgttccacactcagctttccgggtctgggccgggtctggaactggagatggtatacaaagagttggtaattgtgcgcaaaaagtttggggaagatgattttaaacaaatacctgatatttctcctgttcactcggcaactgcagaacgacaacaccaaagcatgggacgacacaagaaagcaatacaaatataattataaggacaagacattaacttaagaacccatcatatagaatccattacatacaaatataattatagttggatatatattccagttcgatcgtattacttacgctaaagttctgattgagcacagagcaagtgggccactgtggttccaggctgcaggggcggaagaagaaggtcacgatagccggcggataggagcgtactgtgcactccagtcgcgccacggatcccacctggacataggcgtccgacatcttcagcgccggtgcgtccatcacactgacgttgtactcccgctgaacgacgccgaaggaattggatccacggaggacatacgtgccgctgtcctgcaattgggcgttcagcacctggagcattgtgctcaattccgtggagagaatcttgaagttattctccgattgtcgcacctcggtgccatcgggtttgaaccaactgaaggagggcgtcggaaatccctcaaagttcgcggtcatttggatcgtgcgattggcatattcctgaacgttgtaatgacccgatggttcgcccacgttcaggtaactttcgttttgctctgtggattttggaatgcaaataagtagatatcttcataataaaattcatcatatatttaatactcacttagcaccttaatcctgtaggtggcacgttgtacgttctggttagaattatctgttgtcacacacttgtatagaccagtgtccgagggttgtgcatttagcactgtcaaggtgctcctgcccgtctgatgggtgctgttcctggtcttgggatcggttcttgattgggaggcaaatatgcgattctgcggtaaatcattatcttagtactgctctcttaaaaatgcatgtagactgaggtttactgacctcatcccgggacggagtgaaccattccattccgtatactgattcaacgtaggcggactgctcgcaatccagggtgaagttggtgtccgtgaagacgtgatgctccacggaggacctgatcacgggctttggcagcggtttgccgtcttctgtggcgttggtagaaagtttagctttattagatacccttcgcaatggactggaactggccagcaatgctacagcttcatgcagatggttgggttagacatagacgtggacacagatgggttaacgtttctacagtacttaggcggtaggtgttagcattgattagtaacgaataagtttgctaaagcagttaaatcagtccataaccaacataaatcgaacacaaaaggatgcaagaaattaaaacgcacaaccaggacaaaacaacatgaacagaatgaacacaggaacagatcacaaaacagccaggacaacacttacgccctggtctgggtgagggcgacgcattcatcggagccaggcgggctggacttcgccgtgcccgctccctggataaagttccatcaccaccacggattagtgccaaattacccgtcgattggttagtaacagtgaggacctcgtcatcgccatcggtgacacctggtgcatatgtgtacaccatgttagtcgtttgggtacgagggatatccaatccggttgctggaggagttagcagattaacatgacattgggtacggcaggtcagtcaattgtttttgagggcgggaagacaaaggaggcaaaaataccattggttagcacacttacatatgttacttgcaagccgtgattttcagtagtgtgacacttttaaagttcattttttaagcataattttaagaaattaagggaagtttaaaccgaaaactttttttttaactttgtgcgaaagtctacaactaaatgcgtgcagtgtagtttcgtctattggctgtagactgtgattaaaaccaaagaatttggaagagaaagtattgtagtttgcatagattaaatccttggaatcaggaccaaaaccaaaaccataaccgatcccgaaaccgtaaccgcttccgatgatcgattccaaatataattgaatagttgaatagtggaaagcaatatttacgacatgtatagacggaaatcacaaatcacaaactttggggtgcaaaaactcactatcaatgtgaccgttaccaataaagcgcacttctatgctggtcatctcctcttcgttatgcgggaatggcggattgggtcggcagtagtagtctccgccatccacgatgcttcggatttcgatggtgaatccccgttgcggatcgtatcgaccgacagatttgctggaatgcatctgcacagaggcatattggtcagatatcaatcaaatgggtattgaatgcaaatgatggcctacatatggactggctatctgctgcctatcaagactatagcgaatttggagctgattggttaatactacgctacaataatatattattatgtagacttatatagattgtctgtacagtagagttcgagtatatatacatatatggatcataggggtttaactacgatcaatcaataaaagacagactgtgacatactttctggataggtaacgtcaatgatcaattcatagtccaacgttttgcaatacaagtaaccggatacacagtcaatgactcgaaaggtaaagccccatctggggtggtacctcacactatcgaagaacttggggttaccctgaatctgacctttcgagctgattttccacgtgctctgcgcgccgagaaaagaagatcatgagtaataccagatatatgtacacaagacctgcatgaatctcatactggtcttatttttttttaaatagttttgtaattttaaaagtaacccactataatcttatatccccatctctcatttcctgtcttggattcatgcaggcccttttttggcccattagactagatgttttcgaaagtgttttcaagctgtagatcctgcccacttacttctccattactggtctctagcagcacctctgtgtccggcatggctggtttacagggtatgactacgtcggtatactggcgtgccgtcaccacgttatgactatcgaccagcttagtgtccggatcattcacgtacacgtagatggagctggcgtatccttgattaaccaattcgatcatcgcctcgtccgactgctcctccttggcgatctgactgaatttcgaagtcttcacgcaatagtaggctgccacatagtcagccgtcacttcgatgagatgcaggctagttccgaatggtcgagccggatcctccgtattatcgaaggacttcacatgcacatattgcgattgactggtccaccagctcatcggctcgtcgtcctcgcacttaagcgtggtgctcgtctgggcatccaggataatggcgctcttgcagggcgtcatcaggggagctccattctcgccgccgcagttctcgatgctgtcatcgggatccggtgagaactgctgcaaaggcactgagatcgtagaagagaacatgcatattaatattataataaaccataaaaatgtatatatattagtacatctgtccatttgtccgtatttctgtctggtaaatagaaggtcagctgcactcgtatattgttgttcattgatcgctcgtatgccctacaacggagcactccacatgccgctttatctattgccttaggcctccacctcctgcggtcaacaatatccccatccactgggtggcgctacaataataatgacttccagtgatttgcggtcgagcgagcgcctctcggtggaggcgtcatgggcgcagatgcacaatcctttagccaatcccatgtttcatatttaattgatcgtggtatcccagaagggtgcgcgtagctacgcctctgcgatggccgctcaactagtttgttttgccttctaggctcgggaatcaattgtttgtgtttactgcgataacaatagagttgatagccattataatatgctctccgctcagcctcgtactctaacgaaagtctttatggatgcacaacaatatcaaactcgtaactaatgcaaacgacacttcttgaatcgacattagtccaaaattcgggcatacatatatcaaccagagttcaaagttcagagcggtgtctataaactgtggctgtcggatctgtctggagtggctgaagcgtagagatagatagattatggcatcacaccgagaaaaatttaatgcaagtcaacaaaaacttgtacttgaattaaatctcatctattcttcaaatagttcttctattttgagaaatggaattgttattgtacaaaataaaaaaccaccttgattcagcatttagaatcggattactccgttttttgtctccgtgcactgaataaagaatgtgcgattgttgacaggaagcaagccatacataaatatcaatgcatattcgcagatatgtattgttttttttaattgtgcaaattgaaagccttagccgtcgtgtattttcagagcttatcagttccgtaaaattcttcggaattaagtaaatggtaggaaaatatgttcttttttgtgttttttttttaatgagatttgtgcagggccaacttaccagcatcgctccacgagatccgcaaaatcaggagcagtggcagcagaatcaaccgcggaagcatcgccatctggcttggttagttttgtttcctctccgattatatattgtgctaattttacactcttaaatattcacaattttaacacatttggccctttaatgccatggtcacgctgaaagacactttgctcacttagcgttgcactgaaaaaaaaaaacgaagatgtttttgttgattagagttgaagttgtgaattaaaccgattatagatattgtttgtttgctttatgttatattaagataattattttttaagtcgcatttgctactttttatttgcctctttttatatgcagtacatttggctaatcagtaaatatatacatatatatttgtattatgcactttgtgttccattcttcgtttttttttggtccacactttactttagttacacacacatttcttttataaaatattcgtatatacttgattatactccgcttttcgagcagaagtgaacagcatagccatccgaggaagaataaagcttttgctggatgttcggaggaacgatgcgataagcgaattgtgtatattttttccacacttcattcaagaccaataaattcgataaggcggaaataaaagaaaatgaatcttgtaagtctttgctcacacattgtgcttgcgcataaataacaagaacaacacaatgggctacacagtttttcccattttttttttggtgtcatatccgcattttgaaatgcaagtttccgggagataaacatatctttttttttgggtgcaacggagggcggtgggccacacccaccgacggatgaggcaacaggtcatccacgtggccataactcactgtcacacaagctgagctagtctaagtctctaaatgacaacgggacatgcacaattaaacaagctgactaactattgcctacatggccacaaaaaaatacatataatacatatatgaaattaaatgaagcagcatttttatgtccacatggcatacttttgtataggctattatagcttcaaatgttttgcaaaacagaaataagataacgatgtttctatataccatattgtatatattatcagattcaagcaacagtacgttaaatttgaagcttatgctttcactggcgagctttttatgttttttgtgctcactatcaacagtttcttatcatgtcagcttaataaaaaaaaaaaaacaaacagcaagtgtggatgaaaaataagccgttgcttttaatttcagtatgatatattttgttaaatgcgattttcaattgaattgcctttttttcagtgtgtgcaagcggcgcctccgtttgccgacaattagagcaaacgagctggctgcaatgtcgtataaatgtaatccctccgagccacagacaacaagtgtcccggctgctcgcctgacacaccaataaactggcatttaatttgctggccaactttgagggcactcctccagcgccttcgtgatgacattttggcctatgccaaaactcccactactggctaattgccaggtggtcagccaacacagagccattcatctttgtcactcccaggactcggggtcagtgctcagtccgcgtttgcagcgtttgtgttggccaattgaatttgctctggtttctcctgccccacttattcgcaacggtagcattgcggattaaacgcaatcagccggcaaatattgacttggtcgctaatcacctgagaggtggagcagctaatggaatgattaaaaggcgaaaaactaaggggcatgaagtttaacctctactgaatacactttctttttagagctaaactagagttaacttaaactttgtacatatttcaaaactctgaatatttcatttgaatatttaactgtccgtttggcataagctatatatacggaaaaagatacaatatatagaaaaatggaatatatagaattggtattatatattttactcagcaatataccctcagaatttaaagaaatacaaattcgacagatcttatatttatcggcgaatttgttggtcatttgaatcatgccgggtttttcattagtcgatagtaagcacttttgcataagtgccaaatcaaatgcgaatagagtattacttccggaactgatactttgttccgaattcatattttccaaatgtattatcgcatcaggaatgtaggagagtaaagcccatgactagtagcagacaggctatcaaatgtgtctggctgcttgtggcaaattgcaagttgctcgcgccgccaaggaaatcttggactttgacaaggagaacttaagacttgaaactccgttttctgccagtcactcgtgactacacagtgagaaagatcaaatcactttcgcaggaggccaactcttaaatggaaagcatttcaataccattcgcaagtaaggtttttttcaaaaaattttcaaaatgaagttatcaaagctgattttacttttaaacttcgatttaaaagtatagctgatttctttcggtgcattggtttgtgttgtcgctggaatgcatgttgtcatgacgacacgcccactttggccattttcaagggcgactccggactgtggcattttcctttagcccccattgcgtctatttatatctgggcaacagtttttctgctgctcttttaagtgcctcacgtgcccgtgacgcaaattacggtgctccctaattgcagtcccagctgcaggcgaatgaatcccttttcttccaagctctgatttttctctctgattgtcttcttcaacagtcctcggatcgcaattagccatgggcataatgaggccagtcggttggtaagagggaatctctcccacctcattcgccctatctcggagtacacaattctgcacttagtcattttcagacgtgggcaaacagaacgctcaaaatatctgctccaattcgagcattttcattgtcagcaatggaattatagcttatcacttcttattattggcttataatcctgtttacaatgtcatcgcaaaataatggcaatcgattatcttttaagaagaaaatacacaaaaatcagaaaatatgttatgatcattttgtttaaaacattttttaatccgaagagaataatgactttcaattgtgaatgctaaaatgaatcttgttgaatgaaggaaaacacagccagatgaataatttgctcggcatttttcagctgtcttgtttttgtgctaagaaaatacaatttcccaaagtcgtcactctacttcggtttttgctgttgcattcttttctgcgtaatctattagatttctaaaagtttagagtgtttttatgcgatacgaaatggatatatgtaattaatcaagagctgcccgaaactttcatatcaattcgcgactatcaaaattcacatcgatatacaacatatgtttaacacacaattgtttaccaccatcgagtcgtataaataataaagaatgacgtcattccacggtcgagtggcgccgccttaattcgttcattcattcaccaatgtcccccacatttaatgaccccccccccccccttccacctttttgcttattcatgtgtgacgtttgcattcacgtttgcgtttcatgtaaatctgtttatataagtgacgatatttgcgtactaattaaactgccttacgctcacatttatatctgtttattgttcaaatatgctttttacgtatatattataataaaactgtatagcacgcaaaccggttgaccgaatgcatttgtaaaaggggagaactttccttgagagcaagtgtctccttgcattcatcatcatcatcattatcatcgcattgattgcaaaatcttttgtttcgaagagtgatcttccagcagaatgtataatgtataaacagtcattgaaaatcgtttaaggaacttacagggctataataatcagaaatcaggtaacaacagaccatttgtactagttctaccaatcacaagagcttaaaaataaaacacaaccacattgtagataaactgcagcattattcacttgagtttttttgaatttcccaagccttttttatgcgattatctaataagcttaccaggggaagcaagaaataaacttaggcaaacttttgaagtaaatttatgcaatgatacaatgtgtatttatgcgaagacaagcgaactctttcatgagtttttgccataaaaaacggatggtcatttcatgtttcggctacatcagcggccaacattcttattagttccatgtttttccaacaaaaaaaaagagaaatgaaatagcattccattccaccactgttctttacgccgaaacttttgacagtttaacgctttgccgggaaaatctttcaacgttatttgattctttatggccaatgaacggaaaacttgcacagctcgtgcttttcacgcgctgcatgtgcaacagattcatttcgaggcttgagtgcggtttttgtggctttccctcacgtgttcctgaaaaaaaaaatgtatttcactctgaaaatttagccgcctacgtgctacgtgcaacggctgaccctcgtcacggacgaattttcctgctgctttccaccgttgtccattttaatttgcaactcccttgtacaaattgaatttatatgggccacaagctatgtgtttatttttgcaattatcccggattcgagaaaagtaagtgtgtctccattgttccgactaccttttgtttgggccaacgaaaatttacgactctttcgtcggagtttttccgtgcttttatttgattttcccgctgacctttggcgttgcgtgtttctgtgttggtgcacaagtcaagtgttttcctttgttttttccattacaattgaaatttcgcgcaccacatcttaatggaaagttgaatcgttcacgaattctgtgattgcaattgcaaacatgccgctggcttctggccaaaataatgagcagtcgccatggagaaatacgaagaaactacttgtatcggaaaatatttttatccatctgcattgcctggaagcggacaaaggggtgtggcctttcatttgcttcattaaaaattcagaaaagcgccacgcagtcaaattgaaatttgcaatttgggccaagctgagatttgttggctcgtaaatcaaactatttgtcaatcggttaacagcggtatcgagagatctggggccaatctgcccacccaggccaaaaaaccgcgtgtgggccttttggccaactctcgtttcgttggcccaaaacaccgttcaaccaacgttctgcataatgacgctacttttgtcccagtttgcgtgcctcttaatgatggcgggtatgtggatggtgacatggtaatggttccttacgcggaatgccagctaattccattaaccaataggctttcgtcaggacaacaaatgttcgcaagtgggcgttagctaaccaaaaacgctaatgaacgcaaggatgtcatagggataagcatttagttagcttcaaatgccaaaaagataatggaattgcttttgccatccaacttatttcgcaaagaaagccagcaaagtttcaaataaagtttttggtgtcacacaaaatttattatcgcctaattaaaaaaaattgaattgtttgcgactcgtagcagcaaattattgatttaaattgtcaacaaaaacagaatctttaaactggcaatatatgaatccatttaaagccaagtgtgctatataaaatatttttcgctttaataaaagctgactaattaatttttggcgagctagaaagctaatgacaattccaaggtaatgcgtctgcagaattaatagatcttgatacttgattaattgagcagacattttagcacccttcgattgaggtcacttgacttgtgggtaatctgctatcagcgggaacatctggtttaatgtctattgtccgactctaattaattgatatatggttccgtttcaattgacatttttgttcctttttttttttgggcaagtgcacagcgcccgctgtaaattccgcccacaaacaagagctagttttgcagtttttgcgttggctccactggttgttggccacgcccccccaccaactacgccaacgcccacgactatatccccgcccatttggcattccacataccaaattcccagctgagaatagaaatacgggcttctgtgcgcagatctaatgcattttgaagcgatagctgcaagacaaatgcccaaacaacacgagctgtgagcaaaaagcaaaagtgacgccttgatggattggcaactggaagcgaagaataatgggttacagaaatcagtcgcagcctcagatccccgagaagctgcaagattaagggaaacttctagctaaactgcgggcgcactgcaagataaactatctggcaaatagcgagttcttaacaccatttcgcaacggcctatcttttcaaccatttggctgcgataaggtcaggaaagagatacggggcttgattatgttaagtaattgcctagcagaagcggcgaaaataatttaatgtcttttttttttggcaacctttgcataatgcgcaaagaaagtcaaatggcataaaagtgaaattaccggagtaatgtatctttcagttgagtcatttgggaaactttatttttcggttgtataactcttcagttgtcactcgagagatttggaaaagttgtttcttttcttttccataaactgggaacttaataaaaataatagaaagaccattgccggtgaaattgaatcgttggcattctgcccacatattatacaactacaacgcgtggcgacaacaagttggttggttggccagctgctggcgaataaatagaaatgttatatgcgttcacttaatagccgacaagtgtttaatttgtttgttttgggtttcgcccgattaataaataaatatggccaatgtatatagcccatttagtgcctcgccgtgacctcaaaacatggctcaattttatgcgatttgtttactcaatgcattttttgttttgactggctggctgccttctgccattttattcccgacggaaataagattgcttttatatatatatatacatatattttcttatttccctgattctccgaagtgcacttgattacgtgcagtttatggggcagataaaattttcccaacgaatgggctttagtctaaagtttccagcgcttatgaatgggctttagtctagggctcaggtgaaagccaattgcctgcttagcctttttttttgcagatttatggccaagttatttccacctctccatgcagacagttacaatggcctggccaaaacatttgttgtccgctgtcaatttattatttgttatttattatttacgttctgactcagaccacggcggatgtaaagaggcgaaggtgtccattcatagaatgccaaaccaaccaaccaaccagccagccaaccaacaaagtggtgtgaaaacgtgttcaatgctggccgagattgtccaacgaatcggttttatttatggcttattggtaaccggcaaattcaattaaacagatattatcttaaatggaaatttatgagccaattcgcccaaagagttaaggggtttctcaaaaatgtttcagcttatccgaactgccttagagaaacgcaaaatgatttttctctctacagatgtacaaaatgtacctaaactcaattctagtgtttttatctacaacaggaagtcaatcttctgtgcataagcaatcctcttgagattaaaaagatctcttgtgcaataatacatatcagcattctaaatatctctagagatattacaatcgcttgaaatgcacacaaattcgttgtcacacacattctttgattattttgaagtctattttcggcgagttctgcttaaatattttgtgtgtatttataattagtttctattaatgcgaaagaactactttgttcattttttccagtgcatacaaagtaatttattcgtaatggagctctctacttcagcacaatcaactacagtaaagtatctctaatttgacacccactgcggggggcggggcaggtgtgcgtatctggtggatacttggccataagccccacctgattaatgtgccatgtgcataatgggtaggtgtgaaaaagaggtgcaagtggccagtagcaatgtgatgggtgcacattttccaagaaccactagtatccattgattattctggcttatcacaacagttgttcaacgcttgatgccaggtgaattgcgaatttggccaggggaattacaataaatatttcatcaacaccattcgcggacatttttatgactccaaactttgacgattcgtagcagttttgtaccacattttccggacattgagaacgatggcaattaacaacagcctgggctgggcagccttttgaagtggccagagataaatggagcagtcggcaaactgaaggaggtctgtattcaataaacaaattgggcacagtgtgcaattggaggcaatgaattatgggcatctgatttgatcagaacttctcgatcctgagtcacgtattgggggaaaatgtatcaacagttcgtttggtcaagaaacggatggcgtggaaccggtttaagaaagtcgctatagacacattcagttgaccaggcaaacaaaagaaaggtgaaccctttcttctatatatatatgtacatatatatgtatatataccaactttatttgggtgtttctggaaaagcagtatgagtaaattcgaaatccatcgtagtgttattcatattttcatagtcttacgcagtctaccgtttgatcgcagcagcttggcaacaacaacaactattgaagatacaacaacaacttttgaacgtacaacagtcacgatcggcgatgaatcacgatttgaatacctggcaccggtggatgtttgcagtcttgattacttggaatgccgctgacgtattcaccatagacacacgcacacttttcgtagacccaacacttatatgcacttatcaatgaataataccaggcagtgataatagcacacacacacacacacgcacttagaaaaaggtcactgataatagttcattatgtacaccatctataggagcatagtgaccatgactattttgggtgttttttttttgtataattgcatcgaattgagcaacatcacgagcgccgaattcgatttcgattttcgagcttacgattgacaatcacttagaactcttgtcaaccacctgtggctgagtttgcacttgtattcgaattccgattcgtatctgtgtttgttttttacttttgcgaaggtgtgggggttcgctcacatcgatatctaaacttttgagtgcggattcatttgcttagcacctttgatgcttcacttatacttatatacgacacgatttggtttcgtttccacacgattctatatctatattatcggacgtatcttcgagcctttcaaaaattaacgcttacgttgtggttttctgtgcttaacactttctgcgtggggcacttcagcagtatcggttgctcttgaaagacaataaatactgcgtcgtcggcaaagtttgaacagtttgcaccgaacacaagtcaaaagcccgcgaaatttccttccgctttgacgtccgaacagctcgaaaagttaacgttaactagagctggggcactatcgacggtactatcgaggtatccgattcgattgttattttttgctatcgatgagcgttatctacagcatgtagaatagaacggatagaataatatttttgttatatctttagtcaacatcatttgaattttcttgtttcgttagggagtttatctctcgtttagtttccttttattattatttcattattattttgaaaggtgaagtgtactaaataacgagctaaaaattgaacgcaatcacgctattcgcggcgatgccagaccgcttgaaaacagttccagttggccagtggcggccagtgatgccatgcgtactaaatttcctaacggttttagttttagatcgaagtgcttaaaataaagttttcttttattaaataatatttagtatcatttaagcatttctaacgatttgtcagctgagtaaggggattgtgatttataagggtctcgactatagcattttcactactttccacctattaaatattttcaggaaactggtaaatccttttattctacaataaagtataatacaatttccatttattattgataagaaatagtacattttattcattcggtttcacaaagtggccctggaaataaatggtttccctatcgcgaatgacataggcaaaaggatgatcggcattaaaaaccatttgagatgacggcataggcatactatagcgcacgaaaagtaaagctggcaaaaataaaacatattatacaaatatatatataataaaattatatcatacctgttgcagccgctgcctcagctccttcttcattaacctcgatgaacgccttatgaatgacttttttcacatgaacgttactgttttcgaccagatctttgaagtcagcagatttttcgaacgcatcttgtatgcccatctatagatgaatatctataaattgtaagggtgtatcaagaataatctgtgaatactcaccgcca

SEQ ID NO: 17936 - DNA, 4808 bp, DROSOPHILA
tcgagctgttcggacgtcaaagcggaaggaaatttcgcgggcttttgacttgtgttcggtgcaaactgttcaaactttgccgacgacgcagtatttattgtctttcaagagcaaccgatactgctgaagtgccccacgcagaaagtgttaagcacagaaaaccacaactgcaacgctaagtgagcaaagtgtctttcagcgtgaccatggcattaaagggccaaatgtgttaaaattgtgaatatttaagagtgtaaaattagcacaatatataatcggagaggaaacaaaactaaccaagccagatggcgatgcttccgcggttgattctgctgccactgctcctgattttgcggatctcgtggagcgatgctgtgcctttgcagcagttctcaccggatcccgatgacagcatcgagaactgcggcggcgagaatggagctcccctgatgacgccctgcaagagcgccattatcctggatgcccagacgagcaccacgcttaagtgcgaggacgacgagccgatgagctggtggaccagtcaatcgcaatatgtgcatgtgaagtccttcgataatacggaggatccggctcgaccattcggaactagcctgcatctcatcgaagtgacggctgactatgtggcagcctactattgcgtgaagacttcgaaattcagtcagatcgccaaggaggagcagtcggacgaggcgatgatcgaattggttaatcaaggatacgccagctccatctacgtgtacgtgaatgatccggacactaagctggtcgatagtcataacgtggtgacggcacgccagtataccgacgtagtcataccctgtaaaccagccatgccggacacagaggtgctgctagagaccagtaatggagaaagcacgtggaaaatcagctcgaaaggtcagattcagggtaaccccaagttcttcgatagtgtgaggtaccaccccagatggggctttacctttcgagtcattgactgtgtatccggttacttgtattgcaaaacgttggactatgaattgatcattgacgttacctatccagaaaaagacggcaaaccgctgccaaagcccgtgatcaggtcctccgtggagcatcacgtcttcacggacaccaacttcaccctggattgcgagcagtccgcctacgttgaatcagtatacggaatggaatggttcactccgtcccgggatgagaatcgcatatttgcctcccaatcaagaaccgatcccaagaccaggaacagcacccatcagacgggcaggagcaccttgacagtgctaaatgcacaaccctcggacactggtctatacaagtgtgtgacaacagataattctaaccagaacgtacaacgtgccacctacaggattaaggtgctaaagcaaaacgaaagttacctgaacgtgggcgaaccatcgggtcattacaacgttcaggaatatgccaatcgcacgatccaaatgaccgcgaactttgagggatttccgacgccctccttcagttggttcaaacccgatggcaccgaggtgcgacaatcggagaataacttcaagattctctccacggaattgagcacaatgctccaggtgctgaacgcccaattgcaggacagcggcacgtatgtcctccgtggatccaattccttcggcgtcgttcagcgggagtacaacgtcagtgtgatggacgcaccggcgctgaagatgtcggacgcctatgtccaggtgggatccgtggcgcgactggagtgcacagtacgctcctatccgccggctatcgtgaccttcttcttccgcccctgcagcctggaaccacagtggcccacttgctctgtgctcaatcagaactttagcttccagacccggcccagacccggaaagctgagtgtggaacgcatatacgaggtatccttcctgcccacggagccgggaatcctcacatgcattgcccaaaatatcattgatggaaaggaacgaagaaccctgacgaaggcgcacgttctgctgggcaacatttccgagaacatgaccatatatggcttcgataaggatcacaaaatcgccaaggaggacaatgtgaacttcacctgcgaggcgctggcctatcacttcgatggaaatcttaaatggttcatcaatggagaggatttgaaggagtcggattcggttcacattgagaccagccataccaagtactcctacaagagcactgtacacatcacaacgatatccgacagggatcgtggaacctatgagtgccgggcctaccacaacgacaaggatgccgtttacagcagccgggagatagacttgtacgtccacgatccctctgctcctcagtggacaaacggcggacaggagggtcactcgaaaataaagcgcaaactaagccaaacgctggagctggagtgtgcctccacagcggttcccgtggcaattgtgcgttggtttaaggacgacaaggaagtgaccgaatcaaagctcaggcacatcattgaaaaggaatccaagctgctgatcactcacctgtatcccggagatgaaggcgtctacaagtgtgtggtggagaaccgattggacagaatcgaacgctccttcacggtagtgatatcagatctgcccggcattagcatggcctgggtgtggttcggtgtgatactattcctcatcctgatcggtctgtgcgtcttcctcgccgtgcgctaccagaaggagcacaagcggcatctggcccttaaggcagccggattggccaacttcgaggagggcgccgtgggacacatcaatcccgatctgaccctggacgagcaggcggaactgctgccctacaatcgggaattcgagttcccacgggaaaacctgaaactgggcaagcaactcggagccggagcatttggcgttgtgctcaagggcgaggccaagggcatccggcgagaggagcccaccaccacggtggccgtcaaaatggtcaaggcgacggctgacaacgaggtggtgcgggcactggtctccgagctcaagatcatggtacatctgggacagcacttgaatgtggtcaatctcctgggtgcagttaccaaaaatattgcgaagcgcgaactaatggtcattgtggaatactgtcgctttggcaacatacagaacttccttctgaggaacagaaagtgctttatcaatcaaatcaatccagacaccgatcacattgaccccagcatcatgacccagcgcatgtccgacaactacgaactgcaccgcgatacgaatggtggtggcttgaagtacgccaatgtcggtttcccgatccactcttacattaatgagccgcacaacaataacacgcaaccgccaactcatcgcagaaattcggacaatgatccccgatcgggcacccgagccggacgaaccggatccggaacagccacctacagctacgaccgtcagatggatacctgtgccaccgtaatgaccaccgtcccagaagacgatcaaataatgtccaataactccgtacaacccgcctggcgttccaattacaaaaccgactccacggaggcgatgacagtgaccactgtggatttgatcagttgggcattccaagtggcaaggggcatggattacttgtcctccaagaaggtgttgcacggcgatctggccgctagaaatattctcctctgcgaggacaatgtggtaaagatttgtgactttggtctggctcgatccatgtatcgaggtgataactacaagaagtcagagaatggcaaattgcccatcaagtggctggcgctggaatcgctgagcgatcatgtgttcagcacatacagcgatgtttggtcctacggaattgttctatgggagatgttctcgctggccaaggtgccgtatccgggcatcgatcccaaccaagagctatttaacaaactgaacgatggctaccgcatggagaagccgaaatttgccaaccaggagctctacgagattatgctagagtgctggcgaaagaatcccgagagcagacctttgtttgctgagctggagaagcgatttgcaaacatgctgggcgaggatgtagccagccactacctggacctaaacaatccgtacatgcagagcaacattgagtacatgaagaagcagtctacggattacctggcactgatgggatcacccgacgagctggcgcctgcagctccgcgctacgtgaacgggcacatagtgcccgatatacgcatcgaagagctgccggatgactacatggagatgagccgggattctgatcccgatgcctgcaccgccatattctcacccacacgcctcgagggcgagtcctcagactttccggatttctctagcgaaaccactttcaatttcccaggggcgcgacagtcgcctacgctgagtaacaatctcaacagcggatcgagtaagccgctccgcaagaagaacggcatgccaactgtggatgtggcagatcaggcgccggaggagatacctatgctgcatcgcagctccactggatcggatggaagtccggaacagggaaggcgcttcaatcaggcccttaagcagcagtatgtcacgcccacaccgtcccctcgccatcatgtggagaccaaactcaatggggagccatccgaaaactatgtgaatatgaagccacccaggaagaatatacccggcaaaaccacaacaggtggcgggggtgctgctgctggagcctccacggaggccttctcgaatcccagctaccagccactgtccaccgtcaacgagaaggagcaacgaaggtattag

SEQ ID NO: 17937 - protein, 1500 aa, DROSOPHILA
MAMLPRLILLPLLLILRISWSDAVPLQQFSPDPDDSIENCGGENGAPLMTPCKSAIILDAQTSTTLKCEDDEPMSWWTSQSQYVHVKSFDNTEDPARPFGTSLHLIEVTADYVAAYYCVKTSKFSQIAKEEQSDEAMIELVNQGYASSIYVYVNDPDTKLVDSHNVVTARQYTDVVIPCKPAMPDTEVLLETSNGESTWKISSKGQIQGNPKFFDSVRYHPRWGFTFRVIDCVSGYLYCKTLDYELIIDVTYPEKDGKPLPKPVIRSSVEHHVFTDTNFTLDCEQSAYVESVYGMEWFTPSRDENRIFASQSRTDPKTRNSTHQTGRSTLTVLNAQPSDTGLYKCVTTDNSNQNVQRATYRIKVLKQNESYLNVGEPSGHYNVQEYANRTIQMTANFEGFPTPSFSWFKPDGTEVRQSENNFKILSTELSTMLQVLNAQLQDSGTYVLRGSNSFGVVQREYNVSVMDAPALKMSDAYVQVGSVARLECTVRSYPPAIVTFFFRPCSLEPQWPTCSVLNQNFSFQTRPRPGKLSVERIYEVSFLPTEPGILTCIAQNIIDGKERRTLTKAHVLLGNISENMTIYGFDKDHKIAKEDNVNFTCEALAYHFDGNLKWFINGEDLKESDSVHIETSHTKYSYKSTVHITTISDRDRGTYECRAYHNDKDAVYSSREIDLYVHDPSAPQWTNGGQEGHSKIKRKLSQTLELECASTAVPVAIVRWFKDDKEVTESKLRHIIEKESKLLITHLYPGDEGVYKCVVENRLDRIERSFTVVISDLPGISMAWVWFGVILFLILIGLCVFLAVRYQKEHKRHLALKAAGLANFEEGAVGHINPDLTLDEQAELLPYNREFEFPRENLKLGKQLGAGAFGVVLKGEAKGIRREEPTTTVAVKMVKATADNEVVRALVSELKIMVHLGQHLNVVNLLGAVTKNIAKRELMVIVEYCRFGNIQNFLLRNRKCFINQINPDTDHIDPSIMTQRMSDNYELHRDTNGGGLKYANVGFPIHSYINEPHNNNTQPPTHRRNSDNDPRSGTRAGRTGSGTATYSYDRQMDTCATVMTTVPEDDQIMSNNSVQPAWRSNYKTDSTEAMTVTTVDLISWAFQVARGMDYLSSKKVLHGDLAARNILLCEDNVVKICDFGLARSMYRGDNYKKSENGKLPIKWLALESLSDHVFSTYSDVWSYGIVLWEMFSLAKVPYPGIDPNQELFNKLNDGYRMEKPKFANQELYEIMLECWRKNPESRPLFAELEKRFANMLGEDVASHYLDLNNPYMQSNIEYMKKQSTDYLALMGSPDELAPAAPRYVNGHIVPDIRIEELPDDYMEMSRDSDPDACTAIFSPTRLEGESSDFPDFSSETTFNFPGARQSPTLSNNLNSGSSKPLRKKNGMPTVDVADQAPEEIPMLHRSSTGSDGSPEQGRRFNQALKQQYVTPTPSPRHHVETKLNGEPSENYVNMKPPRKNIPGKTTTGGGGAAAGASTEAFSNPSYQPLSTVNEKEQRRY

SEQ ID NO: 17938 - DNA, 3216 bp, DROSOPHILA
attaatgccttgcttttcccacatcattttcctaaatgctgtcttgcattgcaggctatgtaacctgcattctggacgacgccaaggtgtacgccaaccatgcgcgcaagaagaccatcgacttggacgacgtgcgtctggccaccgaggttacgctggacaagagcttcaccgggccgttggagcgccacgttctagccaaggtggccgacgtgcgcaacagcatgcccctgccacccattaagccgcactgcggtctccgactgccgcccgaccgctactgtctcaccggcgtcaactacaaactgcgggccactaatcagcccaagaaaatgaccaagtcggcggtggagggccgtccactgaagaccgtcgttaagcccgtctccagcgccaatggtccgaagaggccacactccgtggtggccaagcagcaggtggtgaccattcccaagcccgtcatcaagtttaccaccactacgacaacgaaaacggtgggcagctccggcggatctgggggcggcggtggtcaggaggttaagagcgagagcaccggcgccggcggagatctcaagatggaggtggacagcgatgcggcggccgtgggcagcatcgctggcgcatccggttcgggagcaggaagtgccagcggaggaggaggaggaggaggatcatctggcgttggagtggccgtcaagcgggaacgtgaggaggaggagtttgagtttgtgaccaactagcgaaacgacatcatttaccttaaattaatattcttaaaccagaccaaagcacttgcatttggttgagcgaactgggggtctaaatttcaactcgaatgtgaagtcccaaaaaccttagtatagattcgcccgttaatcattatgaaatctacgttttatacacaaatacaactaccagattttcatattaaatataacatttattttagactccagtcgcggataaagtacatgtaatgaatgtgctgagtgggatgagattactttaaagctaagatgatgcagcagccaaggtccatgatctgcagatactcggagccgccgtcctgcagtcgaaagcagcattcctgtgggataaaggcagcaataaacaagaggaatcatatctatctatgcagtcagtacgtacgcccagcttatcgcagatcgtggccttttgcggatcattcagccccggatgatggacaatgaactcgacgaactgttccatcatttggccaacgctgtaggcggagaagccaatctcccgcacgaactgctccaggcgctcgtagttcccagagcgacagacctccaggtaatcctccagatagtactccggtataacgcccgacatctcgaacagatcagcagtgttgatgatgtgctcgggccctttaaggcggtagcaggactgcaaggtggtgatagcgcgtcgcagatctccgccggaaattttgacaatggatttataggcatcgtcctctatctttactccctccatctcgcaaatgtacttcaaacgatcgatcaccttgtcttcgcccagcgccttgaagcgaaatttagagcaacgcgacgtgattggcacgataattcgggacacatagttgcagatcaggcaaaaacgggtgctccggctctccttctccatggtgcgacgcagcgcagactgtgcggcatgggtcatcgaatcggcctcgtccagaatgatgatcttgaagggcggacacggcttaccgtccggacgcacactgctggccgacagctgcgagaagtttttgatcttggtgcgcaccacattgatgccacgctcgtcggaggcgttcagctcgaggatgcggtccttgaacatgtcgccgaagatctgtcggctggcagccaggatcgtgctggtcttgcccgtgccgggcggtccgtagagcagcatgttgggcaggtccccgccttcaacgcacttgcgcagcacggccaccacttcggactgctccaccacatcatccacattgcgtggccggctgttttcgtcattcgaaaaggatagaaatcacttaaattagcatgtgctccaagttggcgacatcgtcaactcactatttctccacccacggtgccggtggcttgcgacgcgccgccggagtaccctggctcttgtctccggatcccgccgttgattttcccgttttcaaaaaggcttgcataccggtttccttgtttcttgacaaaattacaaataaagcaggacgcaaatgcaagttaagcgcgcgtttatcgataacaagttgtcgcgagttgaaaggttgccggtagcagagctgccagctagagcgaagcaattgtacacctgtaaaaacttctgtgtattacaaaagtttgtatcaaatgtaatactaaaaatgttatattaaaacattttttaatatttgtacttataaaattacacttttgtacagatttttttatttgcaaataatttgaatttaaaatgaaaacaatataaacattagattctcgccgcgtaggtgcatccatctatccggcaaccctggcctgcatcgcttttgtttttgttgcgtttttttattgcgctgataactacgggttttttagttttttataaaggatataaatagagcggctttcgcaggcagggtggacaaacatgattaaccgcccagcacagcgcgtgccaacgagtgttttataagagcccgatttggattctgattttgatttgctattgcctttgcctctgccattgcgattgttattgtttttgtgccccgccttcgccccacaaaaccgaaaaggaaaaaaccaagagaagcgttgccaaaacgttgttatgtaaatgcacggaagcagaacgttggcacaggcaccaatcctcatccggaatccaccgcaatcgacgtgctccgcagcgggacacgaagtttaaggtcggagcgcagagcacccgcacgcatcacgcgattgtgtgaaagtttcgcctggctcgagtttgtttagcgcttgtttacccaacgcgtaacgaagtcactgagtttccccttccttgtgcattgcagataggaaacccggctcggaaatggccgccaagacggacgaatcgtcgccagccgtggcgtcaagcacaagcagcaatcccgctccctccagcggacgccaccagttgcgacccgtgaagtttgactacgcggactcattcgcctgc

SEQ ID NO: 17939 - DNA, 1078 bp, DROSOPHILA
aaacaaggaaaccggtatgcaagcctttttgaaaacgggaaaatcaacggcgggatccggagacaagagccagggtactccggcggcgcgtcgcaagccaccggcaccgtgggtggagaaataccggccacgcaatgtggatgatgtggtggagcagtccgaagtggtggccgtgctgcgcaagtgcgttgaaggcggggacctgcccaacatgctgctctacggaccgcccggcacgggcaagaccagcacgatcctggctgccagccgacagatcttcggcgacatgttcaaggaccgcatcctcgagctgaacgcctccgacgagcgtggcatcaatgtggtgcgcaccaagatcaaaaacttctcgcagctgtcggccagcagtgtgcgtccggacggtaagccgtgtccgcccttcaagatcatcattctggacgaggccgattcgatgacccatgccgcacagtctgcgctgcgtcgcaccatggagaaggagagccggagcacccgtttttgcctgatctgcaactatgtgtcccgaattatcgtgccaatcacgtcgcgttgctctaaatttcgcttcaaggcgctgggcgaagacaaggtgatcgatcgtttgaagtacatttgcgagatggagggagtaaagatagaggacgatgcctataaatccattgtcaaaatttccggcggagatctgcgacgcgctatcaccaccttgcagtcctgctaccgccttaaagggcccgagcacatcatcaacactgctgatctgttcgagatgtcgggcgttataccggagtactatctggaggattacctggaggtctgtcgctctgggaactacgagcgcctggagcagttcgtgcgggagattggcttctccgcctacagcgttggccaaatgatggaacagttcgtcgagttcattgtccatcatccggggctgaatgatccgcaaaaggccacgatctgcgataagctgggcgaatgctgctttcgactgcaggacggcggctccgagtatctgcagatcatggaccttggctgctgcatcatcttagctttaaagtaa

SEQ ID NO: 17940 - protein, 288 aa, DROSOPHILA
MLLYGPPGTGKTSTILAASRQIFGDMFKDRILELNASDERGINVVRTKIKNFSQLSASSVRPDGKPCPPFKIIILDEADSMTHAAQSALRRTMEKESRSTRFCLICNYVSRIIVPITSRCSKFRFKALGEDKVIDRLKYICEMEGVKIEDDAYKSIVKISGGDLRRAITTLQSCYRLKGPEHIINTADLFEMSGVIPEYYLEDYLEVCRSGNYERLEQFVREIGFSAYSVGQMMEQFVEFIVHHPGLNDPQKATICDKLGECCFRLQDGGSEYLQIMDLGCCIILALK

SEQ ID NO: 17941 - DNA, 1581 bp, DROSOPHILA
cctaatgacctaacgaccttacaactgacactgaggtaaaatcaactgcgtaacaaagaatgtatttaaatagaaaaaacaatgtaattatattttacgcatggttacccacgaattgcactagccaactgggcgatccgcccagctacacgtaagtatatcgaacaaattcgttaggcctaaacaacatggaaaagtgaatgtgttttattcaatctactcaatgcacaacctaactgctaaacctaattactgccttataatcctaagctatcggatgctgctgttctgtgcgaattttctgggttgggtttttcgtgatttcggagaaattatttcggatgtttacacggtgcaataggtgcaatatcgaagacggatcatggatcatggatcatatatgctggcggatgggtgagaggcaagaacttgactagaaatttcgctataagtgtcaatgaatttattgggaaagcctttgcgaatgtctatcggaatgtctcacggaatgcgttgtatgcttagaatgggatatctctctcaataagtcgtaccctcttttctctctctggaatgagtctgcaatgatgtgcctgtgtctgcttggcttttgtttctatgtctaatgggctctagggccaaattaaaaaataggggcttgggattgggatcggtaacgggagtgggtttctggttggtggaatatataatcccgcccgggaatttcacaggtgcgtgggttcaaacgtgtggatttggtggggcatttgggattgggattggtaaagaaaattgcggtgtggttggttctctgttgattggttctttgcaatttagtatggataataatatggacgcgcacctaggatagcgccgataatcacttccggcacctcgacgtttttcgagtccttggagctaaggtcaccgggagtgggactcttgcttagaccgcccagctgcgccgtggtcgccgttcccgtggtcgccgtcaatccaaagctattgttgttcagtgagacgggcgtggcggccggcgccgttgccgagcccaaatggcggaatggatcgaattgcactgcggcagcgtccagttgcgactgcgtcggccggctggcggcagctgcagaggccaccgctgcggcatattgctccagatttacctggccaacggcaccgaacacattgctggcggtggccgcagatgcggcagcggctgtctgctggtccagcgtcgttacgcccaggaagttgcccagcgttgagtgggcgccgttggtgtgcgacacacccacgcccattccaaggacgccgtacttggccagcacgctcagagcggcgacaacttcgttcgttacggtctccgaatagccagagccgcgcatggcaacttattttaattcacaacagtggttaatggaatttgtcgcgccctctttgtctcctcctcgttgattttctgttcaattagatattgcgctttggcaatggcactcggctgaccagttatggttacaatgcgatttctagtgccaggtgcgaatatgccctttttggaaatttgcacatttgcgccagaaa

SEQ ID NO: 17942 - DNA, 1648 bp, DROSOPHILA
ttcaggtgagtcagtttgttctggaattgaggttgaaattgaaaataataacaataatcatattcatcatgcccaatccaagagaatctcccgagactaatccattggtcgccctgtgaactcctctcgattctttcatttcaggcgagacaacgtatcacatgaaaatactggtgcccgcggtggcctccggggccatcattggcaaaggtggcgagacgatcgcctccctgcagaaggacacgggtgctagggtcaagatgtccaagtcgcacgacttctacccaggcaccaccgaacgcgtgtgcctgatcaccggctccacggaggctatcatggtcgtgatggagttcatcatggacaagatccgcgagaagcccgacctgaccaacaagatcgtcgataccgactcaaaacagacacaggagcgcgacaagcaggtcaagatcctggtgcccaactcgaccgccggcatgatcattggcaagggcggtgccttcattaaacagatcaaggaggagagcggctcctatgtccagatctcgcagaagcccacggatgtgtcgttgcaggagcgctgcatcaccatcataggcgacaaggagaacaataagaacgcctgcaagatgatcctctcgaagatcgtcgaagatccccagtcgggcacctgcctgaacgtatcctacgcggacgtcagcggcccggtggccaactttaatccgaccggctccccgtacgccaccaatcagaatgccatcaactcgagcaccgcttcgttgaactccacgttgggcaccacgatcggcggtgcaaactcggcggccagcctgctagtcaacggcaccggcatcaatttgtccatcaatctgggctcacccaatccggcgcccaatctagcggttgccacacagctgctcgagcatattaaggttgccatgcgcggctctggctattcggagaccgtaacgaacgaagttgtcgccgctctgagcgtgctggccaagtacggcgtccttggaatgggcgtgggtgtgtcgcacaccaacggcgcccactcaacgctgggcaacttcctgggcgtaacgacgctggaccagcagacagccgctgccgcatctgcggccaccgccagcaatgtgttcggtgccgttggccaggtaaatctggagcaatatgccgcagcggtggcctctgcagctgccgccagccggccgacgcagtcgcaactggacgctgccgcagtgcaattcgatccattccgccatttgggctcggcaacggcgccggccgccacgcccgtctcactgaacaacaatagctttggattgacggcgaccacgggaacggcgaccacggcgcagctgggcggtctaagcaagagtcccactcccggtgaccttagctccaaggactcgaaaaacgtcgaggtgccggaagtgattatcggcgctatcctagtttctggcgcaaatgtgcaaatttccaaaaagggcatattcgcacctggcactagaaatcgcattgtaaccataactggtcagccgagtgccattgccaaagcgcaatatctaattgaacagaaaatcaacgaggaggagacaaagagggcgcgacaaattccattaaccactgttgtgaattaaaataa

SEQ ID NO: 17943 - protein, 493 aa, DROSOPHILA
MKILVPAVASGAIIGKGGETIASLQKDTGARVKMSKSHDFYPGTTERVCLITGSTEAIMVVMEFIMDKIREKPDLTNKIVDTDSKQTQERDKQVKILVPNSTAGMIIGKGGAFIKQIKEESGSYVQISQKPTDVSLQERCITIIGDKENNKNACKMILSKIVEDPQSGTCLNVSYADVSGPVANFNPTGSPYATNQNAINSSTASLNSTLGTTIGGANSAASLLVNGTGINLSINLGSPNPAPNLAVATQLLEHIKVAMRGSGYSETVTNEVVAALSVLAKYGVLGMGVGVSHTNGAHSTLGNFLGVTTLDQQTAAAASAATASNVFGAVGQVNLEQYAAAVASAAAASRPTQSQLDAAAVQFDPFRHLGSATAPAATPVSLNNNSFGLTATTGTATTAQLGGLSKSPTPGDLSSKDSKNVEVPEVIIGAILVSGANVQISKKGIFAPGTRNRIVTITGQPSAIAKAQYLIEQKINEEETKRARQIPLTTVVN

SEQ ID NO: 17944 - DNA, 5667 bp, DROSOPHILA
acatggattaaactaagtacaatgcgttaatggttatatcataattcgctcgctttcaaggacctttgggcacgggcgttgcgatgattgagcagcttcgaaatggtttcagatcgagtgtgcataacagaacctcaactatatgggggctaggctatatcaaatctatcaaatatcaaatatcaaactgcacatcgtcttccaattaacattcgacgacttatttaaatcacagctaaaaggcaagcataaaagtaattaattgattacacaaaacatcaacatcaacgaccttgtcacattatctttctctgttactgttactgtcactgtcactgtcactgttactgttactgctactgtttctgtctctgtctacttctctgtctgattcgtgcccaaagtgagggggaggttgaggggggttgaggttttggttgtgggtgggacttggattactggctctcaaatttgcttatgtacaactctgttattcgtttacttgactacgcataattaatttatataatcgtcatattctgtcctgttcttttgttttccatcgttcatttcattaaatagttaatatttatagtatagcaccgagtacaaaaaaatgatcaataaacagagtttgaattttgtttccttgatttttctggtttttcgttttttgtttttgtttctttttttttgtttttgttttagcaaaactaacaatttcctcgctttgcttacgcttgtaacttttgtttttttttttgttttttgtttggtgttctcttcttttcttcttctttttgctttgtttttcgctgttcttgttatacagaacgtttaacggttgtttgtttgtttgtttgttgcttgctttgttgttactgtttgttgttaaatgtttcgttaaattctactacttatttaaggtaataatttctgttgctttcgtttacgttttgttgtcacaagcgaatcgcctccgttcgttatcccccctcccttacatcgttccatcgccagatatctatagtatatagataagaaggtgttatatacagggagatgagatgagatagagctgcagcgcatattcaactcacctgcgaatgcgaactgtcgctctccacctgctcggaatagcagtgcttatagttaagatagtctagaagtcttctcggtaatggcaatgtctgtattagatcctttcgtataaccgcctttagtataacaaatctgaaattatagatagatagataaatgatagatataatagaaacgtatagttgatgcaaacccacctgcacatgtgctgcaagctttgtacatgcttaaacctagatactggattggttaattgcactcgcattggtccgtgctcaggccgacgatgcagaaagaagagatatctgaggaagatttcggattgcgttacagtcataaagtggatgcagtactttcgggctgtgctaacctgccgctccgcgaatgctcgacggccttctcaatgaactcggtgatggtctgcgacttgaacttggcatacgagccaaaggaaaaggttcctgcttacaatgaaacaacaatgtacacatagtatgacagatgtcatcaatgtatatgatataaacgcaccctgatcttgctcgatgcgcacatgtcgcacacagttgttcagcttgaagctcagggagaagatgtaatggtcgtcggagctgtcgcgcacgatgaaggagccgtccggttcgctggatagcaccttctcagccgcctcgctggacaggggaccccagtaccagccatactgcgaaacaagatcattgaacgattagcgcttttccgggcgggcaatacgactgaaacctacgtctttgactttctcaatgctggaggtgaactgcagtgcccggggctcctggattgcattcgtcttgacctcctccggttccgacttgacggcttcaatggcataggctgcggctgtgaatggcaaagctatgacaattatagacaactatagacacaaccagcagttctgcaaggcgtccactcacccttctttggtagtggtggcagggcacgagactggaacttcttgcgcagatcggcattcggttcgtccgcctcagccgttatcaacgtcccgttcagttcgctggccaactgggtttgccccgctgcacccggagcgctggttatcacggcaattggcgggatcaggggcgctgttgccgctgcattcgcattggcactggcaaaggtgccggtctggttgttgcccgagcctcggcaacgactgtgattactccgccggaagcgaaagatgctgcagaaccgctgctttaggttcagcgtgaactgtgacttcttttccgagtgcaggacgtgcttgttattcggtggctggtgctgattgtggtgctccgtcggtggcttctccagctgctgttgcgatggctgatggttgttgttgttgttattgttgttgttgagcttatcattgtccaggttgtgcttgttctgcttgctcagatacttgccaccgccaccgccagcgctgccaccgccaacgccgccatcactgctggcgccaccagcaccattgcccgctcccggcggtccaccacctcctcgggtggtgcccacactgctccgcgttctcgccgtggtggtggtggtattggtcgaaacactccaaatggtctcgttgctcgacttgaccatcggcttgggcgtgggcttgcctgcatccgagtagagggtgtgatagaactgcttcacctcatccagcgtcatgtgcagtggctccgattcgctaacctggcccatgccgacgcccaccggcgttcgatacttgccgtgcttgctcttctcaccatcgccatcgctggtctccgttccggcgcccgtgcctgatccggcgtagcgctgcttgcgcttgttgcgtttgttccgcctgctcgccttgtggtaagtgggcgctgcgggcttctgctgctgttgctcctccaccaacagctgttgctgctgctgctgctcgatcatgtccacgggaaaggcgtagatgtccgagtcgatgggcacgttgtagaaatcggatatctcgcgcgtgaacagcgcatcgtgcgacatggcctgggtgatgaaaatcgagtcgtccggcttgttggccgacgagacgttcagtgagttgtgcgagctgctcaggcggctgttcagcgagtttctcgagttgggccgctggccatggctgtagccgtagcccggctggtggtggtgatggtgatgatggcttccatgcccgtggccatggctatggtggtaatgacaatggctggtgtggcccagcggactgtagagcgaggcctggcgtcgctgcagactgctgttatccaccggctgccgcctggccccgtagtacaggtcgtagtcgtggatctccgacagaccggcgctgttgaacctctgttgggcagccgccgccttggcactggctatgttgtcctgttccgtgggtatggccttgaagtagcgagtatggtcctggtagtacggacataacgtctgcttgatcttaactatggacacgggtggcggcggcgatggcagcggggagcagctgctggcgtccgattgttcctcatcgagcagatccacgctattgcccagcgaactgctcacaatgttgttgggctcatcgtatatgttgtccgtgtggctgttcagtatggaatcgcttgagtacagatgcttgttgatcgcatacgactctttgagactcatctggcccagggcctggccatccagggcgtccagcttgcactcggtcttggccagcaagaggaccaactcttggctgggcggatgcggttcctcgggcagaacggccgtggccaggccgctcaccatggtggtggcatcgtccttcagatgctcgaacgacgattgcgaggaggtccagcgacgcagactgttcactatgttcttggagatcgagcgcaccagggtggtctgtggcgagtcctggaactcgggcggcggatcaatgggcgccaacggaccctttttcagcgtattaaagttctcggcactcatgccgccctcggagcaattgtccagtgaatcgaactgcgagacctcgccatcgctctccaccatctgcaagggattcaatgggattaggggtattctcgtagggattcgtgcgacccagtgcggctcacctcaatctcgaatttgcacatgcccagtcggtaggagtcgccactggagatggaactgttggtggtcaatggaactccactatcatcgctcagcgaggccgccgcattcagctcgatgctgttggcgctgaccagttcgtgatgcggtggtggcatgatgctaaagctgtcgctgctgcagatgctcgacacgcagacgcctccgctgccgcttcctcctccaccggccacgcctccaccgcccacattgccattcgaattggagctgcagttggagttgctgtccttaagcttaatggacgaatccattttcggggcaaggagactcagatgagaggcaacagctgaataacgagatgaaaagcggtttcgtgttattaacaactacttccaaggatgctggggaaagatacgtatcttaaacaatacaaaaacaatgcaagtcatagcaaaaggtttaagtctgatgatgtcttgtcatttaaatgttgaccgacagataaaagataattgagatgaacaaaaaatgacaattaaatgatggattttagatgtttttttttttaagaaaacagtttaaaaataaattgttattcagggttttggagacatattataattatagtatgtttatttggcatcctgcataccattttcttttattcccagtatctgcacattatttgtatgattaaatatcgctgaatgtgcggaaaaaccaacttatcagcaatatttgaggcgcatttgagtgcttaatttgaacttaaatcgaccgatgagaatgtcgccttctagacgttatataggacttatgaaaattgaattagctgcgctttttagggttcgattttgattaattggatgacacacatcccaacctatgacctttgggtgcggcggctgcagcttgcaacgaatgcaattgaaggtcaatgacagttgcgtgcgccgtttttcgtcctgtcgtcccggccgcccgccccctcgccgagcctaccccactgcggcccccttttcacctacgctcgtgcttgtgcgcagaaattgaagccaaaaaagcagacgagatttttttcccccctttttgggcgtagagatttagtttgcggatttcgccagcggattttccaaagagactttttagagcaggaaaaaactagagattcagcgcggaagtggaagatgaagatccagaaatggatctctgccaattggaatctgaagtgcgtaaaaagtaccgctgtagtacacacacacacatgggcaaaagagtagccggaaaagtcagccgccccccgaaaaccacccaacgcctaccgcccaccgacatcgtgcgtcgtcgttttcgtagtacgacgtttgctagtattttttaagccattttatataggagccgctagcgggtgaaaaggagagagggcgaacggcagtgcagtgcagcgat

SEQ ID NO: 17945 - DNA, 3057 bp, DROSOPHILA
atgacttgcattgtttttgtattgtttaagatacctgttgcctctcatctgagtctccttgccccgaaaatggattcgtccattaagcttaaggacagcaactccaactgcagctccaattcgaatggcaatgtgggcggtggaggcgtggccggtggaggaggaagcggcagcggaggcgtctgcgtgtcgagcatctgcagcagcgacagctttagcatcatgccaccaccgcatcacgaactggtcagcgccaacagcatcgagctgaatgcggcggcctcgctgagcgatgatagtggagttccattgaccaccaacagttccatctccagtggcgactcctaccgactgggcatgtgcaaattcgagattgagatggtggagagcgatggcgaggtctcgcagttcgattcactggacaattgctccgagggcggcatgagtgccgagaactttaatacgctgaaaaagggtccgttggcgcccattgatccgccgcccgagttccaggactcgccacagaccaccctggtgcgctcgatctccaagaacatagtgaacagtctgcgtcgctggacctcctcgcaatcgtcgttcgagcatctgaaggacgatgccaccaccatggtgagcggcctggccacggccgttctgcccgaggaaccgcatccgcccagccaagagttggtcctcttgctggccaagaccgagtgcaagctggacgccctggatggccaggccctgggccagatgagtctcaaagagtcgtatgcgatcaacaagcatctgtactcaagcgattccatactgaacagccacacggacaacatatacgatgagcccaacaacattgtgagcagttcgctgggcaatagcgtggatctgctcgatgaggaacaatcggacgccagcagctgctccccgctgccatcgccgccgccacccgtgtccatagttaagatcaagcagacgttatgtccgtactaccaggaccatactcgctacttcaaggccatacccacggaacaggacaacatagccagtgccaaggcggcggctgcccaacagaggttcaacagcgccggtctgtcggagatccacgactacgacctgtactacggggccaggcggcagccggtggataacagcagtctgcagcgacgccaggcctcgctctacagtccgctgggccacaccagccattgtcattaccaccatagccatggccacgggcatggaagccatcatcaccatcaccaccaccagccgggctacggctacagccatggccagcggcccaactcgagaaactcgctgaacagccgcctgagcagctcgcacaactcactgaacgtctcgtcggccaacaagccggacgactcgattttcatcacccaggccatgtcgcacgatgcgctgttcacgcgcgagatatccgatttctacaacgtgcccatcgactcggacatctacgcctttcccgtggacatgatcgagcagcagcagcagcaacagctgttggtggaggagcaacagcagcagaagcccgcagcgcccacttaccacaaggcgagcaggcggaacaaacgcaacaagcgcaagcagcgctacgccggatcaggcacgggcgccggaacggagaccagcgatggcgatggtgagaagagcaagcacggcaagtatcgaacgccggtgggcgtcggcatgggccaggttagcgaatcggagccactgcacatgacgctggatgaggtgaagcagttctatcacaccctctactcggatgcaggcaagcccacgcccaagccgatggtcaagtcgagcaacgagaccatttggagtgtttcgaccaataccaccaccaccacggcgagaacgcggagcagtgtgggcaccacccgaggaggtggtggaccgccgggagcgggcaatggtgctggtggcgccagcagtgatggcggcgttggcggtggcagcgctggcggtggcggtggcaagtatctgagcaagcagaacaagcacaacctggacaatgataagctcaacaacaacaataacaacaacaacaaccatcagccatcgcaacagcagctggagaagccaccgacggagcaccacaatcagcaccagccaccgaataacaagcacgtcctgcactcggaaaagaagtcacagttcacgctgaacctaaagcagcggttctgcagcatctttcgcttccggcggagtaatcacagtcgttgccgaggctcgggcaacaaccagaccggcacctttgccagtgccaatgcgaatgcagcggcaacagcgcccctgatcccgccaattgccgtgataaccagcgctccgggtgcagcggggcaaacccagttggccagcgaactgaacgggacgttgataacggctgaggcggacgaaccgaatgccgatctgcgcaagaagttccagtctcgtgccctgccaccactaccaaagaaggccgcagcctatgccattgaagccgtcaagtcggaaccggaggaggtcaagacgaatgcaatccaggagccccgggcactgcagttcacctccagcattgagaaagtcaaagactatggctggtactggggtcccctgtccagcgaggcggctgagaaggtgctatccagcgaaccggacggctccttcatcgtgcgcgacagctccgacgaccattacatcttctccctgagcttcaagctgaacaactgtgtgcgacatgtgcgcatcgagcaagatcagggaaccttttcctttggctcgtatgccaagttcaagtcgcagaccatcaccgagttcattgagaaggccgtcgagcattcgcggagcggcagatatctcttctttctgcatcgtcggcctgagcacggaccaatgcgagtgcaattaaccaatccagtatctaggtttaagcatgtacaaagcttgcagcacatgtgcagacttctagactatcttaactataagcactgctattccgagcaggtggagagcgacagttcgcattcgcagatatctggcgatggaacgatgtaa

SEQ ID NO: 17946 - protein, 1018 aa, DROSOPHILA
MTCIVFVLFKIPVASHLSLLAPKMDSSIKLKDSNSNCSSNSNGNVGGGGVAGGGGSGSGGVCVSSICSSDSFSIMPPPHHELVSANSIELNAAASLSDDSGVPLTTNSSISSGDSYRLGMCKFEIEMVESDGEVSQFDSLDNCSEGGMSAENFNTLKKGPLAPIDPPPEFQDSPQTTLVRSISKNIVNSLRRWTSSQSSFEHLKDDATTMVSGLATAVLPEEPHPPSQELVLLLAKTECKLDALDGQALGQMSLKESYAINKHLYSSDSILNSHTDNIYDEPNNIVSSSLGNSVDLLDEEQSDASSCSPLPSPPPPVSIVKIKQTLCPYYQDHTRYFKAIPTEQDNIASAKAAAAQQRFNSAGLSEIHDYDLYYGARRQPVDNSSLQRRQASLYSPLGHTSHCHYHHSHGHGHGSHHHHHHHQPGYGYSHGQRPNSRNSLNSRLSSSHNSLNVSSANKPDDSIFITQAMSHDALFTREISDFYNVPIDSDIYAFPVDMIEQQQQQQLLVEEQQQQKPAAPTYHKASRRNKRNKRKQRYAGSGTGAGTETSDGDGEKSKHGKYRTPVGVGMGQVSESEPLHMTLDEVKQFYHTLYSDAGKPTPKPMVKSSNETIWSVSTNTTTTTARTRSSVGTTRGGGGPPGAGNGAGGASSDGGVGGGSAGGGGGKYLSKQNKHNLDNDKLNNNNNNNNNHQPSQQQLEKPPTEHHNQHQPPNNKHVLHSEKKSQFTLNLKQRFCSIFRFRRSNHSRCRGSGNNQTGTFASANANAAATAPLIPPIAVITSAPGAAGQTQLASELNGTLITAEADEPNADLRKKFQSRALPPLPKKAAAYAIEAVKSEPEEVKTNAIQEPRALQFTSSIEKVKDYGWYWGPLSSEAAEKVLSSEPDGSFIVRDSSDDHYIFSLSFKLNNCVRHVRIEQDQGTFSFGSYAKFKSQTITEFIEKAVEHSRSGRYLFFLHRRPEHGPMRVQLTNPVSRFKHVQSLQHMCRLLDYLNYKHCYSEQVESDSSHSQISGDGTM

SEQ ID NO: 17947 - DNA, 3773 bp, DROSOPHILA
gctctcaggcctttcgtactgcaagatacatccgacggtgggcgcaagcgagatgcagatacaatccaaagactcctgctcattgttttgatgctggcgcttgcgccatctccactccgccggaattgccagattcaatccggcggacagacagtcacagcggcacttggcgcgcattttgaaacgattttctcagcatctggttgagcatcttcgctggcggggtaattagcccgcgtttatgacttaactggaagcccgaaatagaaaacaggcacagccgcagccactctaatcagtgatcacgtgaagcactcgcgtgttccaagagcaggaggcaggcggatgcggcaggccaggcaggcgaaacgagcggaacgcgcgggcggggtatcgggtggcctggcaggcagacaacgccggcggtcgctgataacgagtgccgctcaaaaactacagtcttcaaataacatctacagtaggcactcgctgacacagagacctagatttatggtgcacaaaaaaaaaggtaagccatcatgcatatatggacctaaagaaaacccgaaatccatcaaagaagcaaatattatccttcaaaacttcagtctaaacaacaaagtgaacgttaaattatactaattatgttctagtcagaagatttattgccaatttcaaagctgctttttattccagacttaaatggttagtactttcataacaaatttgattcaaaatagtagagacgtatatcttgttaaataaattgaatttaataacagttgtatatttgccctaaagtacctttttaaggaggttccactgcgcactgttccgtgttttcaaaacaaaaccgcagtgaacccaaggcagcgatactcttttccatatcaaccggcgatcaggtcgatggcggcaaaggcattatgaaatcttgaacctcccaaccgatcgctataaatatcgcaggtctcgtgctaacgactatcagtggcggaggaaacgtgctgggcagcgtacagccagctcgtaaactgagaaactctaaaactcagaagaaagtatagaaaaatgaggctgcagctcttcttttttctcggcctgagtgttctagtcagtggaggaggcaagttcttatataggtagatctgagtaaatactaaataccaacccaactgtacctgcagaatcctcacacgatgccgagaggcgaatgcatccggtgttctcgcttatgggaaccggatcgaatccaatcggaggaggtcgatacaagcgagccatgccccagatcgtttttgatgccgtaagatcagaggagcggtacgccgagtactggcagggtttggcggcccaaacactggatcagcagctggagagtaagctgcgattgaacacccagctggccaggaatgtgatgctcttcattggcgacggcatgtccataccgacaatcacggcgggtcgcgtttacttgggcggcgaggagaagcagttcgccttcgagcaattcccgtatgtgggtctcagcaagacctactgtgccaatatgcaggtggccgactccgcctgcaccgccaccgcctatttgggtggtgtcaaggccaactatggcacgatcggagtaagtgcagcggtgcagttcaaggattgccaggcgcaggcacaagccgcccaccatgtctcctccattgcggcctgggcgcagaagcagggaatggccaccggactggttaccacaacctccgtaacacatgcctcaccagctggagtgtacgcccacctggccaaccggaactgggagaacgacgccgaagtggtgggagacaatggtgaccccgatctgtgtccggacgcagctgcccagctgataaacagtccggtgggtcagaaacttaatgtgataatgggcggaggtcgcgagaatttcctgcccaaaggcgtgactgattccagtggagcgcctggtcgccgtttggatggccgcaatctcatcgacgagtggaagaaccagcacacgaacagtgctcaatatgtggagaatcgcagggagctgctcaacctatccaatcacacttcacgagtactgggcttgtttgccccctaccacatggcctaccatctggatgctagtccagcagagcaaccaacgctggaggagatggtccagtcggccatggaaatcttggagcgccagagtgccggacgcggttacttccttttcgtggagggcggtcggatcgatcatggtcaccacgacaccttggctttgagggccatcgatgaaacggcggagttcgacaaagcggtgcgatttgccaggagtcacacgagtacggacgacactttaatagtggtcagttcggatcactcgcacaccatgtcgctggcgggctattccagcagaaagaacgatatcttcggcatcaatgacggacagctggcggcggatgatcttccatatgccactctgagctatgccaatggaccgggctatgatagtaactacctcagggaaggcggcgctgtgcggaggaaaaatctgagagccatcaatatgaagaacaaggacttcatgttccccagcacagttcccttggaatcggaaacgcacggtggcgatgatgtggccgtttttgctagtggaccgtatgcccagcttttcaccggagttttcgagcagcatttcatacctcacgcccttggttacgcctcttgcctcagtgatcgtaacatgtgcgtggatgggggcgtggcacggagaccacgctgaaacttggcggggatcaaaggttaagtgaagcacaatgagtctaagcgacaaacgtattattctcgtttaagagagaagccactagaagataagcaatcgtttaagggggatactaaaataaataattgaaatctaaaaaaagcatcgattactatttgtgccaatattatacgacatttatttgcagataagagtccgttcccgtggttatcttataatgtcgattcttttttgcactttagaatttgatagcaaaatgtcgattttacgcggggaggttatcgattgacatgtgtcaactgcttaaattttgtttccttttcagtgttggctaatatcaacatgtgactgcttgcatccgcactaactgtggtttttgtctttactaaatctaacagcgtactgttgccaacactaaaatgttaaattattttaaaactaacagacgacttggcgccaaatttgaaataaaattaaaatgttttcgaatataaaagggacagacaacattaatgactagggttttattgaaatatacatggggctaattgctggacatatcagatttaaattatattttaatatgtataagtgtatatcattttcattttgtgctgtttttatttatctttttacaattaatgccttctggctgcatatataacataaggattcacacaagtggcacttaattatacaaacttaactttaaattttctacacagtttttttcccttttgcgaaaacgaagcacaaatagtcaggcgaattagtagcataatacattacgcataataacaatatttaaaattaggcatacacatagttcacagtattttgcacgattgcttggacgtcgtctttggtttcctctccacggctctaaccgcctcctcgaagacctgctgcaggttctgcttcttcttggcggagcactcgaccaagttgaatgcgtgtatctctttgcgcatcttttttccctcctgaaaaagtcgagaaa

SEQ ID NO: 17948 - DNA, 1712 bp, DROSOPHILA
aaacgtgctgggcagcgtacagccagctcgtaaactgagaaactctaaaactcagaagaaagtatagaaaaatgaggctgcagctcttcttttttctcggcctgagtgttctagtcagtggaggagaatcctcacacgatgccgagaggcgaatgcatccggtgttctcgcttatgggaaccggatcgaatccaatcggaggaggtcgatacaagcgagccatgccccagatcgtttttgatgccgtaagatcagaggagcggtacgccgagtactggcagggtttggcggcccaaacactggatcagcagctggagagtaagctgcgattgaacacccagctggccaggaatgtgatgctcttcattggcgacggcatgtccataccgacaatcacggcgggtcgcgtttacttgggcggcgaggagaagcagttcgccttcgagcaattcccgtatgtgggtctcagcaagacctactgtgccaatatgcaggtggccgactccgcctgcaccgccaccgcctatttgggtggtgtcaaggccaactatggcacgatcggagtaagtgcagcggtgcagttcaaggattgccaggcgcaggcacaagccgcccaccatgtctcctccattgcggcctgggcgcagaagcagggaatggccaccggactggttaccacaacctccgtaacacatgcctcaccagctggagtgtacgcccacctggccaaccggaactgggagaacgacgccgaagtggtgggagacaatggtgaccccgatctgtgtccggacgcagctgcccagctgataaacagtccggtgggtcagaaacttaatgtgataatgggcggaggtcgcgagaatttcctgcccaaaggcgtgactgattccagtggagcgcctggtcgccgtttggatggccgcaatctcatcgacgagtggaagaaccagcacacgaacagtgctcaatatgtggagaatcgcagggagctgctcaacctatccaatcacacttcacgagtactgggcttgtttgccccctaccacatggcctaccatctggatgctagtccagcagagcaaccaacgctggaggagatggtccagtcggccatggaaatcttggagcgccagagtgccggacgcggttacttccttttcgtggagggcggtcggatcgatcatggtcaccacgacaccttggctttgagggccatcgatgaaacggcggagttcgacaaagcggtgcgatttgccaggagtcacacgagtacggacgacactttaatagtggtcagttcggatcactcgcacaccatgtcgctggcgggctattccagcagaaagaacgatatcttcggcatcaatgacggacagctggcggcggatgatcttccatatgccactctgagctatgccaatggaccgggctatgatagtaactacctcagggaaggcggcgctgtgcggaggaaaaatctgagagccatcaatatgaagaacaaggacttcatgttccccagcacagttcccttggaatcggaaacgcacggtggcgatgatgtggccgtttttgctagtggaccgtatgcccagcttttcaccggagttttcgagcagcatttcatacctcacgcccttggttacgcctcttgcctcagtgatcgtaacatgtgcgtggatgggggcgtggcacggagaccacgctga

SEQ ID NO: 17949 - protein, 546 aa, DROSOPHILA
MRLQLFFFLGLSVLVSGGESSHDAERRMHPVFSLMGTGSNPIGGGRYKRAMPQIVFDAVRSEERYAEYWQGLAAQTLDQQLESKLRLNTQLARNVMLFIGDGMSIPTITAGRVYLGGEEKQFAFEQFPYVGLSKTYCANMQVADSACTATAYLGGVKANYGTIGVSAAVQFKDCQAQAQAAHHVSSIAAWAQKQGMATGLVTTTSVTHASPAGVYAHLANRNWENDAEVVGDNGDPDLCPDAAAQLINSPVGQKLNVIMGGGRENFLPKGVTDSSGAPGRRLDGRNLIDEWKNQHTNSAQYVENRRELLNLSNHTSRVLGLFAPYHMAYHLDASPAEQPTLEEMVQSAMEILERQSAGRGYFLFVEGGRIDHGHHDTLALRAIDETAEFDKAVRFARSHTSTDDTLIVVSSDHSHTMSLAGYSSRKNDIFGINDGQLAADDLPYATLSYANGPGYDSNYLREGGAVRRKNLRAINMKNKDFMFPSTVPLESETHGGDDVAVFASGPYAQLFTGVFEQHFIPHALGYASCLSDRNMCVDGGVARRPR

SEQ ID NO: 17950 - DNA, 3022 bp, DROSOPHILA
agggtgaaatactgtaaggaatcaaattcgcaggctagaaagggcgactatgcatagccaaggggcgagaccagataatgttgcagagtgtctccatttcccgtttccggtctgtccggaccgaagggagcggagtgcagtgttgctatttctgaacagcactcatattttatatcttatctcgtgcaagcggcctggaacagcgaatcatgggggggaggactgaagtgacaaaaacaaatataactagatccaataacaatcgtggaaggctaggagtgatccccaatcaaatgcgcatgtggcagtgttcagaaactgcggggcattgcaccttagttggaaacctaaaataaataaaagaaacctacatctgacaaactgttgccaaggattaaacgagaatttggcaaaaagctttaggaagctataattttcaacagatgttagattgttacaaacacaataaatgaacaccagaaattagaaaacaaagaaaaaagcccgtaaaagatctctaatttatattgctgattccatgacttaagaaatggaaatttaagcatgcccaaaatatgtagattaattaagatattcttcattcttcattggacgcaagaggaaaaaacagccgtcacactggaagataaggacaggcttccgaaaaatttaaagaaattaactccgatatcaatctttcttttgattgattgtttatatgtataacaagtcggaccgtattttaccgcttctttggttcacgtcatagctaaaagattattatttcatttttctttttcggatctttcaagataaccatttaaaagaccattttttaataaataaataaaacttgctcacaacgaaattttaaacaaatgagctaggcataaatatgattcgaatacaatcgtatcacgacactcattctttacttttaagaaatcgataacatgtgtgtgctcagcaactatctcatcactaactaactgtacggggtgttgacaacatttaagtaaatttcgttcgacaattgagaaaatgcctgaaagcgacgtgactaaaatgaaggtaagttaaaagattaatattaggagatgatcccaattatgtgttcctttccaggtggcggatttgaagcgcgagctgaagcttcgagggctcgccgtgaatggaaataaaaccgaactgcaggaccgattgcagaccgcgttattagagggggacctttctctggaggattcggccatagcagatgccattgacgacgacgatgtgtctttcaccgacgaggatgagcacaagctgctgggcgatgagaacgacgatgagctactgaaaagtccggttagcacacccacaactgtggccattccggaccttctagcggaagagaagacgtcttcggccccagatgcagctgcgccgaccaagaaaatagttctgaagcgaaataattcccagcagtcgacgggcacggtagccagcacggggacaactccatcgaaggagaacgaggcgcccgctgcagctgctagtgactccaccggcgaaactcctaccaagaagcataagccgattgtggtcggaccaaagacggaaggagagaagccatcaggcgacaagaaacttaaccagctgactgcacaagagcgattggaactgcgggccaaaaagtttggcataacaccccccgctgtggccaacactgcaaccgcagtggcagtggccatcaataaatcctctagtgcctccattacggccaacaaaggtaacaaggaaaccgaggagcagcaaaaggaggcactcaaaaaacgtgccgagcgtttcggattcgtggtgcctgacaaagcaccgacctcaaaggccgatgatcgtctccagaaacggaaggagcgatttggagcaggagcagtctcagcagctaccaccacgcctaccacaactgaatccaaggacgcctggtcagagaaggcgcgcgctcgcttggaaagattcaaaacagccccgtccacaaattaagaaaagcgaatataattatttaagcaagcaaatacaattgtaaatcatttcgggagtaggccctatcatgtatcaaaccccaaagccaccaatgcttgtagtaattaagcaaaaattcaataaacacaaaacatgaccactgaaattcagggtttacattactttatttcgtttaattcaaagacttaaaaataatttgagtcgcgtcttcggttttattggggcatttttttttttttggaacgtcaaaattcatattagttggtataatattatgcgttaaaatatataaaagttattcaaataagtgggtgcaaaattaattccgtattgcgagtcaaataaggaatatcagctcatttcattggtcatcgcgctgtttgaagtgtgaattggcgacaagaaacgtagaataacttttgaactgaattgcctgacttaaaagtatgttactttaatgttgcgcccatccagacgggagccatccataagcgctgaaaagacattggagttcagcaaaaataaaggaatcgccttttgagtattacttaccaatggctagctcggcatcgcgctccttaaagaaacgcacaacgcccacatcattgccacggatttccgcaaacttaacgtccccgatctctcggaacttgtcgcgcagtgtttgccaagtgcaggttattggaacgttcttgataatgatcgtgtccgactttcgagaagcaccgacagcattggccgagccaacgttggaattgcccacgttgctgccgccgccatagacatccaatggattgccagtgttgtaatcgttgccatcaacaccaactcctccgttgccgccgcccattccaccagagctgctgtaagcattgtatcccaaattgctggagccgccaccgccgctgtagttgtttccagagctatagctattgccaccaccggtgccgccgctgctgtagttgtttgaaagacccacattgcttggcggcaggttgtc

SEQ ID NO: 17951 - DNA, 968 bp, DROSOPHILA
gttgacaacatttaagtaaatttcgttcgacaattgagaaaatgcctgaaagcgacgtgactaaaatgaaggtggcggatttgaagcgcgagctgaagcttcgagggctcgccgtgaatggaaataaaaccgaactgcaggaccgattgcagaccgcgttattagagggggacctttctctggaggattcggccatagcagatgccattgacgacgacgatgtgtctttcaccgacgaggatgagcacaagctgctgggcgatgagaacgacgatgagctactgaaaagtccggttagcacacccacaactgtggccattccggaccttctagcggaagagaagacgtcttcggccccagatgcagctgcgccgaccaagaaaatagttctgaagcgaaataattcccagcagtcgacgggcacggtagccagcacggggacaactccatcgaaggagaacgaggcgcccgctgcagctgctagtgactccaccggcgaaactcctaccaagaagcataagccgattgtggtcggaccaaagacggaaggagagaagccatcaggcgacaagaaacttaaccagctgactgcacaagagcgattggaactgcgggccaaaaagtttggcataacaccccccgctgtggccaacactgcaaccgcagtggcagtggccatcaataaatcctctagtgcctccattacggccaacaaaggtaacaaggaaaccgaggagcagcaaaaggaggcactcaaaaaacgtgccgagcgtttcggattcgtggtgcctgacaaagcaccgacctcaaaggccgatgatcgtctccagaaacggaaggagcgatttggagcaggagcagtctcagcagctaccaccacgcctaccacaactgaatccaaggacgcctggtcagagaaggcgcgcgctcgcttggaaagattcaaaacagccccgtccacaaattaa

SEQ ID NO: 17952 - protein, 308 aa, DROSOPHILA
MPESDVTKMKVADLKRELKLRGLAVNGNKTELQDRLQTALLEGDLSLEDSAIADAIDDDDVSFTDEDEHKLLGDENDDELLKSPVSTPTTVAIPDLLAEEKTSSAPDAAAPTKKIVLKRNNSQQSTGTVASTGTTPSKENEAPAAAASDSTGETPTKKHKPIVVGPKTEGEKPSGDKKLNQLTAQERLELRAKKFGITPPAVANTATAVAVAINKSSSASITANKGNKETEEQQKEALKKRAERFGFVVPDKAPTSKADDRLQKRKERFGAGAVSAATTTPTTTESKDAWSEKARARLERFKTAPSTN

SEQ ID NO: 17953 - DNA, 4662 bp, DROSOPHILA
atatagatataagcaaaaagcatgcaaactcaaacaataaacattgagaaacccgtgcgagcggctccaaaggatgtgccacgatatcggggaacaatttacaattggtgattgtggttcgcccagaggattccttgagctcatcgctgcacgggatctgcgttaaatagaatatgctcacaataaatagtttagtattgctcttacatctaagacaaggttcaatctcattatcatttttccgtcttgggtcgcatcgtttccatttcatttgctagttaatagtttaacaatcatcttagcatctagcactatatagcatatagcatatagttctggtctccaatctaagccatactatatgcacatgctccaaatatgtgtatatagtatgggtgcatggagattttcgttatccattgctgcaccgtttgggcagcttggatcagggttccaagcccacgaatcatcattagtattatctcgagtggatgcaatctgatcgtggaatcagcgagcatctatatttatacggataatattgaagatgattcaccggttggtgtcacacctgctgtagtattgcattcacctaacatgggttcgtttcgtaatatatgtatagtatatatggcgtcgttagtggtcatttaagattagtataacaattgtatatatcctatatagatagattgattcgttagtgtttcgttttagtaacatagacattgatcgttttcagtattattatgaagtgggttccattgaattttatgctgttgttgttgttgttgttcttggcatctgaaagagtctttcccaaacttagccgaaaatgtgctgggtgcccggaggcaccttgtagctgggatagccattgttcaactggtgcttggcaaagaagggtgtgtagtcctgctattacacatatgcattaatatcgaattgatatgtatcttaagcggctatatcctacccggttaactctcctgggacggcagacgggacccaacgccaactggcgtcgttcctcgttctcgcgagccgcggcctccttgtactccggtggtggccatttcaaatctccgcgcaatttgctgcctcctagaataattttataaatgttaactataagttaactaatttaaggtgatccacagtaccctgataactgacggcggctggctgcgaagtgtagactggtgcaggcttctggctgactggagcctccttgcgcagggtgatgatgccgggactggcgccccggtagctatcctggccagcgtaggctcccggatactgctgctgctgctgttgttgctgctgctgcagatcagtctgatcctgcgagtagggcaactggggctgcgaataagaattgtatgggggttgagcataggtcgagccaccattttgctgtgggtaataggatggctgttgctgttgctgctgttggtacggtgaagcctggtacgatggctgctgctgctgctgctgcggctggttccactgtggtggctgatagggcgcctgagcctgcgattgaggctgatactgctgctgcggaacctgctgctgctgctgttgctgttgccactgtgctccaggctgctggccatcgtaagacggagcaccgtactgctgctgctgagattcaaccgatggtgcagtggtgcagtggtgtggtggtgtttggtggtgccaacatgcatgttcgacatgggtttcgatcacaggttatgattttaattcgtagatgggtggtgttttgttggttgggaggtgcatacgacacattcacattggatgtagatagaattgatagaatatgttggagatagagatagacaaaagaccatagttagagggtgggaggttgagtttcgagttaagtattggataagtttaggcgcagtttacagctgaaagtcgcagagaaagaagcaaatgccattaaagccataggttaagtgagtatttgcctaagaacaggagttagttcagattttgccatgcaaaagtgagtgagtacaaagttactacaaattatttgatttttaaaaggacattacatcttttattaccaagttaaagaaaaaccatttaagaagaagcatttctagagagttttttatagggtaatattaagtttagtagagaatgcaagtttattaagtgtataaaatggaaagtatggtaatactaaggttttgcctcaagtacaaataaatagttattagtgtaataatgtttagtaagtatttcagaaggaagtttagtatgtgttctagatagaaggagatcaacgttggcaggagacatagacgatcgcagccgcagtgcaatatgtagcatcacttcgcttagccaaaaatcgggatccaatccgaccaagacggtacctgcggctgctgttgttgctgctggtaggatccctggaacgggggataggctccattgccggcggtgaattcactgcgtgacttaggctgcggagcaccaatgtgtttccagccaccacccacattgttcactgcctgcagcggctcctgcggatagttggactgatagttagcctggtatggataaccgctgggatcggttgcgggagctggagatggagctgaaacctggacgggttccctcgagcgttgccgaccgaactgcgcctgtgtgtactgcacaggctgctgttgctgctgttgctgctgctgctcctgatgcgaataactatctgggtactggttggtggggtaggcggtgctggtggtttgtggtgccgatgggtaggcattttgtggtgtttgggtggtgcgtggctggacgttgttataaatgggaccctgaaagttgtcagtgtggttaggctgggaaaatgggagtgcagagttgggtctccaaatgctatgtacatggcgtttaatgccccaccgggatgagatacaaattgtgtcagtggcggatacaattatatttacactcgacgcacacgaaacttgactatatatgtatatacaattcattggtttcaattgagcacttgggttggcaatttacctgaggtggagcggcagctgctgctgtgggagcgtgggcctgcggatagtagcctccggcaccgggagccggactctgagtctgcggctggggggtgaactcccggatgatccgctcctcggaggccggtggccaggccacacgcttgtagcctgaatcaaagagagtagagaaataaaaaaaaaacgttaacgataaatactcggaattctttcgatgatgatgcagctgctcggtgcagctgccgtgcaataacattcaacaaaatgcggccaaaacgtgggcgtcactataaccttggatgccgcactgcgtcccagtgctagctaaacaatttgaaaatgatttaagccaattaaaattatagccaatgtggaatagcaatgtgcgaacacaaagggggcggggcggtcggtgggaacgatggggctggtggggatatcggtgcagattctgcaaatcatacacggctgtcattgcatctaaatttagacgatgagaacgagccgaaagctaagaatttgacattactcatggggtgatgaggatgtcgtcgctgtacttgcaacatgttgctgctgctgctgttgctgctgcggctgcattggcaacatttgtttggtcgaaatcgtttttggggggggggggatcgtggcgatatattgctatatacatgcacatatggggggtggtgtgaaaatgatgtgtgtgtttaccctccagatttttgtagttctcgttgatgattttccactgagcgaccatggttatatgtatattgctctctactcgcgtatctctatctatttggctatctatctatatgggcgatcgggccttggcgtaagaataaaaatattctcgtatagatatcaaaaataacaaatacacttatatgccaagatgtatatgtttgtttttttgcggctattttttgacttgtccgctcgccgaaagtcgagaagagcgttatataataacgaggtgcaatcaattgaattcgatatttggagagtctgctgctgctgaggaacaccacgacttcgacttggattttatttgatttatggctctgatttttttgtttttttacgctcaatttcgcagatcggagcgcgtttcgtttatccttcggatcgatatcgttgaaaaattcgaaataaaataatgattcggcaaaacacggcgattgaatttattttttttgttctttttattcaatttcgatttgattcggttcgattcgcgtgcgtttgcccaatttaatttctattttctattatagctattggctatttctatttgctaattcgttgatcgttcgcgctgcgatatgtttgccttcgatgtatgctactaagtgaggagccagagaaatgcagaggaaattattgttagccagcgccaagatgtagaaacattggcactcgtatgggttccaacccacacattcggcacacactcgactttcgtatctgtatctttcagctgtagctgaatctgaatctgaatccgtgagatacgcgaaagtaaagacttctccgagagcgttagcaactcagagatatcatctagaggcatagccatgcaaatgggtatattccg

SEQ ID NO: 17954 - DNA, 1726 bp, DROSOPHILA
atgcagccgcagcagcaacagcagcagcagcaacatgttgcaagtacagcgacgacatcctcatcaccccatgactgcaccgagcagctgcatcatcatcgaaagaattccgagtatttatcgttaacgttttttttttatttctctactctctttgattcaggctacaagcgtgtggcctggccaccggcctccgaggagcggatcatccgggagttcaccccccagccgcagactcagagtccggctcccggtgccggaggctactatccgcaggcccacgctcccacagcagcagctgccgctccacctcagggtcccatttataacaacgtccagccacgcaccacccaaacaccacaaaatgcctacccatcggcaccacaaaccaccagcaccgcctaccccaccaaccagtacccagatagttattcgcatcaggagcagcagcagcaacagcagcaacagcagcctgtgcagtacacacaggcgcagttcggtcggcaacgctcgagggaacccgtccaggtttcagctccatctccagctcccgcaaccgatcccagcggttatccataccaggctaactatcagtccaactatccgcaggagccgctgcaggcagtgaacaatgtgggtggtggctggaaacacattggtgctccgcagcctaagtcacgcagtgaattcaccgccggcaatggagcctatcccccgttccagggatcctaccagcagcaacaacagcagccgcagcagcagcagtacggtgctccgtcttacgatggccagcagcctggagcacagtggcaacagcaacagcagcagcagcaggttccgcagcagcagtatcagcctcaatcgcaggctcaggcgccctatcagccaccacagtggaaccagccgcagcagcagcagcagcagccatcgtaccaggcttcaccgtaccaacagcagcaacagcaacagccatcctattacccacagcaaaatggtggctcgacctatgctcaacccccatacaattcttattcgcagccccagttgccctactcgcaggatcagactgatctgcagcagcagcaacaacagcagcagcagcagtatccgggagcctacgctggccaggatagctaccggggcgccagtcccggcatcatcaccctgcgcaaggaggctccagtcagccagaagcctgcaccagtctacacttcgcagccagccgccgtcagttatcagggaggcagcaaattgcgcggagatttgaaatggccaccaccggagtacaaggaggccgcggctcgcgagaacgaggaacgacgccagttggcgttgggtcccgtctgccgtcccaggagagttaaccgggactacacacccttctttgccaagcaccagttgaacaatggctatcccagctacaagaacaacaacaacaacaacagcataaaattcaatggaacccacttcataataatactgaaaacgatcaatgtctatgttactaaaacgaaacactaacgaatcaatctatctatataggatatatacaattgttatactaatcttaaatgaccactaacgacgccatatatactatacatatattacgaaacgaacccatgttaggtgaatgcaatactacagcaggtgtgacaccaaccggtgaatcatcttcaatattatccgtataaatatagatgctcgctgattccacgatcagatt

SEQ ID NO: 17955 - protein, 506 aa, DROSOPHILA
MQPQQQQQQQQHVASTATTSSSPHDCTEQLHHHRKNSEYLSLTFFFYFSTLFDSGYKRVAWPPASEERIIREFTPQPQTQSPAPGAGGYYPQAHAPTAAAAAPPQGPIYNNVQPRTTQTPQNAYPSAPQTTSTAYPTNQYPDSYSHQEQQQQQQQQQPVQYTQAQFGRQRSREPVQVSAPSPAPATDPSGYPYQANYQSNYPQEPLQAVNNVGGGWKHIGAPQPKSRSEFTAGNGAYPPFQGSYQQQQQQPQQQQYGAPSYDGQQPGAQWQQQQQQQQVPQQQYQPQSQAQAPYQPPQWNQPQQQQQQPSYQASPYQQQQQQQPSYYPQQNGGSTYAQPPYNSYSQPQLPYSQDQTDLQQQQQQQQQQYPGAYAGQDSYRGASPGIITLRKEAPVSQKPAPVYTSQPAAVSYQGGSKLRGDLKWPPPEYKEAAARENEERRQLALGPVCRPRRVNRDYTPFFAKHQLNNGYPSYKNNNNNNSIKFNGTHFIIILKTINVYVTKTKH

SEQ ID NO: 17956 - DNA, 4387 bp, DROSOPHILA
gcacatacagacaaacaggcgacatttgaagaaataaaaagtgaataataaccaatgcgtggccgtttagagcattttacatttaaatctacgattcggcttgttcattttgcggcccctccgccccttgttgtccttgtccttgcggatttcgcgcaccagtgtgtaaaatgcatcgtccacgcccatgcgcgtcttggcggatgtctcaatgtatggaatgccgtactgtttggccacctgagaacaaccataattaacggaatgttcgctcggaactctgaaggccggtactcacctctcttgcctgctcgttgttaacgttccacgaggccagatcacatttgttgcccaccagcaccatgggcacctcttcggcatcctttacgcgcttgatctgctcacggtaggtgccgatatcctcgaaggacttcgcactgttgacggcaaagaccagcaggaatccctcgccagtccgcatatactgatcccgcatggccgagtactcctcttggccggcggtgtccaggatgtccagcaggcaggtctctccatctgcaggggaatataaaatgcatttgaatatcgcaacttcttaaggtctcttctagtataaacgggaaaccaaaccagcgaaagggtgcagaaatctctagagtatttggacctgtgcagccctagctttgccagatctaagtacatataactcaccgataaccacttgctttcggtaagagtcctcgattgtggggtcgtactcgtccacgaaatggttctggattagctggatggtgagcgcggacttgcccacgcctccggctccaacgacgaccagtttgtattccgtcatttggctgtggcgtccgttttcgatttgccgtagtcaaatgtcacagtaacagtctctttctcgcgatcgatgcttactctcttgtgaagcgcccgcagatgcagtctctctctccgtacgcttgttgcgtgtgtttgtgtgggtgactgtgcgtgtatgggctgcaagtggagtaaattattaattaagattgattaaaataaattaaacgcataattaggcaggaattaatgcacgtcactgagtcactgtgactaggcgcttactcgcacaaacacacacgcaccactgcatgcacacagccagacgggcaacacaaaaaaaaatgggaaaaagagatcaatgactcaaactaaaattaaaacccattcgctcaatgcaaattagttagtctcccccatagccgagttgttaactaggtgaatttgctaattcggcggcgttgtttttagcccttttctttattatttttcttttgcctgccggggctgcggaccttctttgttgctgcctcttcagctagctcctccttgtttttccgctccgctcctctctatcaatactctgcctctctcttctcgcgcgcggcgcagttgctgggcacgtttcacgtcactttcgcggctaacggtgcgacaggcggtactcctcgatggcaccaatttaattgccgtgcggtaattgcaattaacagcgcaggaaaacaataaatccgtatgtgaaatgaagatgaaatctaggctgtacgtagctgtgaagatactagagctggcaccaagccgatggcactatcgatagcgatggctgcattctggccggcaccatcgatggacttgcaatagcgattgctatatgaaaactaatctaaagaggtggatgcacttcagtcgactctctataatttgcttaaactaataaatgatttgatcaatacagctttctgtaaaaactggcagacgctttctgcttttaataattgttaatttaagttcaacgggctggcatcaccgtttcttagcacggactcaagcctgagtctattatttcaaccaccactgtaacgaaaacagcatggacagattgaaattcaataatttggtaaataaacgattttatttaaaattatagagttttaattaaaaagaacttttacaggtgatatccaacaagaaggtcattcaaaaggcacgcgcccagaccatcgccaaaatcgtacaaaagctgcgaaagacaaaagaggctctggccaaaaatccagacagtgaaaaggaaaagattcgtttacgcaagaacacagaatgcctggcccagttgaaggctctaaaatatatggatatggtacgccagtcgctcctgcaggagggcacaaatcccaatgcggtgattgctaacgagcgctccacgccggatgaactgggcattgccatgctgcggctaaacaaattgatgcacggactggtggacaagtttgtggaaaccttgaagctgagcaccaccgataaggaggccaagtggcgtgaggagatcctagagacgagcaagcgaagggccaaaatagaacgcactgaggagcggaagaggaagcgcaaggagctgaaggagcagaaggcccaaaccaaaaaccgactggagtggttagagcagaacaaagtggtggatgcagatgttaatggagcaactgcggaaacgcccactcttcaagtcagcaaagtaaatgatcaggaaataccacagtcttttgcaaaaactgaaaattctccagttctcaaagtcaaaaaggaaaagacacctaaaacaccagccaaaaaagaaagaaaccttcagaaaaaacaagcttttgatgagcagatcaacccggagataactaagctcagttccaaaaagcagaatttaaatacaatcaaggagaataatgcagagccacaactagaaggcagaccgaaagaatctaagccaaaacccttcgagaaaaaaccagccagagagcagaagcctaagccacgattagaaaggcagccaagtatcgatgaagaagaaccacaacttgacaataatcgtcccacacatgtcgttgatcccttcttcattacggaatcaggccagccctacttgtccagcgccgtggttctttccggggacaatgacagcgaagctgatgaggaacaggcaccgccgccagtcaaaaggttccgcaatgaggatcgacggtcgaacacatatcgggagaaaccggaaagacagccagagttcaaagcgagaaagccaactgatgatcgtcatccctcctggctggctaagcaacagcagaaaccaatcattggtgattttagaggcaagaagattacattcggcgacgacggccaggcggcggaaattattgctccaagtatcaatcaattaaccgctactgctgctcctttgcccaccgatggcatgcacccgtcttgggtggccaaacagaagtttaagccgaaaattgccgcgtttcagggcacaaagattaagtttgacgaagattaaagatgatgtcaatggtattttgttgttttaataactaaataactgcagctttgctgctcacacgccaactttgggcacatagtgaccacgaatcttgtcctcgttgcgcagcttgtccacgttgacatcggggaactggcgacgcagcacatccagatcgaaattggggttgcgacgcaggatcatcatgacttcgttgcgggagcggctgcaaaataacaatttttattgagatatcccatttaactaagggcaacatacttcttggccttgcgcttggcattgtagagtttctccctgtactttaagaggaatctgttcacagctctgccgccgtagccaatgttgcgggatttaatccatttgaggttcatgaagggcggcagggcgtgttcgcatgctttgtatgagacctgcaggccaaatgcgttcttcaccgccttctggggccgttcacccgtttcacctgtttccagcaggtgatacgccttgttccgctccctcactactgtctccaggttttccatggagattttcacctgcaattctaaagttttagaaaaggatctccaccatcaaatatcgcccaccttatcgatgcgctccggactagggaagacttccattttgtcattgcactcgtgctccatggtcagcagcatgttgcgctccttgaggagcacgaaccacagctggtgcagctccttgttggacttgatacgcagctcctccgtccgccaggcgcggcccaccttcacctcattctcgctccagttcttcttgtcgtcgaagaactccataagatcccggcgaacagcggaagtgtgcatttgcatcggcatttgaacatgcggcgtttgcagggcagccgcactacatattacataaaaacaaaggcgcgtttatatcggttactctgtgtaaaagtcggatttgtgaaagagaacggacctgcacgactgccatggctgcttgggagctgccaaaaagctcctgactgtcgcatttcccacagtt

SEQ ID NO: 17957 - DNA, 2266 bp, DROSOPHILA
gcgtgtatgggctgcaagtggagtaaattattaattaagattgattaaaataaattaaacgcataattaggcaggaattaatgcacgtcactgagtcactgtgactaggcgcttactcgcacaaacacacacgcaccactgcatgcacacagccagacgggcaacacaaaaaaaaatgggaaaaagagatcaatgactcaaactaaaattaaaacccattcgctcaatgcaaattagttagtctcccccatagccgagttgttaactaggtgaatttgctaattcggcggcgttgtttttagcccttttctttattatttttcttttgcctgccggggctgcggaccttctttgttgctgcctcttcagctagctcctccttgtttttccgctccgctcctctctatcaatactctgcctctctcttctcgcgcgcggcgcagttgctgggcacgtttcacgtcactttcgcggctaacggtgcgacaggcggtactcctcgatggcaccaatttaattgccgtgcggtaattgcaattaacagcgcaggaaaacaataaatccgtatgtgaaatgaagatgaaatctaggctgtacgtagctgtgaagatactagagctggcaccaagccgatggcactatcgatagcgatggctgcattctggccggcaccatcgatggacttgcaatagcgattgctatatgaaaactaatctaaagagctttctgtaaaaactggcagacgctttctgcttttaataattgttaatttaagttcaacgggctggcatcaccgtttcttagcacggactcaagcctgagtctattatttcaaccaccactgtaacgaaaacagcatggacagattgaaattcaataatttggtgatatccaacaagaaggtcattcaaaaggcacgcgcccagaccatcgccaaaatcgtacaaaagctgcgaaagacaaaagaggctctggccaaaaatccagacagtgaaaaggaaaagattcgtttacgcaagaacacagaatgcctggcccagttgaaggctctaaaatatatggatatggtacgccagtcgctcctgcaggagggcacaaatcccaatgcggtgattgctaacgagcgctccacgccggatgaactgggcattgccatgctgcggctaaacaaattgatgcacggactggtggacaagtttgtggaaaccttgaagctgagcaccaccgataaggaggccaagtggcgtgaggagatcctagagacgagcaagcgaagggccaaaatagaacgcactgaggagcggaagaggaagcgcaaggagctgaaggagcagaaggcccaaaccaaaaaccgactggagtggttagagcagaacaaagtggtggatgcagatgttaatggagcaactgcggaaacgcccactcttcaagtcagcaaagtaaatgatcaggaaataccacagtcttttgcaaaaactgaaaattctccagttctcaaagtcaaaaaggaaaagacacctaaaacaccagccaaaaaagaaagaaaccttcagaaaaaacaagcttttgatgagcagatcaacccggagataactaagctcagttccaaaaagcagaatttaaatacaatcaaggagaataatgcagagccacaactagaaggcagaccgaaagaatctaagccaaaacccttcgagaaaaaaccagccagagagcagaagcctaagccacgattagaaaggcagccaagtatcgatgaagaagaaccacaacttgacaataatcgtcccacacatgtcgttgatcccttcttcattacggaatcaggccagccctacttgtccagcgccgtggttctttccggggacaatgacagcgaagctgatgaggaacaggcaccgccgccagtcaaaaggttccgcaatgaggatcgacggtcgaacacatatcgggagaaaccggaaagacagccagagttcaaagcgagaaagccaactgatgatcgtcatccctcctggctggctaagcaacagcagaaaccaatcattggtgattttagaggcaagaagattacattcggcgacgacggccaggcggcggaaattattgctccaagtatcaatcaattaaccgctactgctgctcctttgcccaccgatggcatgcacccgtcttgggtggccaaacagaagtttaagccgaaaattgccgcgtttcagggcacaaagattaagtttgacgaagattaaagatgatgtcaatggta

SEQ ID NO: 17958 - protein, 463 aa, DROSOPHILA
MDRLKFNNLVISNKKVIQKARAQTIAKIVQKLRKTKEALAKNPDSEKEKIRLRKNTECLAQLKALKYMDMVRQSLLQEGTNPNAVIANERSTPDELGIAMLRLNKLMHGLVDKFVETLKLSTTDKEAKWREEILETSKRRAKIERTEERKRKRKELKEQKAQTKNRLEWLEQNKVVDADVNGATAETPTLQVSKVNDQEIPQSFAKTENSPVLKVKKEKTPKTPAKKERNLQKKQAFDEQINPEITKLSSKKQNLNTIKENNAEPQLEGRPKESKPKPFEKKPAREQKPKPRLERQPSIDEEEPQLDNNRPTHVVDPFFITESGQPYLSSAVVLSGDNDSEADEEQAPPPVKRFRNEDRRSNTYREKPERQPEFKARKPTDDRHPSWLAKQQQKPIIGDFRGKKITFGDDGQAAEIIAPSINQLTATAAPLPTDGMHPSWVAKQKFKPKIAAFQGTKIKFDED

SEQ ID NO: 17959 - DNA, 19034 bp, DROSOPHILA
gttgttgctgtggctgtcaatgctgcaataatgaaaattcggtgaacaagacacaggcatacatacgtacatttctcattttcacttgtttactgtgaattaagcggaaattggcgtggaaagagtttgtgttttccctgaaataaagagcgtgcttgcgtgtatgaggggaaaagaagtttgctgcagtcttctgttttgttgttgtgtcaaccttgacttacgcatctccttcacttcttttcattttcgctctattcctccgctcctttatctctcttttcgccttgcacctttttgtgcttggcgctcatttgacattttgctcaaacatgttgcgtttttcatgtgtgtgtggctgtgtgtgcgttcgtgcttgtgaaagaaaatagtgcaaaacggcaattgaatcggaaatccaagtcgtacacctcattcctttataatccaaaacacaacaacaaatatctgttaatgcgcgcgcgctctgtttgggtttccttttgttttttccgttctttgcgctgttgccagttgaaagtttctgtaaaattggcttggctcagctgacaagtgcagttagattgcgaaaatgcgaaaaagagactgagaatattcgaggaaacgagcgcgacggagaaccttaaaatcagaattgaaactctcaatcgacgcgtagcaaacgcatgtgtattctctacgttagttttttgtgttccggaattcctgttctattttataatactcaaccacacgttacaagttacttttgtcaatccattgcagtttattaaacacgctgacgtacacgtttgaacccaagctgtaagcaatcgacgccttttgagccacaaaaaaacattctacacaaacgactaactcaacgataagtgaacgaaagaggagcaaaaggaggaagcaggaggcggaggaggaggaggagcaccacccatagtggtggccacctgctgctccagaagctccacaaacatctgccgcaatgaaggtggatacggtgaagctgaagaagggctcctctgagctaacggccgagtgccgcgagcttattgatgagctgaccaagcgacgaactcgggccgaactcctcgagttcctcgacaccgtccacgtctggatctatggaaagtgcgagctgtatcactggatcgagatcctcgaccgcttcgacaagatcctcgaggaggcatctcgccatgtcaacggcaacgagttcgtgctgcagtgcgacaccaacttccaggaaacggtaaggacaacggttagtgttcacggtgtatcattgaaaaagtctttaggtttccacggattcattcgatttattagatatctgtatcttttaatctatgaaaaaaaaaaagaataacagaataataatctatgttgaaaagaataacagaattcaaaaagcccgcatgagaggaactatttttgacctaatgcagtccctttatataaactgtatgctcttcaaaacgttgttaaaaaattgaatttgctcttattccgagaatgtgaaagccaaaagaccttgaatttgggttaatacaaatatacatctatatttccatttatccttctcaggatgtcacactactgctgcacgtactcaactttaccacactgctgatcgagcactcgttctcgcgtcacctgtacaactccatcgaacatctgacggtgctgctctcttctcagaacatggacattgtcctggccgtcctcaatctgctttacatgttctccaagcgcagcaactttatacctcgccttccgttcgagaagaaggagctattgatcgtcaaactcttcaacatagccgaggtgggtcatattattggttgtggtggattttcggtgttttttatgataaattgcatactttttttttagcgctggggcgatcctaattatggcctgtcgctcaaggactgctgcattggcgagccaaagctggaattcctctaccagctgtgtatcgactatgtggacgagcatggtcacgccgctcagctagaaatcccggacatgatggacctctgccacacggcatcagctcccgaggtgatcaaaacgattgccggacagatctcaaagcccagtgaggcaatcaaggtgggttttcacaaattattcacttcaatgtatataaattaaagaacgtcttctatagatgcgcattgcccatcgggtgcgcttgatctcaggcttcaacaactacaaactgcgacttcagttcgtccaggcgcgccttcaggctgtctccattctgatctactcaaatgccctgcaggacaacacggacaaggtgttatatgccggttttggcgaagagctgtgcgagctgattgacaaagaggacgtacatctcgtagagataagggcggcagttctccgcaccctcacatcgatgctgcacttcgaccgcaatccgaatgtgccaaggtaagcggattggctgcgtctttgatgtctgtgtcttatattccccgataattgctttccttcatttgttttctgtgcagcagggccgggtcgcgtctgatgaagatcgttcactacacaggagccgagcggcagggcgggacgctgccgctgctggttcgtgactgcatcgataatctaaccacccacgggttaaccgagcgttacccgctcatattggccacctcgcttttctctttgctgtaccacctggcgagctatgaaatgggcggcactgctctggttaaaagcggcatgatgcaatccctactgtgcgttatcagctggccaggagtagatcttgagcacatcacgttcgtgacacgggccgtgcgggtgatcgatttgatcaccaacatcgatatagcccgctttcatcagaacaacggacttaacgtgttcattgaccggctggagaaggagataaagagctgctgcaaggcattggctgacattggcatcacgctgaaggagtcgacactccgcgacgatcacaagttggacacctcgctggaccacgttgacgaggatgtggaaggtgcgtagtgataaaagcggtttctaacaattaaactctttttcatgttctgtaatcacatgatataacatatcatgatatcacagatataacactgtgtataatgccttctttggttacccttgcccccctttcagatggttccggagagaacgcatccgtgaccagtggaaatgcatcaccgcgtcgcgataactccagtgatggcgcaactggtgccggcagcatcgtatacagagcttaccacgagcatattggtggcgctggatcaggagcgggactcctggacattggtggagcacgcagctcgttaagcggcggatcatcaggtacatccggaatgggtgcgggatcaatcaacagagatgggagtgctgctcgcccgccggctattatgtatcccacaaatagctactacgcccgtccactggccgaacgcaaggcggagctctcttcgcagctgcctagcagcctggcgccgaaaaagccgtcctgcgtcactcagcgagcggcgctacttaagtcaatgctaaacttcttgaagaagagcatccaggatcatgctcactttagcaacatgcgcaacatcatggagactagtctgacccaatcgctgcgccatatcatcgccaatgcggaatactacggaccctcgctgtttctcttggccaccgatgtggtcactgtgtacgtgtttaatgaaccatcgctgctatcttcgctgcaggatctgggcattaccagtgtcatgctaaaggcgctgctccagaaggatgtgccagcaacccgggaggtgctgggatccctgcccaacgtattttccgctttgtgtctaaatgagcgcggattgttcgagttcctttcctacgatccgttcgacaaggtgctcaaggtgctgctttcgccggactacttggtggccatgcgacgccgccgctcctcggatccgctgggcgatacagcaaccaacttgggcaatgccatggatgatttgatcaaacaccatccctacttgcgggccgatgccacggaggcgattgttaggctcttaaatgagctggttcgccttggctctgatcccagcttcatttgctggcgggcgaacaaggaaagcagtggctctggctccggttccgggagccatggcggcggccatcacgtggcctcaactccatcgcccatggtcatggtagctggcacgggaagtgcttcatcggtcctccagggtgcagcggatacaaacgatagcagcggagatgatgacgacgatgatgacgaaatgagctcagcatcacagcagcagcagcagcccacgacaccgggccaaggtggaggaccaagcacaccaaggacacagcaggcgggtggggttgttggatccggagctggagctacaggcacgccggcagccgcatcgcaagccgttaaagtagtgacgccaccggagagggaggccatccctctcatcgactacattctcaatgtgatgaagtttatagaggcgatattcagcaacagtcctaacggcgatcactgtcgcgagtttgtgctccatgggggtctgaagcccattctgcagctgttgtcgctgcccaatcttccagtggattcgccggtgtccaccacctcccaagcggtggccaatgtctgcaaggccatactcagccaggcgcaagaaaccaaggttctggatgtagcactcaagcagctcgcggacattgtggcccagttgaagccactgatcaagcacttcacttttcccggcggcagtgtcctgctggcggagctggtctgctgtcagcggctggaggatggctttgccaacgccgaatatacacccatcttgcacaacatgagttttgtgcacggctacgtggtgatgctagtgcatctctgccgaaatgcctccaacgacatgcgaacgattcttttgaagcggtggggtgtcaatcgcgagaccggcgtccaattgttgcagcagctcgtgcagctgtatatctcactggtgtgggagagcaccatactgctgaatttatgttccgatgaacccacccagcatccggatcttatctgggatgagatcgcagcccaaatgtcagcggcagctggaactgcggatcccctaaccgaggcggagctctcaaggaaactggaacgcgctgcggaattccgtacaaagtatacacccgaggagcagttccgatacatcaaatccctgctggcggcgagctcccggctgggaagagcccttgctgagctactgggcacattggtgaaactatcggtgggatcaccacaaacacggcagcgtcgcatcaatgatttgatcagtaatatcaccaaagttcctacaccagaagcgcgggaaatagcccgtatcctcagctcgatccttgtgaatggatttagtcacgagagcattctgcccaagcctgtgccgaaactaaagctcacctttctcatttgctctgtgggattcacgggcccaatgctgttcgacgacaaacgcagcgccttccatctaatgatatcgcaattctgcgctgagaacggactaaaggccttctttgagatgttctattgggccctgtcgctggataatgtatcccaaaaatttgagttcgatcagtgggcttccatggaggatttgatgcaatcccatgaggatgacaaacgtgattgtccggagggcacgggcgagtttctcgatgcatggctgcagctgctcgagaagatggtcaatcctcgagccatgttggactcgccgtacacgatgagtccccgtctaaattacatgcccgactcggtcccatttgagccggtcttctacctaatacacatccaccagctagccatgcaagcactgcgcagaatttgggcacgacgcccgattcccaactatggaccgagcatgtttgagaccatgattctcatcctaaagcatctgatcaagtcacaccagacgctgcttgatcgctatcacacgcgaatgaaggagatcaagttcgagaacctttacatccggagcacggatgatggtctgaatgcggatcacatcaagacgttgacggacatgggcttcatgcactaccatgtaatcgaagcgttgagaacaaatgcgtctttggaagaggcaaccgattacctgctaaacaacccagaggcaagttccttatcgacgactggtggtcagtcgagtagctcagctccaccgccgccgccaccgccatcggcttcgacaatggacattgacgtggacgtgcccgcggatggggagtcgacgcaaagtaaatcctccacttcgcccaactctagctatgactacaagcaccttaaattgatgccgtcgctaatctttgatcgcttctgcgacgaagccatctcgagggcctttgaattcatggaggcaataccggatacggtcaacagtgctgctgatttgattgccgtgctgtacagacgccacaatcacctcaacaagcaggtctttgtcaccaactttgtgcgcaacatcatacagtgggtggacttcacattgcagctgtttgaaccagccaagacaaccggatcgaaggcctcacgcctagaggaatgcctaaccggaatgacagccacccggctgtttgtacgactcaagacatctacgctgctgcttgaggagaactacagtgatctacaccggcctcttgtggaggcgataaccgcccaggatgccatggtgtcgctggtcaagctgctggactgcatgagccagtggatgttggaacaatcgaccgaaacgaatactggccagcagcgtgcgacggtgccgcgttgggtgcaaaatctggtggatctaatcgatgccatcgatagcatcagccacatcctgcagcgcaaggccaacatgcgtgcagtaagcagcgatgtatggcgctggtacgacgcgtccacaggcaagtggaatgcctactcggaggccaacaacgaactcatccggaatgcctatgcggccggtgaacgctggctgtacatcaacattggacgccagcggtgcacagtgagcctgaactgcatgacgcaggtgagcgaagcatccggaacacatcgacctgtctgcccggccctgaaacttagcgaggccattacctctctaaacaatccggtagcgctccacaaggtagagcatatacttaatcgcgtggtgcgcactgcacccgacggatcaggaacagtgcatagcgatgagttgatttcactgcgacagctggtcaactttaccgatggccagcaaccacaacagtcggagaattctgcaaatccgagcgaggaggcgaccagtgaagacggcccagctgcagccaatagcggctctccgccagccacaatgacgacgcgcagcaagacgcggcagaagagcgcggctgctgcagcggctgccaagaacaagtctcagtcgggtggctcgccacccatacccaagcgcacccagaaaatcatactcaacgaggaacaggtgggccttagcaagttcgactgcggccgcatcattggcagcattgtggatctactgcagccatcacatcagatgcttaacgagacgaagctttcgctgctccgtctctgtgcgagattgacgcggaactacgataacgcccaggtgttcatccgacggggcggagtacgaatgctgctgcacttgcagcaggcatgcagtttcatgggttttcctacctatgcgaacattatactgcgtcacgttctggaggcgccgcccgtgctccaggaggccatggaacgcgtactgggcatgcgagcagctggtatagtgcctgtgggtcatcgcgaccttatctacgtgctcacccaggtgtcgtcagcggtgtcgcgcaatccgcagattttcgtggccgcagccaaggaaatgcttaagggcgagtatctaatcaacacgaacagcaccacgttggcagacgatgcccgtgtcatggtcaagtccaagtttggccagcaaccgacggcggcggctggcggtgccacgccacataaccagacgccgacaccaccgccagcggccaaggatgagctgaaggacgatccccaggtgcagtcatcggtggccgtgctcaaggaactgttgcatggactggtgcagccgtgctggcattacggcggcactggatctttggatcgcggacaaggcgctgccgagctattgcagccggatcagcctccaggcacggcgcagggatgccatgatgatgaggtgagttggtttccttggatttcggatctatctgcacaaagaagcagtttgtttactttactagccatgcagcatatgtagataaaatacttgactacttttggtttttttcaaagttttcaatacactaaatgtaaattttattagttatatttccgcttccaggaaacccccgcacccgtgtccagcaagaagcaatcttccagcggcggaggtgctgcagctgctggccaaactggccaggcgacggaaaagttcgagccatgctgttgcacctggcacataccgaccagtggacacacccatgccaagccgaccatctcgagggcaaccttgctgaaactgctggcggattcaacccgtgcctaccagtcgctggtgccgcgtgtcctcttgtcgcacgtttacacaccggcggacagtcccctgatctccgcacctcaacagacgttcttgggcgtgctccttgatcgcttcctgcccataacccaacggcatcatgtgcccgaggtcagcacaatgacccgcgtactgatctgctccctatcggactgctatcagcagcccggagtccaggtccatgtcgccgaggagctgcacgctgctgtcgccagagccctggcccagccggattcggccgagaagcacacgagattgcaggtcttgatgagccttttccccaatctcattgagtcgccaatgctgtacgacaaggtgcacatgcatcgcaacaatatgtaccgggtgctcctacgccagggcgtgatgacctatctgacaaaagtggcgcagtacaaggatctgtccaatcacaatacgctaagcacccttgcggccattctgcgaccgatggagatcctgctgcgattcagcgtgtccaccacgacgctgggctcgaagaggattctctttggcagtggcggccctggcggaccaaatgcgtctggcaatggcaataacactgccggcggcagcagtggcaacggaccaggatctggcaacacgtacgggaccattattaaccggcgactatatcctcgtctggcggcacgcactggtttcggttccgctatggagcgttccaatgctatgggtggagagcacgttctgcgagatatcatacggaatgtactgtcggatcggcgacatgccttcgagttcatcttcaattcggacgatatggccgtggactctgaggacgcagctgctcccggatctggagtgggtggaggtggctcaggagcgggcagtgtcggaggaggcgtgtctggatcagtatcgggtaatagttccgcagccgttatcgacgtagtcgaggagcgtagcaatggcggagataccaacgatcctccggcaaacgtgagctctgcatcatctggtgcaggacaatcctcgaccagtggcggcccagtgcgtccagtggtcaacttcgatcaattgtgggatgatttcctgcagagcgagggactgcgtctggcttcgcggagcggcggtggagccggttccggcagtggatccgttggagcaagctcatccgggcagcagaacggaagcaacaccacagccagttcgaccaactcaggtaacaactccgggatcggaaatcttcgcttgcgcaccaatcccgatgttgatgtaggcagtggcaatggtagcggtagcggcagcgggtccaacgcaggtgtggtcaacgacaatggaatcagcggcggcggtggaagtgatggtgcgtccacctcatcagacacgggagctccaggtggtgctcgtgatttgaacgcctcgctgcttggcgatgtcagtacctcagaatctgattcggatccttccacagagaacgacgagcgcaatgaggaggacgaagatgaggatgatgacgctcccgatgaggatgtggatgagcatagtgagacggatgtggatgaagagcgatcgcgccagtttatcgaggtcttcgatcacatctatgagccggaatcatctgaaacggcgtccaacgatgcagatgtggataacgatgatgatgatgacgaggacgatgtggacgacgacgatgatgacgacgaagacaacgacgatgatgttcgggaggaggtccaaagcgtcatggatgcagagatcgagaaccgaatcgatatcgctctcgctctggtgtcttcgaacaatcgtcccagacgcagtgcagcggttaatgcttctggcgatggttccgccaatcgaaccaatcccgatgacgaagtggacgatgaggacgacgatgtggatgctgatcccgatggagatccggacgtggatccaattagcggaccatcggcagcccaggcggaggcctatctgtacgagcgattgggcagcggtttaatgccaacaccgccggttggttttcgtgtgcgaatgaacagctccattgcccaaccacttgacattgatgtgaatggcggcaatgcgggaagtggaagcaatgcgggcgccacaggatcgtccggtggctctggccaaagatcttctacgggcggcacaacagccagtattggagcaattgcctctgccgcacttcgcccatcatctggttcgtggatggcaccggactttaatttcattagaatttcgggcggggatagctccatgggcagcggaccagctattggtggcaacgccaacggtggcgatatgaacgtattcataacgccctccatgtcactggagcgcgctggtggtgcacctggcagcggccagaccatgagtgagctgctgaacgaacaaccaacgggtgctggcggtggtggtggcggaggatcagcctccggcgtcggcggggtcggtgcaaacggtggcaccacgggacaacatccaaatgcaaccctctgcacgaacggagtgcggcgtcggttactctatctggaccagcagtactgtgtgtgcatgcccacgcatcagaaccccactgaagagacccagatggagactttcacacaggatggtgagtattctggtgcctttgccattaaatgaacatcttaattcgtgtatacacccatcgcagctcttcactggtggctagaagaggccacgctcctggacatggaaagccagacggacgcctgtctgtatgccgctcattttttgctgccacatctcatcaaggagctgaaagcagcgcaccagcagcgcaagcaggaggaagccgcccgccaatccacaacaccggcgtcgggttcgaatgcatctgcaacgtcctccagcactacgtcagttgtgggcacagcagcgcccacagcgacatcatcgattgcgtccggtttactggcgaacgccgtctctgcaggctcaggaagcagcagcttggtagtgccaccagtggcagcatctgccactggcggcacccggcgcagttcgattcctgtgctgatttcgtcaacacttggtcctagtagcgctagcagcgcgacaagtgctacgggaaatggtgccaccagcgatgccacgacaacaactggtggaccaactaggaatttctgtgagtactgatcgaatcatttaagcaaaaatgtactcaagtaaccatcttcttgcagcgtccgttgacagcaacgtctcctcggagacgcaaacgacaacccgaccgccacgccaacgcggtggattacgtcagcaaagtcaactgcccttcaacatttacgccgagattgatttaactaacgaacaggatagcgaaggtgacaggtccactagcacgacaacagggacagcagcggatggagctgaatcacagtcacagcataactcctcctctacggcggcacaggtggcggtgccacagcatcagcgccatccaccggtgccacttctaccgtccagcggaagaccatcgcgaccccacacgcgtcttgatgagacagagctgctcctcttgcaggtaacttgtgtgcagttaagatttttgtatatattctaattcgaattccgtcgtcattccagttgactgatcgccagatacgcaaccgcctgcaaggatccagcggacacactaattcctcgcgcacttcaggctcggcgctaattaacgcccggcccaatcgcgacttacccgcctgtctgcagcgtcatgaccacccggccggctccattttcccccgacccagtgcaaacagaacgccagctccgacgcttgtatccatgccgacgccaatgtctaatgcggcactggagcagctaaatgtcaccgctccggatgtggtgcgaacagacagaaactttgccttgccatcttccctggaggttgatgtggatgtgctgcctggcattgtggacttgccgcagcaggaagcgcaaccagaagacgatcagttgttgctgccaccacctccgccgccaccgccgagtgatacgacgccattggtccacgccgaggacgatctgtggcccggaacggtggtcagtgctggtactagagaggagtcatccgctccagcagtagccacagaaagcacagaggctgtaaacgagtcaaaccaaccggaaccgacgccagaaagcagcgaatctacatctccaaatccgcaggctccttcagcagaacccaccccattggaaccaggcgcagcagtagatgcctcagttggagcacagacgccagcaacaacagaggaggccgcctctactgctggagcgagtggaacaacagccaccataacggacatgagtcctgaggtgcgggctgctctcggggatctggaggtgcccgagggcgtggatccctccttccttgccgctctgcctagcgagatgcgcgaagaggttatccaagagcatctgcgcatgcagcgcatccgtcagcgagcgcagcagaatgccatccaaattgcccatgactcgctggtcgaggtcaacccagaattcctcgctgccctgccactaaatatacagtcggaggtgctgatgcagcagcgcatcgagcagcagcgacaggcggctcagactgccaatccggaggatcccgttgacacagctgctttcttccaaaacctgccagagaatctgcgacaagcggtaagtttcattccattcatgaaatgaatgaatccattcatgaataaagcttgtgagcaaactaaacctttacatcggttacaattttagatactcaccgacatggaggagtcacagatagccagtttgccgccggagttggctgccgaggcgcagttcctgcgtcgggactgggaatctcgcaacggcgcccgtatggacgctcatccgcccagcaatgccttatgtaagtgtggttatacttggtagcttgtaattactaacgatctctatttatttctttagcaaggttccagacaacgctccagagcctggacgacacacgttggcacagctccatttggtatgatgcgagtggcaatgcccagccgcaacaccatcagcatacaacgattgtgcatcaacatccccacgcacatcatgccccgaacatgggcaaaccactggctctgttgatgatggaggacgagaacattctgctcgatccggactcgctggccacactcctgctctttctgttcgtggaggatcaaaaggtgaacagcatgcgactgcatcgtgtcatacgcaacctgtgccaccacgagcccacccgcgactggatcatcagcgccctgattagcataattcagaagacgaacgaggacaacgcaaacttcggtgcgggccaggcgggtggcaagccagagtggctgaagctgcgtgtggacgctgcctttggctacaagagcaacatattcctgattaaccgattgtacgagggcagtgcccggagcatcagcatcaatccgcaggcggcacagatgatagtgcgcaactgtctggacctgctgttcgtgctggccaagcactatccgtccagctttgtgccctttaatcgcgatgtgaaggccaggcgtatattgagtgcggtatttggcatgccatcgcccaccgccggatcaggtggaggcgcaggatctggatctgcagcgtctggcggcttgacaggctacgatgacgtgccaccaggtggaactctggatttccgctcacgattctgtcgctatcaggtggttaatcggctacgtagcatattcgacgatcatcctgccccgaaaccatcagtgcccttggatgaagcaccctccacgtcgaaggcggcggcagcgaaggcagctgccacggccaaagtgtccactgctgggagccagaataagcactcggtgccgtaccagactaacgccaagaacttctgggatgttgtgctaaacatcgatcaacagacacaagtgcgattggccaatgtggcccagtttccgcttacctcgcaaccggcgtgggaatggcagccgaatacagcggattttctctcgttcagcgaatcaccattcggccagttgctggaaatgcttccctacaaggttatatgccgatcgccccatcttaccgatatgcttgtcaagctgctcgcctcgctcagcacagagctgccaaaggaggaggagctgttgccgctcagcgatcaaatgcccccactggtacccattggtccggtgcagagagcgggagcggcggcggcagcggcacatcccccaccaccacaaccaccagccgagaatacagcaacagcaacagaaattggtgacggtctggccgccaacattgaggagcaggcttctccggccagtggtaatcctgcatccggtgatagcaatgcgggagcgaagcgcacccagctgccaactttaagtgtggccctgccggtgacgccatcgaaaccgcgtcgaaagatctattcgaagaacttttcgcagcttcagctggtcattgaggtgctgacgcaccagtgcggcaccaccgagggcctggacaacgtagccaagctaattgtgaatctaacgcagtgctcgcaggcatctagtgccattttcattcagtacttgaccgctgcgatattgggattggccgaggaggtacgtcaagcgatacagatgctgctcaacgagattcgcatgtataacattcatcaaggcggggccggcaccacttcacaggcggcgtccacttccggggcagctgcagcaacagcatcatacgtacccacagtatccggagccagtctcttgccaaacttggccgtgcacgagggcataatgcaggatcgcttcaccgccgagcacgtgatcatctcggcaccaaagaatgccaagcccacctgcgagttgcagttgccgtcgatgaagaaactcatgtccaactcgtccgcccagccgtacttcctgcgaaccttgaagatcttcatgcaggtacgcgacatgtatgaggcgcagaacggtttgtccactggcggtggagtcgcttgtggtgccggcgacaacgacgacgatatcattgatattgagggtgatggtggtgcgtccggcggcagcagttcagatatggctcccgggtctgccagcacaatatctccaccgccacccatggaaaccaatcagatcgcacaagatggcgatgacgacgaggaggacgacgatgaggccagatctttcccaggagttggcaatcatgcagtggcaagcgctagcaagtcgaccaagcctactctgagtcagatcctctgcttggacgtgttgtggaacacgctcagcgagtgcctagtggcattggaggagtccaaggacgagtttgccgtcctggtgctgcaaccgaccgtggaggccttcttcctcatccacgcctcgcatcgcggtgcgtccaagaagtcgggtcgcagctttatgcctaacgctgcgggctttggactgcgtgcagccgccggcgccggtgcgatcggaggactgggagcagccgcaccatctgcccaggagtacagtccctttatggacgatgtcagcagcgccaacacgcccagttctgctagtttcgatggtgagtttaggaaatatgcaaaacattctccatataatcaatctgctacatttttaataacctaatcaccagatgagccgcgaatgcaagatgcatccacgaatacgccacttgtgaccaacccctcgaccagcacagcgatgagcgcgcacgaggcgcagctgaggcaggaccggcaaaaattcctacaattcgccgagaagcaccgcaccgtgcttaaccagatactgcgccagtcaccaactcatctctccgacggaccgtttgccgtgcttgtggaccacacacgcattcttgactttgatgtcaagcgcaagtacttccagacggagctggagcggctggacgagggcatacggcgtgaggagcacacggtcagtgttcgtcgcgtaaccgtgtttgaggattcgttccgtgtcctgtaccgtctgggtccggaggagtggaagaaccgcttctacatcgtctttgagggtaagttttcgaacaatagaaatgaataactagcgatgttcatacttgcgatctatctgccttacagatgaggaaggccaggacgctggcggcctgttgcgcgagtggtatgtgatcatatcgcgcgagatctttaatccgatgtatgccttgttctgcgtatcgccgggcgatcgcgtcacctacatgataaatccctccagccatgctaaccccaatcacctgagctacttcaagtttgtcggccgcgtaattggtaagtctcttagatactccttctatatcaagcgttctataatcccttcgatcttatttaatagccaaggctgtgcacgacaacaagttgctggagtgctacttcactcgctcattttacaagcacatcctgggcaagcaggtaaagcacacggacatggagtcgcaggactacgagttctacaagggtctcgactatctgatgaagaacgacatctccaccttgggctacgagctgaccttctccaccgaggtgcaggagttcggtgtcacccaaatccgggatctcaagccaaacggacgcgacaccgccgtgaccgaggagaacaagtttgagtatgtgcagcttgtgtgccagctcaagatgagcggctccattcgacagcagtaagtacacatatatttatattccatgctatggattttaaatcgtgctactccccacaacagattggacgcattccttgaaggcttctacgacattattccaaagcatttaatttcgatattcaacgaacaggaactggaacttctcatatccggcctgccggatattgacattgaagatctaaaggcgaacaccgagtaccacaagtacacctctaaatcggcgcaggtgagaccatgattgtgcatcttcctccatcctccatccctctctaaaccatgtattttttacccattcattagattcaatggttctggcgtgcactgcgtagctttgaccaagcggaccgcgccaagttcctgcaattcgtcactggcacatcgaaagtgccgctgcagggcttcggctcgctggagggcatgaacgggattcaaaagttccaaatccatcgggacgatcgatccactgatcgcttgccctgtgcacacacctggtgagtagggatccacaagtcgcatgaattgtttgcaatgtcatagaccgtattaacttacccatctctgattgcagcttcaaccaactggatctgcccatgtacaagtcatacgacaagctgcggagctgcctgctgaaggccatacacgagtgctccgagggctttggcttcgcctaaggtgcgacaactgtgacggcagcttcaagcaccagccggcagagccaccagtaaccaacaaaccatggacgcaacactattcctacaacgccctcaaatacacgggtgcaacgatgagaaatgcataattgatttgaattgaacagaacagaagagaacagaacagccactgcaaatttgcgatagcggcaacagaaactgcatacataaacagtacatatagttatatagtatatataaaaatgttgaattaattattaattttcgcgcctatatatatatacaatatatattttcttaaattttcaaaagaaaacggaagaaaactaaggaaacctaacaaaaaaaaatataaaatataaaactgatacagacgcgaaaagtatattcgatttaaaattctctgcgcaactcatctttttttttattaattttttggaatctatctctgtcgttttgcacatttttatcaaaagaaaaggatttatataaagaaaaaaaatacactgacacattttcatttacccaaacgcgaaaccgaatagaaaaggattaaacgtagtttatagatcgcaaatgcacataaacagattacacacttgggttacttgtttacttaagtgaatgtacgtaccgaagataaagggaagcaacagaaaaaatatttaaatggattaaagtattttgatgtaagagataagtccttatgttaatgcattttatgtttacctttgaaataatgagacgcagatgtaacttaaagaatgtggaataaagaataagctcatttatcacaataaattttcagaaatcacttcacatgctcattataaatgcggctggaaaggatgggtacgccatatatataaataaatacatatataaggtcttaatgtcgatctcatttaatttgggcgcctttcaatttgaaattcgattctatcgcaacgggcaacgacagatcgatatctcatgcacagcaaaccgatcgacattatcg

SEQ ID NO: 17960 - DNA, 15009 bp, DROSOPHILA
atgaaggtggatacggtgaagctgaagaagggctcctctgagctaacggccgagtgccgcgagcttattgatgagctgaccaagcgacgaactcgggccgaactcctcgagttcctcgacaccgtccacgtctggatctatggaaagtgcgagctgtatcactggatcgagatcctcgaccgcttcgacaagatcctcgaggaggcatctcgccatgtcaacggcaacgagttcgtgctgcagtgcgacaccaacttccaggaaacggatgtcacactactgctgcacgtactcaactttaccacactgctgatcgagcactcgttctcgcgtcacctgtacaactccatcgaacatctgacggtgctgctctcttctcagaacatggacattgtcctggccgtcctcaatctgctttacatgttctccaagcgcagcaactttatacctcgccttccgttcgagaagaaggagctattgatcgtcaaactcttcaacatagccgagcgctggggcgatcctaattatggcctgtcgctcaaggactgctgcattggcgagccaaagctggaattcctctaccagctgtgtatcgactatgtggacgagcatggtcacgccgctcagctagaaatcccggacatgatggacctctgccacacggcatcagctcccgaggtgatcaaaacgattgccggacagatctcaaagcccagtgaggcaatcaagatgcgcattgcccatcgggtgcgcttgatctcaggcttcaacaactacaaactgcgacttcagttcgtccaggcgcgccttcaggctgtctccattctgatctactcaaatgccctgcaggacaacacggacaaggtgttatatgccggttttggcgaagagctgtgcgagctgattgacaaagaggacgtacatctcgtagagataagggcggcagttctccgcaccctcacatcgatgctgcacttcgaccgcaatccgaatgtgccaagcagggccgggtcgcgtctgatgaagatcgttcactacacaggagccgagcggcagggcgggacgctgccgctgctggttcgtgactgcatcgataatctaaccacccacgggttaaccgagcgttacccgctcatattggccacctcgcttttctctttgctgtaccacctggcgagctatgaaatgggcggcactgctctggttaaaagcggcatgatgcaatccctactgtgcgttatcagctggccaggagtagatcttgagcacatcacgttcgtgacacgggccgtgcgggtgatcgatttgatcaccaacatcgatatagcccgctttcatcagaacaacggacttaacgtgttcattgaccggctggagaaggagataaagagctgctgcaaggcattggctgacattggcatcacgctgaaggagtcgacactccgcgacgatcacaagttggacacctcgctggaccacgttgacgaggatgtggaagatggttccggagagaacgcatccgtgaccagtggaaatgcatcaccgcgtcgcgataactccagtgatggcgcaactggtgccggcagcatcgtatacagagcttaccacgagcatattggtggcgctggatcaggagcgggactcctggacattggtggagcacgcagctcgttaagcggcggatcatcaggtacatccggaatgggtgcgggatcaatcaacagagatgggagtgctgctcgcccgccggctattatgtatcccacaaatagctactacgcccgtccactggccgaacgcaaggcggagctctcttcgcagctgcctagcagcctggcgccgaaaaagccgtcctgcgtcactcagcgagcggcgctacttaacaacatgcgcaacatcatggagactagtctgacccaatcgctgcgccatatcatcgccaatgcggaatactacggaccctcgctgtttctcttggccaccgatgtggtcactgtgtacgtgtttaatgaaccatcgctgctatcttcgctgcaggatctgggcattaccagtgtcatgctaaaggcgctgctccagaaggatgtgccagcaacccgggaggtgctgggatccctgcccaacgtattttccgctttgtgtctaaatgagcgcggattgttcgagttcctttcctacgatccgttcgacaaggtgctcaaggtgctgctttcgccggactacttggtggccatgcgacgccgccgctcctcggatccgctgggcgatacagcaaccaacttgggcaatgccatggatgatttgatcaaacaccatccctacttgcgggccgatgccacggaggcgattgttaggctcttaaatgagctggttcgccttggctctgatcccagcttcatttgctggcgggcgaacaaggaaagcagtggctctggctccggttccgggagccatggcggcggccatcacgtggcctcaactccatcgcccatggtcatggtagctggcacgggaagtgcttcatcggtcctccagggtgcagcggatacaaacgatagcagcggagatgatgacgacgatgatgacgaaatgagctcagcatcacagcagcagcagcagcccacgacaccgggccaaggtggaggaccaagcacaccaaggacacagcaggcgggtggggttgttggatccggagctggagctacaggcacgccggcagccgcatcgcaagccgttaaagtagtgacgccaccggagagggaggccatccctctcatcgactacattctcaatgtgatgaagtttatagaggcgatattcagcaacagtcctaacggcgatcactgtcgcgagtttgtgctccatgggggtctgaagcccattctgcagctgttgtcgctgcccaatcttccagtggattcgccggtgtccaccacctcccaagcggtggccaatgtctgcaaggccatactcagccaggcgcaagaaaccaaggttctggatgtagcactcaagcagctcgcggacattgtggcccagttgaagccactgatcaagcacttcacttttcccggcggcagtgtcctgctggcggagctggtctgctgtcagcggctggaggatggctttgccaacgccgaatatacacccatcttgcacaacatgagttttgtgcacggctacgtggtgatgctagtgcatctctgccgaaatgcctccaacgacatgcgaacgattcttttgaagcggtggggtgtcaatcgcgagaccggcgtccaattgttgcagcagctcgtgcagctgtatatctcactggtgtgggagagcaccatactgctgaatttatgttccgatgaacccacccagcatccggatcttatctgggatgagatcgcagcccaaatgtcagcggcagctggaactgcggatcccctaaccgaggcggagctctcaaggaaactggaacgcgctgcggaattccgtacaaagtatacacccgaggagcagttccgatacatcaaatccctgctggcggcgagctcccggctgggaagagcccttgctgagctactgggcacattggtgaaactatcggtgggatcaccacaaacacggcagcgtcgcatcaatgatttgatcagtaatatcaccaaagttcctacaccagaagcgcgggaaatagcccgtatcctcagctcgatccttgtgaatggatttagtcacgagagcattctgcccaagcctgtgccgaaactaaagctcacctttctcatttgctctgtgggattcacgggcccaatgctgttcgacgacaaacgcagcgccttccatctaatgatatcgcaattctgcgctgagaacggactaaaggccttctttgagatgttctattgggccctgtcgctggataatgtatcccaaaaatttgagttcgatcagtgggcttccatggaggatttgatgcaatcccatgaggatgacaaacgtgattgtccggagggcacgggcgagtttctcgatgcatggctgcagctgctcgagaagatggtcaatcctcgagccatgttggactcgccgtacacgatgagtccccgtctaaattacatgcccgactcggtcccatttgagccggtcttctacctaatacacatccaccagctagccatgcaagcactgcgcagaatttgggcacgacgcccgattcccaactatggaccgagcatgtttgagaccatgattctcatcctaaagcatctgatcaagtcacaccagacgctgcttgatcgctatcacacgcgaatgaaggagatcaagttcgagaacctttacatccggagcacggatgatggtctgaatgcggatcacatcaagacgttgacggacatgggcttcatgcactaccatgtaatcgaagcgttgagaacaaatgcgtctttggaagaggcaaccgattacctgctaaacaacccagaggcaagttccttatcgacgactggtggtcagtcgagtagctcagctccaccgccgccgccaccgccatcggcttcgacaatggacattgacgtggacgtgcccgcggatggggagtcgacgcaaagtaaatcctccacttcgcccaactctagctatgactacaagcaccttaaattgatgccgtcgctaatctttgatcgcttctgcgacgaagccatctcgagggcctttgaattcatggaggcaataccggatacggtcaacagtgctgctgatttgattgccgtgctgtacagacgccacaatcacctcaacaagcaggtctttgtcaccaactttgtgcgcaacatcatacagtgggtggacttcacattgcagctgtttgaaccagccaagacaaccggatcgaaggcctcacgcctagaggaatgcctaaccggaatgacagccacccggctgtttgtacgactcaagacatctacgctgctgcttgaggagaactacagtgatctacaccggcctcttgtggaggcgataaccgcccaggatgccatggtgtcgctggtcaagctgctggactgcatgagccagtggatgttggaacaatcgaccgaaacgaatactggccagcagcgtgcgacggtgccgcgttgggtgcaaaatctggtggatctaatcgatgccatcgatagcatcagccacatcctgcagcgcaaggccaacatgcgtgcagtaagcagcgatgtatggcgctggtacgacgcgtccacaggcaagtggaatgcctactcggaggccaacaacgaactcatccggaatgcctatgcggccggtgaacgctggctgtacatcaacattggacgccagcggtgcacagtgagcctgaactgcatgacgcaggtgagcgaagcatccggaacacatcgacctgtctgcccggccctgaaacttagcgaggccattacctctctaaacaatccggtagcgctccacaaggtagagcatatacttaatcgcgtggtgcgcactgcacccgacggatcaggaacagtgcatagcgatgagttgatttcactgcgacagctggtcaactttaccgatggccagcaaccacaacagtcggagaattctgcaaatccgagcgaggaggcgaccagtgaagacggcccagctgcagccaatagcggctctccgccagccacaatgacgacgcgcagcaagacgcggcagaagagcgcggctgctgcagcggctgccaagaacaagtctcagtcgggtggctcgccacccatacccaagcgcacccagaaaatcatactcaacgaggaacaggtgggccttagcaagttcgactgcggccgcatcattggcagcattgtggatctactgcagccatcacatcagatgcttaacgagacgaagctttcgctgctccgtctctgtgcgagattgacgcggaactacgataacgcccaggtgttcatccgacggggcggagtacgaatgctgctgcacttgcagcaggcatgcagtttcatgggttttcctacctatgcgaacattatactgcgtcacgttctggaggcgccgcccgtgctccaggaggccatggaacgcgtactgggcatgcgagcagctggtatagtgcctgtgggtcatcgcgaccttatctacgtgctcacccaggtgtcgtcagcggtgtcgcgcaatccgcagattttcgtggccgcagccaaggaaatgcttaagggcgagtatctaatcaacacgaacagcaccacgttggcagacgatgcccgtgtcatggtcaagtccaagtttggccagcaaccgacggcggcggctggcggtgccacgccacataaccagacgccgacaccaccgccagcggccaaggatgagctgaaggacgatccccaggtgcagtcatcggtggccgtgctcaaggaactgttgcatggactggtgcagccgtgctggcattacggcggcactggatctttggatcgcggacaaggcgctgccgagctattgcagccggatcagcctccaggcacggcgcagggatgccatgatgatgagatgacccgcgtactgatctgctccctatcggactgctatcagcagcccggagtccaggtccatgtcgccgaggagctgcacgctgctgtcgccagagccctggcccagccggattcggccgagaagcacacgagattgcaggtcttgatgagccttttccccaatctcattgagtcgccaatgctgtacgacaaggtgcacatgcatcgcaacaatatgtaccgggtgctcctacgccagggcgtgatgacctatctgacaaaagtggcgcagtacaaggatctgtccaatcacaatacgctaagcacccttgcggccattctgcgaccgatggagatcctgctgcgattcagcgtgtccaccacgacgctgggctcgaagaggattctctttggcagtggcggccctggcggaccaaatgcgtctggcaatggcaataacactgccggcggcagcagtggcaacggaccaggatctggcaacacgtacgggaccattattaaccggcgactatatcctcgtctggcggcacgcactggtttcggttccgctatggagcgttccaatgctatgggtggagagcacgttctgcgagatatcatacggaatgtactgtcggatcggcgacatgccttcgagttcatcttcaattcggacgatatggccgtggactctgaggacgcagctgctcccggatctggagtgggtggaggtggctcaggagcgggcagtgtcggaggaggcgtgtctggatcagtatcgggtaatagttccgcagccgttatcgacgtagtcgaggagcgtagcaatggcggagataccaacgatcctccggcaaacgtgagctctgcatcatctggtgcaggacaatcctcgaccagtggcggcccagtgcgtccagtggtcaacttcgatcaattgtgggatgatttcctgcagagcgagggactgcgtctggcttcgcggagcggcggtggagccggttccggcagtggatccgttggagcaagctcatccgggcagcagaacggaagcaacaccacagccagttcgaccaactcaggtaacaactccgggatcggaaatcttcgcttgcgcaccaatcccgatgttgatgtaggcagtggcaatggtagcggtagcggcagcgggtccaacgcaggtgtggtcaacgacaatggaatcagcggcggcggtggaagtgatggtgcgtccacctcatcagacacgggagctccaggtggtgctcgtgatttgaacgcctcgctgcttggcgatgtcagtacctcagaatctgattcggatccttccacagagaacgacgagcgcaatgaggaggacgaagatgaggatgatgacgctcccgatgaggatgtggatgagcatagtgagacggatgtggatgaagagcgatcgcgccagtttatcgaggtcttcgatcacatctatgagccggaatcatctgaaacggcgtccaacgatgcagatgtggataacgatgatgatgatgacgaggacgatgtggacgacgacgatgatgacgacgaagacaacgacgatgatgttcgggaggaggtccaaagcgtcatggatgcagagatcgagaaccgaatcgatatcgctctcgctctggtgtcttcgaacaatcgtcccagacgcagtgcagcggttaatgcttctggcgatggttccgccaatcgaaccaatcccgatgacgaagtggacgatgaggacgacgatgtggatgctgatcccgatggagatccggacgtggatccaattagcggaccatcggcagcccaggcggaggcctatctgtacgagcgattgggcagcggtttaatgccaacaccgccggttggttttcgtgtgcgaatgaacagctccattgcccaaccacttgacattgatgtgaatggcggcaatgcgggaagtggaagcaatgcgggcgccacaggatcgtccggtggctctggccaaagatcttctacgggcggcacaacagccagtattggagcaattgcctctgccgcacttcgcccatcatctggttcgtggatggcaccggactttaatttcattagaatttcgggcggggatagctccatgggcagcggaccagctattggtggcaacgccaacggtggcgatatgaacgtattcataacgccctccatgtcactggagcgcgctggtggtgcacctggcagcggccagaccatgagtgagctgctgaacgaacaaccaacgggtgctggcggtggtggtggcggaggatcagcctccggcgtcggcggggtcggtgcaaacggtggcaccacgggacaacatccaaatgcaaccctctgcacgaacggagtgcggcgtcggttactctatctggaccagcagtactgtgtgtgcatgcccacgcatcagaaccccactgaagagacccagatggagactttcacacaggatgctcttcactggtggctagaagaggccacgctcctggacatggaaagccagacggacgcctgtctgtatgccgctcattttttgctgccacatctcatcaaggagctgaaagcagcgcaccagcagcgcaagcaggaggaagccgcccgccaatccacaacaccggcgtcgggttcgaatgcatctgcaacgtcctccagcactacgtcagttgtgggcacagcagcgcccacagcgacatcatcgattgcgtccggtttactggcgaacgccgtctctgcaggctcaggaagcagcagcttggtagtgccaccagtggcagcatctgccactggcggcacccggcgcagttcgattcctgtgctgatttcgtcaacacttggtcctagtagcgctagcagcgcgacaagtgctacgggaaatggtgccaccagcgatgccacgacaacaactggtggaccaactaggaatttctcgtccgttgacagcaacgtctcctcggagacgcaaacgacaacccgaccgccacgccaacgcggtggattacgtcagcaaagtcaactgcccttcaacatttacgccgagattgatttaactaacgaacaggatagcgaaggtgacaggtccactagcacgacaacagggacagcagcggatggagctgaatcacagtcacagcataactcctcctctacggcggcacaggtggcggtgccacagcatcagcgccatccaccggtgccacttctaccgtccagcggaagaccatcgcgaccccacacgcgtcttgatgagacagagctgctcctcttgcagttgactgatcgccagatacgcaaccgcctgcaaggatccagcggacacactaattcctcgcgcacttcaggctcggcgctaattaacgcccggcccaatcgcgacttacccgcctgtctgcagcgtcatgaccacccggccggctccattttcccccgacccagtgcaaacagaacgccagctccgacgcttgtatccatgccgacgccaatgtctaatgcggcactggagcagctaaatgtcaccgctccggatgtggtgcgaacagacagaaactttgccttgccatcttccctggaggttgatgtggatgtgctgcctggcattgtggacttgccgcagcaggaagcgcaaccagaagacgatcagttgttgctgccaccacctccgccgccaccgccgagtgatacgacgccattggtccacgccgaggacgatctgtggcccggaacggtggtcagtgctggtactagagaggagtcatccgctccagcagtagccacagaaagcacagaggctgtaaacgagtcaaaccaaccggaaccgacgccagaaagcagcgaatctacatctccaaatccgcaggctccttcagcagaacccaccccattggaaccaggcgcagcagtagatgcctcagttggagcacagacgccagcaacaacagaggaggccgcctctactgctggagcgagtggaacaacagccaccataacggacatgagtcctgaggtgcgggctgctctcggggatctggaggtgcccgagggcgtggatccctccttccttgccgctctgcctagcgagatgcgcgaagaggttatccaagagcatctgcgcatgcagcgcatccgtcagcgagcgcagcagaatgccatccaaattgcccatgactcgctggtcgaggtcaacccagaattcctcgctgccctgccactaaatatacagtcggaggtgctgatgcagcagcgcatcgagcagcagcgacaggcggctcagactgccaatccggaggatcccgttgacacagctgctttcttccaaaacctgccagagaatctgcgacaagcgatactcaccgacatggaggagtcacagatagccagtttgccgccggagttggctgccgaggcgcagttcctgcgtcgggactgggaatctcgcaacggcgcccgtatggacgctcatccgcccagcaatgccttatcaaggttccagacaacgctccagagcctggacgacacacgttggcacagctccatttggtatgatgcgagtggcaatgcccagccgcaacaccatcagcatacaacgattgtgcatcaacatccccacgcacatcatgccccgaacatgggcaaaccactggctctgttgatgatggaggacgagaacattctgctcgatccggactcgctggccacactcctgctctttctgttcgtggaggatcaaaaggtgaacagcatgcgactgcatcgtgtcatacgcaacctgtgccaccacgagcccacccgcgactggatcatcagcgccctgattagcataattcagaagacgaacgaggacaacgcaaacttcggtgcgggccaggcgggtggcaagccagagtggctgaagctgcgtgtggacgctgcctttggctacaagagcaacatattcctgattaaccgattgtacgagggcagtgcccggagcatcagcatcaatccgcaggcggcacagatgatagtgcgcaactgtctggacctgctgttcgtgctggccaagcactatccgtccagctttgtgccctttaatcgcgatgtgaaggccaggcgtatattgagtgcggtatttggcatgccatcgcccaccgccggatcaggtggaggcgcaggatctggatctgcagcgtctggcggcttgacaggctacgatgacgtgccaccaggtggaactctggatttccgctcacgattctgtcgctatcaggtggttaatcggctacgtagcatattcgacgatcatcctgccccgaaaccatcagtgcccttggatgaagcaccctccacgtcgaaggcggcggcagcgaaggcagctgccacggccaaagtgtccactgctgggagccagaataagcactcggtgccgtaccagactaacgccaagaacttctgggatgttgtgctaaacatcgatcaacagacacaagtgcgattggccaatgtggcccagtttccgcttacctcgcaaccggcgtgggaatggcagccgaatacagcggattttctctcgttcagcgaatcaccattcggccagttgctggaaatgcttccctacaaggttatatgccgatcgccccatcttaccgatatgcttgtcaagctgctcgcctcgctcagcacagagctgccaaaggaggaggagctgttgccgctcagcgatcaaatgcccccactggtacccattggtccggtgcagagagcgggagcggcggcggcagcggcacatcccccaccaccacaaccaccagccgagaatacagcaacagcaacagaaattggtgacggtctggccgccaacattgaggagcaggcttctccggccagtggtaatcctgcatccggtgatagcaatgcgggagcgaagcgcacccagctgccaactttaagtgtggccctgccgatctattcgaagaacttttcgcagcttcagctggtcattgaggtgctgacgcaccagtgcggcaccaccgagggcctggacaacgtagccaagctaattgtgaatctaacgcagtgctcgcaggcatctagtgccattttcattcagtacttgaccgctgcgatattgggattggccgaggaggtacgtcaagcgatacagatgctgctcaacgagattcgcatgtataacattcatcaaggcggggccggcaccacttcacaggcggcgtccacttccggggcagctgcagcaacagcatcatacgtacccacagtatccggagccagtctcttgccaaacttggccgtgcacgagggcataatgcaggatcgcttcaccgccgagcacgtgatcatctcggcaccaaagaatgccaagcccacctgcgagttgcagttgccgtcgatgaagaaactcatgtccaactcgtccgcccagccgtacttcctgcgaaccttgaagatcttcatgcaggtacgcgacatgtatgaggcgcagaacggtttgtccactggcggtggagtcgcttgtggtgccggcgacaacgacgacgatatcattgatattgagggtgatggtggtgcgtccggcggcagcagttcagatatggctcccgggtctgccagcacaatatctccaccgccacccatggaaaccaatcagatcgcacaagatggcgatgacgacgaggaggacgacgatgaggccagatctttcccaggagttggcaatcatgcagtggcaagcgctagcaagtcgaccaagcctactctgagtcagatcctctgcttggacgtgttgtggaacacgctcagcgagtgcctagtggcattggaggagtccaaggacgagtttgccgtcctggtgctgcaaccgaccgtggaggccttcttcctcatccacgcctcgcatcgcggtgcgtccaagaagtcgggtcgcagctttatgcctaacgctgcgggctttggactgcgtgcagccgccggcgccggtgcgatcggaggactgggagcagccgcaccatctgcccaggagtacagtccctttatggacgatgtcagcagcgccaacacgcccagttctgctagtttcgatgatgagccgcgaatgcaagatgcatccacgaatacgccacttgtgaccaacccctcgaccagcacagcgatgagcgcgcacgaggcgcagctgaggcaggaccggcaaaaattcctacaattcgccgagaagcaccgcaccgtgcttaaccagatactgcgccagtcaccaactcatctctccgacggaccgtttgccgtgcttgtggaccacacacgcattcttgactttgatgtcaagcgcaagtacttccagacggagctggagcggctggacgagggcatacggcgtgaggagcacacggtcagtgttcgtcgcgtaaccgtgtttgaggattcgttccgtgtcctgtaccgtctgggtccggaggagtggaagaaccgcttctacatcgtctttgaggatgaggaaggccaggacgctggcggcctgttgcgcgagtggtatgtgatcatatcgcgcgagatctttaatccgatgtatgccttgttctgcgtatcgccgggcgatcgcgtcacctacatgataaatccctccagccatgctaaccccaatcacctgagctacttcaagtttgtcggccgcgtaattgccaaggctgtgcacgacaacaagttgctggagtgctacttcactcgctcattttacaagcacatcctgggcaagcaggtaaagcacacggacatggagtcgcaggactacgagttctacaagggtctcgactatctgatgaagaacgacatctccaccttgggctacgagctgaccttctccaccgaggtgcaggagttcggtgtcacccaaatccgggatctcaagccaaacggacgcgacaccgccgtgaccgaggagaacaagtttgagtatgtgcagcttgtgtgccagctcaagatgagcggctccattcgacagcaattggacgcattccttgaaggcttctacgacattattccaaagcatttaatttcgatattcaacgaacaggaactggaacttctcatatccggcctgccggatattgacattgaagatctaaaggcgaacaccgagtaccacaagtacacctctaaatcggcgcagattcaatggttctggcgtgcactgcgtagctttgaccaagcggaccgcgccaagttcctgcaattcgtcactggcacatcgaaagtgccgctgcagggcttcggctcgctggagggcatgaacgggattcaaaagttccaaatccatcgggacgatcgatccactgatcgcttgccctgtgcacacacctgcttcaaccaactggatctgcccatgtacaagtcatacgacaagctgcggagctgcctgctgaaggccatacacgagtgctccgagggctttggcttcgcctaa

SEQ ID NO: 17961 - protein, 5002 aa, DROSOPHILA
MKVDTVKLKKGSSELTAECRELIDELTKRRTRAELLEFLDTVHVWIYGKCELYHWIEILDRFDKILEEASRHVNGNEFVLQCDTNFQETDVTLLLHVLNFTTLLIEHSFSRHLYNSIEHLTVLLSSQNMDIVLAVLNLLYMFSKRSNFIPRLPFEKKELLIVKLFNIAERWGDPNYGLSLKDCCIGEPKLEFLYQLCIDYVDEHGHAAQLEIPDMMDLCHTASAPEVIKTIAGQISKPSEAIKMRIAHRVRLISGFNNYKLRLQFVQARLQAVSILIYSNALQDNTDKVLYAGFGEELCELIDKEDVHLVEIRAAVLRTLTSMLHFDRNPNVPSRAGSRLMKIVHYTGAERQGGTLPLLVRDCIDNLTTHGLTERYPLILATSLFSLLYHLASYEMGGTALVKSGMMQSLLCVISWPGVDLEHITFVTRAVRVIDLITNIDIARFHQNNGLNVFIDRLEKEIKSCCKALADIGITLKESTLRDDHKLDTSLDHVDEDVEDGSGENASVTSGNASPRRDNSSDGATGAGSIVYRAYHEHIGGAGSGAGLLDIGGARSSLSGGSSGTSGMGAGSINRDGSAARPPAIMYPTNSYYARPLAERKAELSSQLPSSLAPKKPSCVTQRAALLNNMRNIMETSLTQSLRHIIANAEYYGPSLFLLATDVVTVYVFNEPSLLSSLQDLGITSVMLKALLQKDVPATREVLGSLPNVFSALCLNERGLFEFLSYDPFDKVLKVLLSPDYLVAMRRRRSSDPLGDTATNLGNAMDDLIKHHPYLRADATEAIVRLLNELVRLGSDPSFICWRANKESSGSGSGSGSHGGGHHVASTPSPMVMVAGTGSASSVLQGAADTNDSSGDDDDDDDEMSSASQQQQQPTTPGQGGGPSTPRTQQAGGVVGSGAGATGTPAAASQAVKVVTPPEREAIPLIDYILNVMKFIEAIFSNSPNGDHCREFVLHGGLKPILQLLSLPNLPVDSPVSTTSQAVANVCKAILSQAQETKVLDVALKQLADIVAQLKPLIKHFTFPGGSVLLAELVCCQRLEDGFANAEYTPILHNMSFVHGYVVMLVHLCRNASNDMRTILLKRWGVNRETGVQLLQQLVQLYISLVWESTILLNLCSDEPTQHPDLIWDEIAAQMSAAAGTADPLTEAELSRKLERAAEFRTKYTPEEQFRYIKSLLAASSRLGRALAELLGTLVKLSVGSPQTRQRRINDLISNITKVPTPEAREIARILSSILVNGFSHESILPKPVPKLKLTFLICSVGFTGPMLFDDKRSAFHLMISQFCAENGLKAFFEMFYWALSLDNVSQKFEFDQWASMEDLMQSHEDDKRDCPEGTGEFLDAWLQLLEKMVNPRAMLDSPYTMSPRLNYMPDSVPFEPVFYLIHIHQLAMQALRRIWARRPIPNYGPSMFETMILILKHLIKSHQTLLDRYHTRMKEIKFENLYIRSTDDGLNADHIKTLTDMGFMHYHVIEALRTNASLEEATDYLLNNPEASSLSTTGGQSSSSAPPPPPPPSASTMDIDVDVPADGESTQSKSSTSPNSSYDYKHLKLMPSLIFDRFCDEAISRAFEFMEAIPDTVNSAADLIAVLYRRHNHLNKQVFVTNFVRNIIQWVDFTLQLFEPAKTTGSKASRLEECLTGMTATRLFVRLKTSTLLLEENYSDLHRPLVEAITAQDAMVSLVKLLDCMSQWMLEQSTETNTGQQRATVPRWVQNLVDLIDAIDSISHILQRKANMRAVSSDVWRWYDASTGKWNAYSEANNELIRNAYAAGERWLYINIGRQRCTVSLNCMTQVSEASGTHRPVCPALKLSEAITSLNNPVALHKVEHILNRVVRTAPDGSGTVHSDELISLRQLVNFTDGQQPQQSENSANPSEEATSEDGPAAANSGSPPATMTTRSKTRQKSAAAAAAAKNKSQSGGSPPIPKRTQKIILNEEQVGLSKFDCGRIIGSIVDLLQPSHQMLNETKLSLLRLCARLTRNYDNAQVFIRRGGVRMLLHLQQACSFMGFPTYANIILRHVLEAPPVLQEAMERVLGMRAAGIVPVGHRDLIYVLTQVSSAVSRNPQIFVAAAKEMLKGEYLINTNSTTLADDARVMVKSKFGQQPTAAAGGATPHNQTPTPPPAAKDELKDDPQVQSSVAVLKELLHGLVQPCWHYGGTGSLDRGQGAAELLQPDQPPGTAQGCHDDEMTRVLICSLSDCYQQPGVQVHVAEELHAAVARALAQPDSAEKHTRLQVLMSLFPNLIESPMLYDKVHMHRNNMYRVLLRQGVMTYLTKVAQYKDLSNHNTLSTLAAILRPMEILLRFSVSTTTLGSKRILFGSGGPGGPNASGNGNNTAGGSSGNGPGSGNTYGTIINRRLYPRLAARTGFGSAMERSNAMGGEHVLRDIIRNVLSDRRHAFEFIFNSDDMAVDSEDAAAPGSGVGGGGSGAGSVGGGVSGSVSGNSSAAVIDVVEERSNGGDTNDPPANVSSASSGAGQSSTSGGPVRPVVNFDQLWDDFLQSEGLRLASRSGGGAGSGSGSVGASSSGQQNGSNTTASSTNSGNNSGIGNLRLRTNPDVDVGSGNGSGSGSGSNAGVVNDNGISGGGGSDGASTSSDTGAPGGARDLNASLLGDVSTSESDSDPSTENDERNEEDEDEDDDAPDEDVDEHSETDVDEERSRQFIEVFDHIYEPESSETASNDADVDNDDDDDEDDVDDDDDDDEDNDDDVREEVQSVMDAEIENRIDIALALVSSNNRPRRSAAVNASGDGSANRTNPDDEVDDEDDDVDADPDGDPDVDPISGPSAAQAEAYLYERLGSGLMPTPPVGFRVRMNSSIAQPLDIDVNGGNAGSGSNAGATGSSGGSGQRSSTGGTTASIGAIASAALRPSSGSWMAPDFNFIRISGGDSSMGSGPAIGGNANGGDMNVFITPSMSLERAGGAPGSGQTMSELLNEQPTGAGGGGGGGSASGVGGVGANGGTTGQHPNATLCTNGVRRRLLYLDQQYCVCMPTHQNPTEETQMETFTQDALHWWLEEATLLDMESQTDACLYAAHFLLPHLIKELKAAHQQRKQEEAARQSTTPASGSNASATSSSTTSVVGTAAPTATSSIASGLLANAVSAGSGSSSLVVPPVAASATGGTRRSSIPVLISSTLGPSSASSATSATGNGATSDATTTTGGPTRNFSSVDSNVSSETQTTTRPPRQRGGLRQQSQLPFNIYAEIDLTNEQDSEGDRSTSTTTGTAADGAESQSQHNSSSTAAQVAVPQHQRHPPVPLLPSSGRPSRPHTRLDETELLLLQLTDRQIRNRLQGSSGHTNSSRTSGSALINARPNRDLPACLQRHDHPAGSIFPRPSANRTPAPTLVSMPTPMSNAALEQLNVTAPDVVRTDRNFALPSSLEVDVDVLPGIVDLPQQEAQPEDDQLLLPPPPPPPPSDTTPLVHAEDDLWPGTVVSAGTREESSAPAVATESTEAVNESNQPEPTPESSESTSPNPQAPSAEPTPLEPGAAVDASVGAQTPATTEEAASTAGASGTTATITDMSPEVRAALGDLEVPEGVDPSFLAALPSEMREEVIQEHLRMQRIRQRAQQNAIQIAHDSLVEVNPEFLAALPLNIQSEVLMQQRIEQQRQAAQTANPEDPVDTAAFFQNLPENLRQAILTDMEESQIASLPPELAAEAQFLRRDWESRNGARMDAHPPSNALSRFQTTLQSLDDTRWHSSIWYDASGNAQPQHHQHTTIVHQHPHAHHAPNMGKPLALLMMEDENILLDPDSLATLLLFLFVEDQKVNSMRLHRVIRNLCHHEPTRDWIISALISIIQKTNEDNANFGAGQAGGKPEWLKLRVDAAFGYKSNIFLINRLYEGSARSISINPQAAQMIVRNCLDLLFVLAKHYPSSFVPFNRDVKARRILSAVFGMPSPTAGSGGGAGSGSAASGGLTGYDDVPPGGTLDFRSRFCRYQVVNRLRSIFDDHPAPKPSVPLDEAPSTSKAAAAKAAATAKVSTAGSQNKHSVPYQTNAKNFWDVVLNIDQQTQVRLANVAQFPLTSQPAWEWQPNTADFLSFSESPFGQLLEMLPYKVICRSPHLTDMLVKLLASLSTELPKEEELLPLSDQMPPLVPIGPVQRAGAAAAAAHPPPPQPPAENTATATEIGDGLAANIEEQASPASGNPASGDSNAGAKRTQLPTLSVALPIYSKNFSQLQLVIEVLTHQCGTTEGLDNVAKLIVNLTQCSQASSAIFIQYLTAAILGLAEEVRQAIQMLLNEIRMYNIHQGGAGTTSQAASTSGAAAATASYVPTVSGASLLPNLAVHEGIMQDRFTAEHVIISAPKNAKPTCELQLPSMKKLMSNSSAQPYFLRTLKIFMQVRDMYEAQNGLSTGGGVACGAGDNDDDIIDIEGDGGASGGSSSDMAPGSASTISPPPPMETNQIAQDGDDDEEDDDEARSFPGVGNHAVASASKSTKPTLSQILCLDVLWNTLSECLVALEESKDEFAVLVLQPTVEAFFLIHASHRGASKKSGRSFMPNAAGFGLRAAAGAGAIGGLGAAAPSAQEYSPFMDDVSSANTPSSASFDDEPRMQDASTNTPLVTNPSTSTAMSAHEAQLRQDRQKFLQFAEKHRTVLNQILRQSPTHLSDGPFAVLVDHTRILDFDVKRKYFQTELERLDEGIRREEHTVSVRRVTVFEDSFRVLYRLGPEEWKNRFYIVFEDEEGQDAGGLLREWYVIISREIFNPMYALFCVSPGDRVTYMINPSSHANPNHLSYFKFVGRVIAKAVHDNKLLECYFTRSFYKHILGKQVKHTDMESQDYEFYKGLDYLMKNDISTLGYELTFSTEVQEFGVTQIRDLKPNGRDTAVTEENKFEYVQLVCQLKMSGSIRQQLDAFLEGFYDIIPKHLISIFNEQELELLISGLPDIDIEDLKANTEYHKYTSKSAQIQWFWRALRSFDQADRAKFLQFVTGTSKVPLQGFGSLEGMNGIQKFQIHRDDRSTDRLPCAHTCFNQLDLPMYKSYDKLRSCLLKAIHECSEGFGFA

SEQ ID NO: 17962 - DNA, 3463 bp, DROSOPHILA
aaaagaaagaaggcgagttggttgaagaaacttttcaggtactgattgaagaggagcccatggacaaaactctgaatagagatgcgaaagcgcagctgagggaagatggaatagatgagaagtgtgtaccttcacaaaagattatcaaagtatcaaccaaactggatgatcagatttacatatgcgagctgtgcgggactcatgccacatcgaaacccactttccagcgccacatgagaaaacacagaggcgaacgaccatttggctgcaagtaaacctcgctcacagattacaactgtaggttcggtatgctgattccatattctctttttagggattgtgatgccaggtttctctctgctggcgaactacgtgcccaccaccgggtacatactggggagcaaccgtttgcctgtcgcttctgcgaaaagcggtatgtcagctacatgggccggctgatccacgagcggactcacaccaacgatcgaccctatgtgtgcgaagagtgtggcaagaagttcaccactgcctacgtcctaaagaaccacatggtcatccacacgggcgagaggaatttccgatgcgatatttgcgatcgctccttccagagaaaggcgcacctggtaacgcacaccagatccatgatgcacctccaaaatgtcaagaagcagaagtcatgaaggattaaatagctcaagctatgaaataataagatttacatgctccttgagataaaaagatacccaaaaggggactatcttatttttatcttatcgtatttttatgaatttaagttgtatactcaatatttgcaccacacctgtttctcaaaatgaaataaatgctaatgcttttaagtgtgtaggacacagaaaacaaaaaatttgtatagattgtttgattttaattagtagcagccgttacgatttagtggttttataagtcgccagtgctggacaacgtctcaggtggaaaagctagtgcgctgcttcgtggcaaatggcaaatcagttttgggtggctgtcttgtttacaattggaaatttactaattagaatcgagtaagctggtaaaatgctgcaaaatgtgtgccgcgtgtgtgccagcagcacggacaactcgaaatcgttgaaactatttaacagcggcgcctgcaaagtgctgcaacaaatcaatttgctcaccggtgttctggtaagcctaccctacgaaacacattaattccttcaattaaaatgttgtatcttatttggcagctgcaatgcgaacccggtttacccgactggatgtgcgagacctgccagacggatttgaaaagcgccatatcctttcgtgatcgctgcttgaggagtcagaagatctttgaagagtcgctggtcaggaatgaagaggacacattccgctcctcagttcgtcgcagtgcccgttcccaaagacagcggcatgaagacaccgctccaaagacgccagcaagtccgctggaggtaatgattaagctggagagcctgagcaatggcgatgaggaggatgatggcatcgatcacctggactcctgcaacgaagcagacatggagctggccattaaagcgatgtccagctctaccgaagatgatggaactacctcaccggtcagattgaaaagaacccgacgtcggggacttaagaaaggcgggaaaggtgaaaatcgcacaaaggttacgcttccagttttcttttgcgatcagtgcggcaacaatattacagggaagtcctccttcgaccgtcacctacgcaaacacagcggaattaggccctttcagtgcgagtaagaaaagctttagctcgtcaattgtacaatctgatagttaactgtgtaacattgctctcatgtagactctgccccgcccgcttcctgtcctccggtgagctgaaaggacaccaagtgatgcacactggagatcgcaagttccagtgtcgttactgtgaccgcacctacgtcaactacagtggtcgcctgcgtcacgagcggacccacacaaatgatcgaccctttatttgtgcgcagtgcggcaagagctttaccaattcctacatcctcaagaaccacatgcttatccacacgggcgagcgcctgttcaggctagtaaactatgataaatagtgcttaagttaatgatcacctagccgatcctttgcagatgtgagctgtgccatcgatcctttgcgcgacccacccacttgaagactcacttccgctctaacactcataagcacaacttggagaaatcgatggcagacgcgggtggagttcagctgtcaccatcccagtcagcggatcaggtcaaattcgtgacggaaaaggagccagaagcagaggcggatgcctttacgatagaagtgcctttgcccgcggagcaggagcaggatgagtctttgggcctggctgctctggaaacatccactctaatgtatagtacaaactagaccttaatgagtccatctcaacctttaaagccaaatatagttcacaatttgattatccgttttgattttttttgtaaaaattcctattttggtaatgcaaccgttttcaactaagagcttcttaagtgataccttttagggtttatcaaagattgtgtctgctttctgcatgtttcgtctgtgagcatttgaacgataatgggtagtaaggtgtgtgtagcgactgaataacttatcgcagaggtcgcacctgcaaatagaatagattattattattacacttaagtactatttcgagtacccgcttacctaaaagccttctccccggtatgcacgagcatgtggttcttaagaatataggatgttgtgaaggcattgttacactccttgcagacaaaaggtcgttcgttagtgtgagtccgctcgtgcttcaaccgagtgctgtagtcagaaaagctgcgggaacagtgtctgcacttgaagggcttttccccggtatgcttgcgaatgtgacgcttaagttccgccggcgtgcagaagcgatcctcacagaatcttaaatgaagcggattagttaggatcaatcttaagtagaattgccacttactcgcacccaaactccttgacgccgcgatgtcgcttacaatgcagtatgaatgatattcgatcttttatgtgatttccgcactcctcacaaaagaaggtcctattggagtcgcggggatttcgacgatttctcctttttttgggattctcagagtctgatttgagttcctgctttgcatctacttcagtatcgctttcgtaaataaggtaatccatttcactataatcaatatcgtcctcattattgggctcgtcttcgttgattttagattcatttagaatgtcctccactttaaaaccggagctttgaatgggcccttcattgagatcgtctaatcgctcgacttctatgcttatttctgccagatccagttccaactcctcctgctcaagg

SEQ ID NO: 17963 - DNA, 1268 bp, DROSOPHILA
tggcaaatcagttttgggtggctgtcttgtttacaattggaaatttactaattagaatcgagtaagctggtaaaatgctgcaaaatgtgtgccgcgtgtgtgccagcagcacggacaactcgaaatcgttgaaactatttaacagcggcgcctgcaaagtgctgcaacaaatcaatttgctcaccggtgttctgctgcaatgcgaacccggtttacccgactggatgtgcgagacctgccagacggatttgaaaagcgccatatcctttcgtgatcgctgcttgaggagtcagaagatctttgaagagtcgctggtcaggaatgaagaggacacattccgctcctcagttcgtcgcagtgcccgttcccaaagacagcggcatgaagacaccgctccaaagacgccagcaagtccgctggaggtaatgattaagctggagagcctgagcaatggcgatgaggaggatgatggcatcgatcacctggactcctgcaacgaagcagacatggagctggccattaaagcgatgtccagctctaccgaagatgatggaactacctcaccggtcagattgaaaagaacccgacgtcggggacttaagaaaggcgggaaaggtgaaaatcgcacaaaggttacgcttccagttttcttttgcgatcagtgcggcaacaatattacagggaagtcctccttcgaccgtcacctacgcaaacacagcggaattaggccctttcagtgcgaactctgccccgcccgcttcctgtcctccggtgagctgaaaggacaccaagtgatgcacactggagatcgcaagttccagtgtcgttactgtgaccgcacctacgtcaactacagtggtcgcctgcgtcacgagcggacccacacaaatgatcgaccctttatttgtgcgcagtgcggcaagagctttaccaattcctacatcctcaagaaccacatgcttatccacacgggcgagcgcctatgtgagctgtgccatcgatcctttgcgcgacccacccacttgaagactcacttccgctctaacactcataagcacaacttggagaaatcgatggcagacgcgggtggagttcagctgtcaccatcccagtcagcggatcaggtcaaattcgtgacggaaaaggagccagaagcagaggcggatgcctttacgatagaagtgcctttgcccgcggagcaggagcaggatgagtctttgggcctggctgctctggaaacatccactctaatgtatagtacaaactag

SEQ ID NO: 17964 - protein, 397 aa, DROSOPHILA
MLQNVCRVCASSTDNSKSLKLFNSGACKVLQQINLLTGVLLQCEPGLPDWMCETCQTDLKSAISFRDRCLRSQKIFEESLVRNEEDTFRSSVRRSARSQRQRHEDTAPKTPASPLEVMIKLESLSNGDEEDDGIDHLDSCNEADMELAIKAMSSSTEDDGTTSPVRLKRTRRRGLKKGGKGENRTKVTLPVFFCDQCGNNITGKSSFDRHLRKHSGIRPFQCELCPARFLSSGELKGHQVMHTGDRKFQCRYCDRTYVNYSGRLRHERTHTNDRPFICAQCGKSFTNSYILKNHMLIHTGERLCELCHRSFARPTHLKTHFRSNTHKHNLEKSMADAGGVQLSPSQSADQVKFVTEKEPEAEADAFTIEVPLPAEQEQDESLGLAALETSTLMYSTN

SEQ ID NO: 17965 - DNA, 3862 bp, DROSOPHILA
agtctgtgtattcgctttagtaaaattgagaaaacgccactcacggcagatgggatgcaatgcgatctgctcgacttgaagttaacaatattaatatttatgggtcgcaacgggcataactaaccccatacgaacgtgtaccctgggtagatagcaagatctaggatagacagcagcgaatctgaaactataactaaatgcgtatcgccgcccaaccactcccctcatatacccatttcacatatacccttgcattatcgagaaatctgaacttacatcgaacaaaagtcgccagaatatcccgatttccaagcaaacgcatgtatatatatatatatacaaaagctaatgtgtattcccgctaagcaactgaaaagaccgaaaagcaaatcacgaaagaaaaccttatattttgatgtatgtattattattttttaataaacctaagagaacttgtaaccgatctggtgtgtaattggttttttcctgggaggctatagcaaaacaatgtaagtttattgtttatatcacaaccaattcgaggcgttaaagtatacaaaaaagttaaaaatgatattcggttcctgcatttataaacgaaaaaattgtttccctctgtaagcaatacttttcaattcaactgaattgctttcacttatttttagcttacaaaaatcaatttaaatacattagccgggccttaatcaaaaaagatcttacatatacccttttgaagactgcgaattaaaaaaccagttaacgatatagtttttgttccatttggggattcgatttattcgaccactcttttgcttgctgaatatgtacaatttgcttaagtgtgcattcgcgttttggggctttaaccgtaattggtttgttcttacagggtaaaaattatagctaattaattgtacattcaaaacaaaaatgagtcatctaatcaaattatattcaagaggaagattgtggagttcggaggctgagaatgattatcagtctaatcgctttctgtcgcaacatttgcgccattgttctccaggcactgccaaatggtcttggccgctggacgatcctcgctgagagcatttgtgcacagataaaacagctccacgacgcagttgtaatcgtcgctaagttgaaaggccactggcaatggtggtcgtgtaccataggcggaatgaaggttattcagtgtaaagtaagagatatcgttctccttcgtgtcatcatcttcttcatcgtcttcctcctcctcttccttctcctcctcatcatcctcctcgtcataatcttgactcatatcgttgtctgtgtgttcttccattgcagaaggtagtccgttcttgttttcatcgctggagaagtccaactgtttgcactgcagcttgtccgtgtcggtgggtaaatcgtgcgaactgtccatatcctctcccagtgctgcatcaagctccaaggtatgtggaggcaccaaagcaagggtttcgtagataaccaggccaaagctgaatatgtctgccttgctgtcaataacatccacttcgtctatgacctccggtgcgcaccagaggttagttcctaaaatattaagacataagtggttaatttgactgaatgtgaaattatttatatcatatggggtcagtaaactcacccacatagcgcagtccgggattctttaggaaattaacctcgccctgctcgtccagcggaagagagactccaaaatcgcacagcttacaaatctcaaactcgcctttgaccaggacattaaaggacttaaggtcgccgtgcatgaggtgagcttcgttgtgaagaaagtctagtgcctgggccacgtccatgatcatcttataggtatgtttggccggcaacgggcccagatcctcgtcgtgtcgctcctcgagtatggagcccagtgaagtggtgcacatttcaagtgccagtgtgttgatgccctcgtcattggtgataacgccacggaatcccacgatgtttggatgcttcagtttgctgtaaagtcaaaaggtgctgtttatagggggcaattattacagcaatcctgcgtagtgtgtataaaaaatgcacattttacgcagtcacctgtaggtaactcgatgcattggaagcaaaaactatgtacatctaataatagctttatttactagtattgagtttcccggctgaagtgcgatgacttaggatcttacttggaatattttgtttggtaatgctataatttttgtaatctaataaagattcttttgtttaaaagatgggatatatgcaaaataacattttaagctggaatttaaggatgatctattcaattcgaagtgagcctagattacaatggggtattttagcgagcatggactgcagctgctcagctgtgggccaccctaatgaattgctgacccacatatcggatcaccctagcacacacgcacattcagcatccgcacacgcacaaacacatgcacccacacgcaggacaccgacacatactgccaatttgattgggcttctggatttggatgagcctaccgcaggatatcggcctcgtgaacaattcgctcgttgaagagtgtatccttcttgacccgcatgttctgcgtgatccgcttgacggcccagggcgagcggatttcgccgagacgaggcgagcggtccaagcggtagacccggatcccagtgccgtggcccagggtcttcatcatcggcgatggcggcacgttgatgggagtgctgctgttctggacattctccaggtgcaaatttcttagcttgcggcgtggcgtgtccatcgcagcaatagtaaaattcaattaaaccaaaattaaagcgacgcgcacaaaacaccgtttaaactgtaaatggaatgcaacagtgttggtgttgtgtttggtcctaggcgatagagtgaccgtggcgtctcttttgactggaattaatcgcaaaatagatgctaagcgcaatgttcttgttactgccttgtagagcactcaaactctactaagtaatagcttataaacttccgtctgaagtaactgaaaaacaaaacacacgcctgctgttctagggcgctgtgcgactggtcacactgaatagtggaccggcgtgcagtactaaatatttagtcgttggcattcaaattgctccttataaattccaattaactacgaattataagaaatagaatccagttccataatgttggcaacgaaattggatggagtacctaatacaaggccaacaaatatccgtttttaatatataaaagttagcaacactattttccatgttaataccggtcgttttgtaccgttaagctttaaattaaatatatgacacttagccaagacgcgaacccatacaggtgcgtgttacccagacagcaaccgacacagaagtaccgcatttcgttggtattattttcacaccaacaattggcgcgaaagccgtgccaaagcagagatgcgataaagaagaggagtgcagagaggcggcagtctgtggagaaacaccagtggaatcgcacacaagcgcggcgattcgaaagcggacgtgtgtgaaaatccagaccgcgggttttttaaaattttttgttttattttttcgcgtgcggtgtgggagggtgtcacatccaaaaaacacaaagcgacagcaacaacaactccgttaatattctggatcgggcacacacgcacacaaacataaaaaaaccgaaatatacacatgcttggcggagttcgtgatttaaaaataatacaaaacaccagaattaaatatacgcgcacgcacacacacacgcgtatgtaaggtgcaaaataaagtttctttactggtttctggtgttaac

SEQ ID NO: 17966 - DNA, 1252 bp, DROSOPHILA
gtgttttgtgcgcgtcgctttaattttggtttaattgaattttactattgctgcgatggacacgccacgccgcaagctaagaaatttgcacctggagaatgtccagaacagcagcactcccatcaacgtgccgccatcgccgatgatgaagaccctgggccacggcactgggatccgggtctaccgcttggaccgctcgcctcgtctcggcgaaatccgctcgccctgggccgtcaagcggatcacgcagaacatgcgggtcaagaaggatacactcttcaacgagcgaattgttcacgaggccgatatcctgcgcaaactgaagcatccaaacatcgtgggattccgtggcgttatcaccaatgacgagggcatcaacacactggcacttgaaatgtgcaccacttcactgggctccatactcgaggagcgacacgacgaggatctgggcccgttgccggccaaacatacctataagatgatcatggacgtggcccaggcactagactttcttcacaacgaagctcacctcatgcacggcgaccttaagtcctttaatgtcctggtcaaaggcgagtttgagatttgtaagctgtgcgattttggagtctctcttccgctggacgagcagggcgaggttaatttcctaaagaatcccggactgcgctatgtgggaactaacctctggtgcgcaccggaggtcatagacgaagtggatgttattgacagcaaggcagacatattcagctttggcctggttatctacgaaacccttgctttggtgcctccacataccttggagcttgatgcagcactgggagaggatatggacagttcgcacgatttacccaccgacacggacaagctgcagtgcaaacagttggacttctccagcgatgaaaacaagaacggactaccttctgcaatggaagaacacacagacaacgatatgagtcaagattatgacgaggaggatgatgaggaggagaaggaagaggaggaggaagacgatgaagaagatgatgacacgaaggagaacgatatctcttactttacactgaataaccttcattccgcctatggtacacgaccaccattgccagtggcctttcaacttagcgacgattacaactgcgtcgtggagctgttttatctgtgcacaaatgctctcagcgaggatcgtccagcggccaagaccatttggcagtgcctggagaacaatggcgcaaatgttgcgacagaaagcgattag

SEQ ID NO: 17967 - protein, 398 aa, DROSOPHILA
MDTPRRKLRNLHLENVQNSSTPINVPPSPMMKTLGHGTGIRVYRLDRSPRLGEIRSPWAVKRITQNMRVKKDTLFNERIVHEADILRKLKHPNIVGFRGVITNDEGINTLALEMCTTSLGSILEERHDEDLGPLPAKHTYKMIMDVAQALDFLHNEAHLMHGDLKSFNVLVKGEFEICKLCDFGVSLPLDEQGEVNFLKNPGLRYVGTNLWCAPEVIDEVDVIDSKADIFSFGLVIYETLALVPPHTLELDAALGEDMDSSHDLPTDTDKLQCKQLDFSSDENKNGLPSAMEEHTDNDMSQDYDEEDDEEEKEEEEEDDEEDDDTKENDISYFTLNNLHSAYGTRPPLPVAFQLSDDYNCVVELFYLCTNALSEDRPAAKTIWQCLENNGANVATESD

SEQ ID NO: 17968 - DNA, 18890 bp, DROSOPHILA
taatgctaaactgggtgactcatcgactggctgacgtcttgaattatttttaatcactttacacgcgcagaaaataattggtattaataaatggtggatcatgagcaaattatatatagaacttaatttctaaagttaataatattgttggtatcatataatcaagtaatctatcttgtggatttttatcaacaacataatagtctccaaacagatttaattcaatcttataactgtccgaatgcttcaaactatattaattattttgtatattttctaatgatataatgataatattcgaaaatattattggtgtatttaagtttgtttgaaacattctaagatcaagccctgggtatctaaaatgctcctttttgccggttcacacttgactggcgttatataaaaagtatcttttgggttgctcccgctacacgtacattttattttcgaagtttcaacttggtcgaagccttggctcagctgtttttgggaaaagttgctccctaattcgggaaaacacgttacgcacactcacgctcgcgaatatgcgattgaaagttttgagttttaagttttcagttgtcagcttatagttttcagtttttgggctctggtaattaaatttcaaagactccgttgcagttgaacacgttttgtcgcacgcatagtcaccgaataactgaaagccacttaaagttttttgctcaccagagcagatcaccactatatctatctggcggatcgtatctgatcggtttgtcgactagaggtgaggtgaggtgcaactgaggccggtttattcaaacaacaatgccagcgatatatgtatgtacatatgtacgtatgtggaggcactacaacgagatggtgttattgttgtggcgacaaacagcatcagctacaaatgaatctcgagtcggaaaagcatcgctgagatacgcgtcgccgtgtgttgcctgtaaagctttttggtaattacaattaaacgtcaaagcatttaattgtaggcgctgctcatgttgtttttgccgccatcgtgtttttgagtatctgtgtgccacagcaacaaattggcagcagttgcagtcgcagtcgctgcctcagtcgacgctgcagtcgcgctgcgatgcacaaagtgaggggcataccccccctttaaatccccatcgcccccttgtttgcccactaattaatgtgttttgtgcacctgttttgtggcagcggattttgtatctgtcaaaatagaacagacagcaaagggaggctttcagtggagcttgtgttaccaacgtatttccagggctatggcgaataaaaaacagtcatattagagttcctttcaagtatcatgtatctttgaactaaaatgggagtcttatagaaaaaatatttattatttaaagcttaactattttaattgaacttttctagataaaagatcgtttcgaaaaagtgcttataaatatattcatttggaattggtttaagatcagattaagacactaactttaagatatagattttaatggtttgcaacggctggttttaaatccccttgatgaccctaaaaagtgaatagaaattccgctagggaatatgtatcccggctgagaggaaagcaaacgttttggcgagcattttcccccagctggctgatttcatctattttatgaaattatgcatttaaatgtatgataatcatttcgcttgggcaaacaagctctattttctttctcttatttttaatcatttcccccccaccaatccgcaccgtcacgttacttacccctcgccgccgaaggctttcagctcgcggttcaatgtggccttcacgttctcctgggaatagaggcccatgggcgagttgaactgcttgtgcaccagcttccgttgtagggcagccattttgtatggttgtttttggttgtttcctttttggactgcttcttcctgcagagttgcgagttgcttcttgggaaatgttgaacttcgcttgctttgttggctggcctttgtttgcctcgaagcttctctgttgtcggctactgcttcgaatgtctttgggtctttggaagtttttcaaaaaatattgttgataaaaagaatattttttaaaatcttccacgcgacttagttccgcttatcggtttttgttttgttgttcttctttgctggcggtatgtgggcgaattcggaaaaaaggaatcctaagcactttcccctacttcagttggtcttaatgttaatcgttaaatgtcggtcgttgttcgttctgtaattgaaatgcaaaataacaccgagtgagataatgaggtaagtgaaaacttaatttgaaaaggagttggcaataatgtgattaagtttcaatggtagcgtttaattaattcttaaacaagctggtcataaaggctaattggctgagtagtaattgagttccgcatactgacataagaaatgttatatctttatttaactatgaaattaacaatcatttattcaatcatgtaatttgccagaacaaatttgttcaacaaattggttgtctataatgcaagcacatttactgtgtttaacataattaattaatgtgttaacacttaattaaaaacctgcaaatgtaatatactaatggcatgtaaaacaattcgcctgtattatttaataacaaccgaagcaattttatttgccatttctgttaaccttgtataacttatcactaaattctcctcaaaatatatgtgaacgtctaattataaacacaaaacacaaaacggggagactcaaacaagtatttgaaataagagcaaaataattttaaaaatatttccagcagcatcagcacttcaatgtcaacggtctatatataacactttattgccatcaaaaattgtagatatacatatatagattttatagttaaaagtcgctcaattgcgaattggaatcaattgccaatggctacaacaaaattcattttgattttacagctgttgctaacaaattacaattgtggaatttcgtacgaacaactatcgaaaatatgcaaaacggcacgtatagtatttatttttccaatttcctgagacactcactcactactgtcacatttagaaatgtatcttaaactaatttgagcaccgcctggctgggcaaaacaaaaagtattttatattttcctgtgtgtgtgtgttcatccgacgattttgtttgtcttgctattttgtgcgttggcctaaaaatagagccaaaaatattgaaatgtgctcattttttttttttttttgccacactcatattttccacacacactcgaatcggcgccttctctcgaagtctctattttgaaattaaaaattcccgccttgtgtgtcacctcaaataaaattagcagctgggaggaagagataccattatttagatttgcgtcatttcgaggaaagtgtacgaaaatcataggggatgtaccccattgctgtatggaaattgcaaataaaagatacttgaaattatcgtaatgaagtatttttgtatttgcaggcattttatgccgtttaattgcttctggttgctgctttgctgttgcatgttgctgctgttgctgctgtttgtgttgcagctgccacagctgctgcccccgtaagcacgcaatattctggctgggcggaacggaagcggaccaagaatcgcacaaattaatcaacatttaataaaatattatgcaaattacacacaaaaggcaggaaagcagcgaaatacgacgtgagagaaaagagcgccagcagcaacaagagcttgccacttgatgtcccaattaaagtttaacgcaaaactcatacaaactcacatatacgcacacatgcacactcgcccacagctcacacatacgaaggcacacaaacaggtgcgtgctgcactctgtacttagcgcacgaattgtaagggaatttgcataaaaaattcctgcaaaaataatgtttcaaaaaatgaacaaaatgagcatgagcgcatataaccctgtgccatatgccacagccgacacaatttggagcaacgctttcaataccctttccctagcacaaaaaattaacagccgcaggacatgtgtacatttaaattaaaacaaagttgctgccgagttgcagtgccgagagtttttcacatcatttgtttgacgttatgaaattgtagtggccccttgaacgccagcgatggaaagtcaatgggaaaaattgaatgtttcgctttaaaaataatattgccccagcaacagtcaatcagccaatatgtcacatggcactgccttgagccaaatttttaaataatatttgtctgcaattactcaatattttagaggtaggtgaaacgaatatatttcaacgtgcgatctgcttttgaaaatttatgcaactagcctaagcctaaggggattcggcatttgaattttaaatattaaagcttaccaataaatgaaatagacacatataataaaacaaaatatttaatttttggcccaaatactaatcatagttaataggagtattttttatgcaaaattatgtttcaagtatttatttttatctaatatagtctttagctatgtactaaaaatataagtaatagaatggttgatattttcaggcatacttgtaatcaatatgttttacttgtatgtatggctgtaaatattttatgaccacagcttgattaaattttctttacttaaaaaaatactcgattaaattgctggagaaatcactggcaaatttaagtgcgtccagcatttttcaatccattaattattaaaattaaagtgacatttttcaggtgagagcatagcatcttccccacaacccaattaacatctacgagtatcccctgttcatttttcagtgtctttattttggcatcgacatcattatcatcgctggcattgcatcgactccatgccatttgtgtgtgtgtgtgtgtgtgtgtgagtgtgggtgtgtctgtcaaatttgagagtgctatataaactataatcgtggctaaatgtgtgcgtgtgtgcacacatacgtgtgcattggaatcaggtgcaaatattgttagattttcgtcgaggcgaggcatctcgcaaatctgggtgtccatatgtgtgtggatctcgaggatttcacattcacatccttgtctgtatccacatcccaaatcccgaaactggatgaaagctgttgatttagccagccatgtttttgctaatttcattattaaaatacagtagcattgtgctgcgactgttctcgattttgttgaattgcttgtatatttcatgcggccgccacacaaacacagaaatatttaaacaaacgtttgcaatttgatcattcaatattgaacacctaaagaattttcgcacttgtaattgagtgataaaaacaaatttcaatcgaaatatttgaggcacgattgaagtgattaaactatttagctgagtttataagcaaaactacaagttgttaattatatttttaaagcaggcgtatattaggttaattattctaagatttcgaatttccaataagagagcatccataaataatatctataaatatatttttatgaggaatgaacaatctcgaacatttttttctggaatttgaatatcgtaagaattattcaatggatattatttatgatttctggagcatatcttttaacgaatagtaaatcaaatttgatgatcgttttcgtttcgtaaatagctgaaatatttctgcataactggtttgaaaactggagcaattttcagctaatttgttttcggtgctagccacttgtttttagtttagaagtaggtggttgggctttgcacttaagcacactaatgttcaccaaataaacacacgcacactggtctggcttaagtgtaagcacacatatacacacacacacacacacacacacactgggggaaaattcgtatttatttggtttaatgtgggtgcttaccgtttgtaacaatttggcgctgcttaatccaaaaataacgccatccaattgctagagttggcttcagagtgctgcccggaatttcggccactttaccgtctcgcccccgccccccgccccgctgcactttcttattgcactttcaccttccccaccccacctcctgcattatgagtgtgtgtgtgggtgtgcgcagggtttttggattattgaggagcgcgatagcgaaggcgaacgcgtccgccgaaaaccggcgttttgtaagcgcaccatcggccaactgaaactgaaactgaaaatgaaacagcaacagaagcgaagcagcggcgaaaacgctcaactttacgcaatgatcatcggcggcggcgcctttcctttcctttggcttttcattttcatttttatttgtattttcatttcgcttttgttgtattccgtttcatcagtctacattttcacatctttggcagcgacggcgaagaggaagcagctgctgctgcggatcgccggaatgtatctgtatccacgggctagcgaatgcgtggacgcagatacaatctggcacactggctgccaaaatatggtgccttgttgtgagatatatacgtaaaaaactgttcttacattatatttttgtattaaatgcttcttttgaaaacaaatgttcaaggcgaaatactaagctaataaaagcaatataatagcttaatagttctatgaaattcagctattctattaaaatttaaaaaataacaaaagtatttgtaatactggagaatcactgcacccttagcctcaaccgtcctattattatatttatattaagaatgataaatgatatacaagaattataagttttccaaaacgaagtataaagcaatttatcaagcactttaaatgttgttaaatttatattaaaatagcatttcagaggcatttataaatatctacatttattttgaatacatcaaataaatactgtcaacgagttgtagtcaaaaagtgcaggaatgttcatcggctaaacatattgatatatttgcagccagagaacgagagttcaattaattaaaatgatttatttttgaaaagccgaaccgcttacgcatttgcacatatggatgagtgacttttattacctaattaacaataatgatggcattaaattaaaatacattgaagcgcatttggcagatattcaaaatatcgacatcaaaattaccaccttgagttcaaaattgaaaacaaaggggattacagtgcaggaaagctcaaaagctaggcaatgggtatgaaaatgtgttcaaaacacccacaaatcttcgatgctgattcattgtaggaacaccttctttttccaaccgccactgtaagttggccacatatttagacctctttttgcccacccgccagcaagaacaacaaataaaccaaatagttaaaaaaaaacattaaaaaaaaagaagagagcggcagaaaaaatgaattatatatgtataaaaaatattcggtcgccgtcgatgagcgacaagatggagacagcggcagcgaaagatggatagatacatttgtatctgtagctatagattgtatatgcaggctataaggcccgactattacagcatttttactgccgcacccctcgcgcccccccccccctccaccgaccaccaacataacacggcacgtctctaatattctatttttgagcgtagttcttggtttttctttaattttatttatttgattttcgttctggctttccacgtcctcgccagcgatgtcaacatttttaccctccggacttttatatgtcttctttttttgtatttttttttgtatttttggtaagcgattttccccccgtaccatgaaaatagcacaaagaaagagtccatatagaaatcgaggggaaaaggggaagaaatgcgcttaaaatgccatttaattgtttcacttgcagcaaaatgggttttcagtatttttgtgtttcagttttcagtttttggttttgtgctttctggctttttggtttttctcgcggttgaagttgattttattttgccagccgcctttacggctccactttttaattgtgctttaaatgctaattagcttttgtgtgtgtgctggatgcaaatgcaatggacaattatatatatacatatatatatataatatatatcgctttggttttcctttaatgcattttatttaattaatttttgatggctctttcgcggctgggagtttttcatatttttttcattgttcgccactatttgcaggtgacacattttctggcatttatttttgggttttctggtgcagcacgcacacacacacacacacacacacacacacattacacttttatgcccacacacaaaggtgcacctgtcgctgatgcactggcgttgcactgtcgtaccgtaccggactcgaaattcggactcgggattgtcggtacactcggaactaggagctggctgatgtggtgaccacgttcgcgaccacggtgcgaattattattgttactcgccgctcaacgaaagtcgctgctagcgctgctgctgtcgacggaaaagttcgcgaaagcagcaaaagttgctcttgctctagttgccttttaataatatattttcatattcatggaaaatcgctgatgatgacaccccatcgggtgtatcttttgtgtgtgtgtgtgtgtgtgtgtgtggggggcacccagcccaatcctccgccttagccaaaaagcatagaacgcccactcacacccgattataaattagccacggacattgggctaatcacaaatgccccctattccacttgctgaagccaacaggaaaataaggaaaagagcacttcaagccaagaagcgttagtggaaaagcgataaatattcagcaccaacatacatacgcacacacacacacacacacagagtggcatgtgtgctaaaacagctaattaacaagaaaacaacgattcgatatatgtagtacatttcttctccacctattcacacgcatacgataccaattttatatgcatgttcctctaaatattgaacgtttatttttggatttttggaaagccattgaaaacgtttcgaatgccctgcaaacataccgggttatatcgactagatgcatggtttagtttatttaagtttcatattttttcattgcatacttttggcagcgtcgacaagctgggcttaaattggatttctatttgcagttgattgaagtgaaaccgcacacaattgaaattgctgcacagaggcgaaaatcttgttcaaatattgtaaggtagtgttcatttacttaataccatttaactcggaaaagaaacaaaaatctacaccaagataatctggttcgttagaagctcaatctgaaattgctttttcttacctttatgtttctaaatttttaataaaactaaaaagcaatcataagcattgatggaatgaaaaaggaatgtatataacgttctactcatgtatttaagaaaacttttctgatgagaattaagctaagataaaaatatacccaaatgtatcctaaatggccttttttaaatatttacataagtactatcttaacagatatttttttcagtgtgatattcgagcacggcattagacaggcgtctgttaacacacgtttcgatatttgttcgttatcccccgctcattgtttgtgcgttgagtatttatacccgtgtctcgtagtgaaaaagggtatactatattcattgaaaagtatgtaacaggtggaaggactctggtgggatctctagcaggattctagcgggaacccagatataatatcgatgtggcctcgatatcagtagctataaaaactagagagatagagtttattttcatattttgccacgcccacaagccgcccaatacagcgacgaccaaacttttgaaaaatgttttgatatttttctatgtttttaaatatcttttaccagctgagtaacgatgagtatctgatagttggggaactcgtctatgtcattctctctagttgtagtttccatctgcttatatttttggaaattttgttttgccatcaagagcagcggccgcatgatcgtcagaatcagcaacttagcgctgttatattgttgtgccctgcaatttcacaagttcatgtgctttcgatgcgctcaagcacaacaattagtgcattcagtgtgtgttctcgccattgctcacctgtgcaccgcccacctgtaccgcccgctaaccccccccccccccccaacatcccctcgctcctgcgcctgtcagcgaaatttaacccatgcacaaaaagctccgctgcagagcacctgacaggcaactaagctgcctgtatttcacgctagaaagccagcaaaaaataatatgtttaatgtttgtgaatgattaatggcacattagaattgaaattgtttttggctacggcagcagaagcagcaaaaaaaatctgaatccgtatccgaatccaaacccgaatccgtatccgtagccgaatccaaagcgcagcgaagcagtgtatatattgctataatgtgcaaatatttataatccccctctccaccaaactatatggtatgtgctcttggctgctgctactactcgtactacctgagtggaacaggtgagtgtttataatgtatcgcatatgcatggccaagtgcggaaaagaggcaaaaaccacacagaaatcgtgtgagtatgtgcccatataatgtagtgcctcgtacaccaaaggaaaatatatttaaaaaatattttcaatttattatgaatctggtgcatatttctatcattaagttgtattagttggttttactcttagatgaacaatattatattcacaaccatcttaaagcttgtataaaatttattactcatacttgaataattgtaacccgcaatgaaggctataatagcatttcatggaatcccacttcgctggaattttgctgagtattgtaatttatttaaaatccttttcgatactcacaaggttttcattgtgagtcattagggaaccacatttcgttccgtgtattgtatattcatctccccgagtatttgcttagtcgtgtgtattatttcggctgccaagttcggtgcggctgttcatgtccttggggtccccaatgcgttatgatggaacatggaagatggaagagcggcccccagccgatgccggcaaaccccaattcaagttaaaatccaaacgaactttgccaaattgcaaaagccgcaaaaccaaaacatttcgtcgcctgctgttgaagttccatcgagtggccccaaggagcgctgatggtgtgtggggtccagatccccccaagaaagatatggagtagcatcacctcacctctcccctctcctccccaacataactgctgctcaaagagttggcagaatttcttaataaactttaatgactgcgggtgttccggcatgtgtttgtcactttggctccgggtgggtgcaagtgcaactttgatggactcgggttacctgaggaccagctccaggtccgccactgccacctgagcattgttgccaactcggtgcttttctagccacaactggtggctgcggctccacggggtcgaaacaacaaactgtttaatttggcagttggctgatgtgcgctacttgttaaccaaaagcgtttgtctttgctacactttccgcaaaatttgaatattaaatataagtttccagcaaataggataaataataactttgttgtaagtaaaaacatgtccaacaaattgttgggccaaattaatatgctgccgaaaaactttgatttgctattcaataaacatcaatatgtattataaaatataaacataactgtggcgaactagttattggcatttatttaatttatggcaaaatattcacatcaaaataaataagaaaagatatttatgtatttttattggaccaacaatgaatttgttaattgcatgcttgtgttatgttacaaaatcttttcgtttaactagttgcaactattattcaattttttatgcaaacaattgcgcattgttttcgtttattcagacaaattaagcgtacataaatttaattgaaacttaaaagctgttttaaatttaattttttgataaatttattaaaccttaaagatactttttttaacgctaccttatactttctaaagtgtctagtatacctttttactctacaagtaacgggtataatttaggtaaaatcaatctctcttcaggtggcaatactgtggccatcacctgctgcttcaaattaagcaatgacttatcagccgaatactttaaactccccccggtggtttgggccaagttgtgaaaactaacagccaggccaggcgccgcatcctttatggtacggatggtcgtttcaatttcgcctataatttacttgaccatcacgtaccggagtcacgcatgccaacggaaattgggagatgggtggttggttagtgggtagatggtggaaagatagtgggttgctgcttagtgggtggcatgttgggtggcatgttgggtggcatggccgtgcaacatgttcttgcggggtcattcggtggccgctcatacattacttatgaatcgactcgggttgcgatacaaggtatcttagttaccattggcgggcatgttctcagatactaaattgaacaacattcgaatcaaattcaaatcagaaaggaaatcatttgcatgcgtattgaatttgtagatagatatgcctatatatattatgcatataattgcacttcgatatccatctttcagtgcctcatgggtaaactaagttcgcttcgggagtgccaatcgccgagggaacgctctttaaattttctttaacgacctttatgtgcacctttacggaagttttcggaactatgtgacttaaccagaactttgcaaaatggcagggaaaatgtttgacttttgcagttgttttgcgctgcgagttgtgaaatattgaggtattaggaaattgagggaggaaaacagaacaacagtatgctaagtgtattttcgttaagattctaacaaacttaagaagaccatgaatgcttttttaccttgaaaacctagaaacgaaataaattaaaatttaaaattgcatacgtagatatatgaatttttagagattgagtatcaacaataaattggtttctgaagcttaatttattccacacaaatactcaatgatttccaaagaattcactgcaaaatggtaatacagaatgtccttggaacacatcctcccagccatatgcatcttcttttgaatagtgagacaagcgaccaggacttcttcgacttggcttctcaggctattgtcaatgacttttttatacgactgcgctgcggtttacgccgtttaatggccatggtcgtaaaaagtgttggaaacccggactgtaaccctcgaattttcccgcaaaacccgaacagcatctgcaatcattttatttaactgccgacttgtttgcgcaaattaacacatttatttacaccacaatttgttgcttaaatatttatagaaagcggagacgaaacgacgccaacgaaaaacaaattgtgcaagggcagtaacattaaaagttttcgtttatttcatatacaataagtacatccagataaacatatacagatacatacatatatccaagtccatacaatacacatatacatataggcatatatatccgcgaatacacatgcagagacgattcattgtaatcatatcacacacacaaacgatatggcacgcatactggctcatatgcagcataattgagagtaaattagcgctatacttgtatataggaattgctcagccacgttatccttcgtcctcgacccctctcgctggacctttgttagctcacccattcctacgtatatccattactatctatttccgcatcatgacactcagaagaaaaacgaccttaaagttagcaattaccattaaaatccttttttttactatagaactaaagaagaaaagcttcgtagctatagaacaaaatgtattagtacaactttaaacttttgaaataatttccaaattaccctgttttctaaactcaaacatctcataatgtaactgagactacgaatgcgtaacaatgaacaaatacatcacattttgaaaggacctccttcgtttttttccaacattgagcttaagggtattcttgattccctcataatttgcctagaagctgtcatcttttttttttttttctgagtgcctgcgcatcctgtgttcttgccccacattgatatggttccgcttaagcgagaacgcttaaattcgctggatgtggcaattgttgcatccccctgaccatcgctccgcgtggaggccataaaaaacggcgagcacgccgagcagccagctccaggatgtgggcattagggcggcgggggcgcgtccttgcagagccagctgctccttctccaggcagatccggaactcatcgtagtccaggcgcgtgatggcgcagtaatgattgagcatgcagagtccggggcaggccgacccggaatgatatcgcacagcgttggctcggtggtatctgtgggcacaaaaaaaaaaaaaaaaacgggtggtatgagccgggtaaaaagaatggtccatgggagtataagcgtcatttggagtccctgtttgctttggcctgtatcgccggccagccgggctttcataaatgctcttagccgcgccgctatctcccattttgatttacatattgcaacaccactcgggcgggcgaaagtggttcagcggtgtcctgattgaagaagtctacctgtgccccttcaattctgctctgcacaagggtctcccagtggtggcttacaataatggagggcgtttatattccggatgaatataaatggtttactgaacgaattgcgatcctttcccgacacttttcctatatatacatatgtatgtatatccccacataagactccttttagtaaagatttttccctaccaaaatcatcggattatttacaaatttaagtcttattgatcaataaaaagtgctgaggtaatatttaagtcaattttgatggggggttatagtgggcgactcactatgaaatgcgcaatgagttttgataaaaaattataattgcgaaaaaacgttttcagcggattttcaattttaaacggatttattttattaaaacagcttgcataataaaaaataggactacttttttccatcggtctttgtaaagtgataactggactgcaacggggtattggattaagaaaaaaaggggcctccacttttttaaggactcacaaatgaaatggtttacgaaaataatacgatttatttaatttttaaatggtttatattccgtaccaattggacaagtcagccgttaaacgtttaaatttaaaattgattttcgtggaaaaaactaaagcgaccttttgtttctttatcatgaagtaaattaggcgttaaattgattttcagaaataaaaaacataattttttacgggctatcttgtttttcaaatgcttgtttaaactatttaaagcttgcatttatcaatttacgtgtgctccagatactcaaacattattgcctctgcaatactgtcgcctgcaggagcaaatccatctgtgagctccaaggattaccggtcaaatcaatcaacacgctcatagtttgccccccaaatccatttgcatttacctggtgaaccaggagaggtcggtgcccgtgaatcgctcggcgaaattgtgcagtgctacggcggagatctccggcagggcatagtagtgggtcaggttgtactccggctgccaggtgggctcgttggcccggttggctagtggcaggtccagccagaactgcgtgtagtccagcacctggccgctgcccgtgtcgaacttgtagagccgcagggcgggattattcgatgaaccgatgcccgccttgcgcggcacaatcgatggggcaatcatcagccacgaaatgggattgcctgtcagccgaaaaggaaaccattttaagttgtgaacaaaaatgtaacgaatgatcttcacaagccatgtatttccgagatatttagttattatccacttaaaagttaataataatatgctttaagtggtactaatcttcaagtagttttttatggctgtagaaatggtcagactagtacttaacctttggcatcgtagatcagacggaaggtgtccgagtgtaggtgtccgaagaactgaccctggatgaccggcgcaaagcggcggaccatgtccaggtaacgttggttattgcgctccgtgaaagtcaactggttgtgctgggtgcccaggtgacgttcatcaacacctggtggcatgtggccaacgatgtatacctggttgggacaatgagtaaacggattcggttcatttaatccaagcggcgaatgatatgaaatcaatccttcttgttgcaaattaaatatgataattaatcaaaagggcagttggctatccgattggatttactggcatgcgatatgcaagggtcaaggtaagacaaaaatattgaatatttacatattcgtcgcgttatctcgttaattttatgaaaaaaaaattggctttacgagcagcaaacattaaactgtggccttaaattttgtgaaatttaatttaatttacgttaaaaaagtgcaaaaataaagcgagtttagtttatcaataatttcataacaacttcgaagtataaaaataatgagttcattaatttatctgtaaatatgggttgttgacacattctgatattagtagattgaaatgagaattaattaatattaacataaaaaaagctgattttaaattacattactatttttccaactatatactgtttaaaatagttactcctaccgtttcctgtttctctttggacttggtgagcacctcctccagccagagccactgctgctccgccagcagctcatcctctgccgatatggagctcacggatgccttgggctcggcaaaatattcagctggccatcgtaaacttagcgatgcccttggatccggatcgggatcaagtcgcatgaaattcgtatttagagccacaatgcgcagacgactcttggtctgttcgatggaatagtagccgccctgatcgaaggtcaccagagcctcggagggaagccagtgccgccacaattcgcccaatctgcgatagctgccactgccgtcctcgtgacccaagaccggaaatatgaactgcgaggagaagctgcgtccgagcagttctgtaatatttcgcaggatttcgtgctgcttctgctcggagagcggctgagccgaatgggatagggcatctcctgtccacagaacgaactccacattatcgccctgcttggccttcatcgtcttcaccgccgattcaatcagtctccaaggactatcgcagttgtagtgtccaaagggaccaggtggctccgatgccgcactattggcattggagccggaaaccgatcgtgctaactcccagcagcttctgtatatgtcgccctgcgtggagtagagtgtgtcaaggtggaggtcactaatgtgccagaagtagcctgtcaacaaacaagtagaatcaagtaaatgtgttagttaaatacccatagatatatgtaaaagttgttgttttatttgctaagaaaagtttaatctatatcccagttttacacaacaaatttttatgtcctgagcaatttcgtatgtatttccccttcgtaaagtaaggatcgagattagactttgactttggttaagtcgggcaattcctggccgggaaaggccatttcctttcgcggggcattttcccgccggctggtcgagcgacaaaaataagaaaaacctggtagttcaaatggaaatctcctgcagctgactgtttggttggttgactgacctggcccgaatttaactttctacctggtcgcaatacgtgaagtcaaaaagtcaattagcgagtcaacattttgagcgccggccaactccaaggatcagtatcatttggcatgcccagcgatcggtttgccaagagcacgagaagttcgagataggacccagagataccagagataaaggaggcataccttttatgcccggtgagagcacggacggcggagtgaaagatcgagcaggatgagcctgattagactgggactggcgctgctgctcctgctggccaccgtgtcgcagttactgcagccggtccagggacgccgaaagatgtgcggcgaggctctgatccaggcactggatgtgatttgtgttaatggatttacacgccgtgtcaggcggagcagtggtaagtttgggtactatgcatattcgattggcttccatacatctaacttcttttcgacaagcgtctaaggatgctagagtgcgagaccttatccgtaagctacagcagccggatgaggacattgaacaggaaacggaaacgggaaggttaaagcagaagcatacggatgcggatacggagaagggtgtgccaccggccgtcggaagtggacgaaagttgcgacgccatcggcgacgcatcgcccacgagtgttgcaaggagggctgcacctacgacgatatactggactactgcgcctgatgaccaggatggcaaaacaaaacaaataaaaaccagaaaccagatcccaaaaaccaagtaccagatgaacacgacatggctgagattttgtgtggcggcacggggaaaacacccgacgaccggcaggctatttgcaattcattttcctactacacttaacccctaactataaacgtaatcgtatttcc

SEQ ID NO: 17969 - DNA, 1902 bp, DROSOPHILA
atggcctttcccggccaggaattgcccgacttaaccaaaggcgacatatacagaagctgctgggagttagcacgatcggtttccggctccaatgccaatagtgcggcatcggagccacctggtccctttggacactacaactgcgatagtccttggagactgattgaatcggcggtgaagacgatgaaggccaagcagggcgataatgtggagttcgttctgtggacaggagatgccctatcccattcggctcagccgctctccgagcagaagcagcacgaaatcctgcgaaatattacagaactgctcggacgcagcttctcctcgcagttcatatttccggtcttgggtcacgaggacggcagtggcagctatcgcagattgggcgaattgtggcggcactggcttccctccgaggctctggtgaccttcgatcagggcggctactattccatcgaacagaccaagagtcgtctgcgcattgtggctctaaatacgaatttcatgcgacttgatcccgatccggatccaagggcatcgctaagtttacgatggccagctgaatattttgccgagcccaaggcatccgtgagctccatatcggcagaggatgagctgctggcggagcagcagtggctctggctggaggaggtgctcaccaagtccaaagagaaacaggaaacggtatacatcgttggccacatgccaccaggtgttgatgaacgtcacctgggcacccagcacaaccagttgactttcacggagcgcaataaccaacgttacctggacatggtccgccgctttgcgccggtcatccagggtcagttcttcggacacctacactcggacaccttccgtctgatctacgatgccaaaggcaatcccatttcgtggctgatgattgccccatcgattgtgccgcgcaaggcgggcatcggttcatcgaataatcccgccctgcggctctacaagttcgacacgggcagcggccaggtgctggactacacgcagttctggctggacctgccactagccaaccgggccaacgagcccacctggcagccggagtacaacctgacccactactatgccctgccggagatctccgccgtagcactgcacaatttcgccgagcgattcacgggcaccgacctctcctggttcaccagataccaccgagccaacgctgtgcgatatcattccgggtcggcctgccccggactctgcatgctcaatcattactgcgccatcacgcgcctggactacgatgagttccggatctgcctggagaaggagcagctggctctgcaaggacgcgcccccgccgccctaatgcccacatcctggagctggctgctcggcgtgctcgccgttttttatggcctccacgcggagcgatgcaatttcaattgtgtgcggtttcacttcaatcaactgcaaatagaaatccaatttaagcccagcttgtcgacgctgccaaaatttcagtttcagttggccgatggtgcgcttacaaaacgccggttttcggcggacgcgttcgccttcgctatcgcgctcctcaataatccaaaaaccctgcgcacacccacacacacactcataatgcaggaggaagaagcagtccaaaaaggaaacaaccaaaaacaaccatacaaaatggctgccctacaacggaagctggtgcacaagcagttcaactcgcccatgggcctctattcccaggagaacgtgaaggccacattgaaccgcgagctgaaagccttcggcggcgagggcgcgactgcagcgtcgactgaggcagcgactgcgactgcaactgctgccaatttgttgctgtggcacacagatactcaaaaacacgatggcggcaaaaacaacatgagcagcgcctacaattaa

SEQ ID NO: 17970 - protein, 633 aa, DROSOPHILA
MAFPGQELPDLTKGDIYRSCWELARSVSGSNANSAASEPPGPFGHYNCDSPWRLIESAVKTMKAKQGDNVEFVLWTGDALSHSAQPLSEQKQHEILRNITELLGRSFSSQFIFPVLGHEDGSGSYRRLGELWRHWLPSEALVTFDQGGYYSIEQTKSRLRIVALNTNFMRLDPDPDPRASLSLRWPAEYFAEPKASVSSISAEDELLAEQQWLWLEEVLTKSKEKQETVYIVGHMPPGVDERHLGTQHNQLTFTERNNQRYLDMVRRFAPVIQGQFFGHLHSDTFRLIYDAKGNPISWLMIAPSIVPRKAGIGSSNNPALRLYKFDTGSGQVLDYTQFWLDLPLANRANEPTWQPEYNLTHYYALPEISAVALHNFAERFTGTDLSWFTRYHRANAVRYHSGSACPGLCMLNHYCAITRLDYDEFRICLEKEQLALQGRAPAALMPTSWSWLLGVLAVFYGLHAERCNFNCVRFHFNQLQIEIQFKPSLSTLPKFQFQLADGALTKRRFSADAFAFAIALLNNPKTLRTPTHTLIMQEEEAVQKGNNQKQPYKMAALQRKLVHKQFNSPMGLYSQENVKATLNRELKAFGGEGATAASTEAATATATAANLLLWHTDTQKHDGGKNNMSSAYN

SEQ ID NO: 17971 - DNA, 2831 bp, DROSOPHILA
tacatagatatgtatgtataccacatataacgagagtacaaagcacatggaatggtaacgaggaacaaacagaaacaaacggattgaaggaatcacgatgtcacatcatctgatctgcgatcagtgcgaatgtcgaatattcatcaccctagctttaagcttacaatgcattttaaatggaatatcttgtgtgtggaatcgtgtttgttttcatttagttttggtttcctactcgcttcacgctatttcgaaactaagaattcaagccgaatttaaaaagagaggaacctaagaaccagaaccccagtggtcgtcaatgtcaaactattacgtgtataaggctagatggaaaatgaataaacatgattttatatgcatacatctaaactgcactcggctatcgtctacgttcttcatctggatttgggatcggactcgggctcgggatccattaggtttgcctaattttttttttttggataggcacgtgccgctcgtgaatcccccaattggcatggctaaattggcaatttcatcccataagcagcttaatccgatgatttgatggatcatcaaatgaatatttgatgaatgaatgaataccgtatgacccgtatgaataatacgggtcagatagtgtgtgggatagtattcaacacacgaagattgtgggataccctacttttggttctgatgaccactctaattgcctaccttttgaatacttgtcacctttactgaatacttgactacagatttcacaaacacaacagttggctggcgatagaaaccacaaaacatggcgtttacaaaggttacgattacggattgtatttccaagaaaacgacaagtggtacaacatccggggatcacaacgaacgacaacaataacgagaggtgatcttttggtgggaagtgaggtagcaaagttgagtgataattgggctcaggtcaggtggagtactggatgggggctggttacacatgtgggtgctgttcgtgtgtctagaagagcagatcctcgtcgccgtcctcgtcgaggatattctgcacctcctgcgcttcggccatttgacccagaagacgctgctccgctcgcaatttatcggatgccttgcgagcctcgcgtttcttgtcctgaatcttcttcagtcggtagaactcctcgcgctccaattcgtccagctcgctgatgatatactctatggtgcggttgatgcgggggatgatcactggataggagaagcattcatatcagaggtgtatcgtttcaagcgatttagtgtgactcaccgtgctcgatggcgttgactcgccggttggtgaccttgatgacatcgtcgagggtaacaaaggaggtctgcaaggaggccagttggacaagcaggcgcacggcgctctggtagttcttcttcagcttggccagctgctggccaccacgtgccaggccggccaactcataggtgtccacgccatccgtgtagggttcgaagatgggcaacgttaccccggccacgttgtccttcttggtgcggatcttgatctgggccttggtcacgttctgcagcacaatctgattgatgtcgccggtcgtaaacttgacctcggccaaggagaaggcagcctccttcatcacctgacccatcagggttttggtctggaatgaatgggtatgataggatctacgccgcatatagttagcacgctctcacctcaatgatcttgcccagaatcagacgaaagcgcatctgcagggcatccgcctttttctttagcagaccatgtcccttggtggcgcccgccaaacgcgacttcatcagcgtttgggccctacaacatggtgtatagggttattgggttgtgggagtttagccaggattaactactcacccgcgcgacgggaagatgggcaggcggtctttggctgccatcggaaatcaaacaatatatgctacccaaaaaaattattaaaaaaaacaagagtacaacacgcaccacgccaaccaagtctaaactataaataacaacaacaaaatatttactaaatatacgcgacacaacgaaaataaaatagacgacaaagtggggctacagcggacagaacagcacgacgacaaactgggccagcgaatgaagactcatcgagcggatctggcgagagaacggcgatcttgggtaggcatcgcatcgcatcggatcggatccgatccgattggttgtggtaggagggattttgggggggctcgggattcgattcgtgcccatcagctgttccggaacagctgtcgcccacggcgaacgatgatgagtatggtatgtccccaccgcaaacacctgtaactcggcgattcttgaggttcgagatatgaaacttggtatgcgcacttgagatactaaaatataataaattataattaaatatatcacaaataaattagacaaagagtagacaaaggtatccgatggggttgagcgcaaacactctaaactgaatgctagtgaaccaatggaaaactgtcagcagtaacaattatttatgccattaaataaattaattattcgtattcataacagattcataacaatgaaaggtaatagttccaaaattatgccgatggcatggctgggtgaattctcaacatgtcattgtcattgtttggcacttagtaaacttttttgaatcaaattcgtacgctatgaaattaactatcccactcaaaaacccaaatcggcaccatcatcaatagtatgagtttcaagaggttggcaccacagatccttaagcatccgggatggcgtggtagagccactgggattccccgtttcaagg

SEQ ID NO: 17972 - DNA, 715 bp, DROSOPHILA
ggcccaaacgctgatgaagtcgcgtttggcgggcgccaccaagggacatggtctgctaaagaaaaaggcggatgccctgcagatgcgctttcgtctgattctgggcaagatcattgagaccaaaaccctgatgggtcaggtgatgaaggaggctgccttctccttggccgaggtcaagtttacgaccggcgacatcaatcagattgtgctgcagaacgtgaccaaggcccagatcaagatccgcaccaagaaggacaacgtggccggggtaacgttgcccatcttcgaaccctacacggatggcgtggacacctatgagttggccggcctggcacgtggtggccagcagctggccaagctgaagaagaactaccagagcgccgtgcgcctgcttgtccaactggcctccttgcagacctcctttgttaccctcgacgatgtcatcaaggtcaccaaccggcgagtcaacgccatcgagcacgtgatcatcccccgcatcaaccgcaccatagagtatatcatcagcgagctggacgaattggagcgcgaggagttctaccgactgaagaagattcaggacaagaaacgcgaggctcgcaaggcatccgataaattgcgagcggagcagcgtcttctgggtcaaatggccgaagcgcaggaggtgcagaatatcctcgacgaggacggcgacgaggatctgctcttctagacacac

SEQ ID NO: 17973 - protein, 231 aa, DROSOPHILA
MKSRLAGATKGHGLLKKKADALQMRFRLILGKIIETKTLMGQVMKEAAFSLAEVKFTTGDINQIVLQNVTKAQIKIRTKKDNVAGVTLPIFEPYTDGVDTYELAGLARGGQQLAKLKKNYQSAVRLLVQLASLQTSFVTLDDVIKVTNRRVNAIEHVIIPRINRTIEYIISELDELEREEFYRLKKIQDKKREARKASDKLRAEQRLLGQMAEAQEVQNILDEDGDEDLLF

SEQ ID NO: 17974 - DNA, 5538 bp, DROSOPHILA
tattatcgtactctaccttggtgtcgtcgatctcttccttaggttcttccaatacgatttcctgataagtggcatagacctcatcatcgtcgggcgtcttcaccgtctggacaatatcctcgcccatgacagccgcccggtagaaggccgagatgccttggcgttgctcctcggtcaatcccaagagtagctcacgctgggcggcgatgcagcgctccctcagcttaacggcggaggccagttccatgctgcagcattcacatatctgatccggcaggcaaccgtagttctccagctagattaaacaccaataaattaagctataactacataaattccataaagccgcagtgaaaaatttacccgaaggcctgtgagcgcctcaatgttgtcgatcatctttgtgttgctccgctcgaataacttcggcgaccgcttgttgcttgcatactttgcgcatacgcggcaggtgctctttaggtgtttcagcgccgatttcgacatttttcattcgcaatccgaaatgaaatcgtttttaagatatttgtgaacacaaaaaataaacgcgtcgcttgtcaactgcatttgccattcacccggtgtttcgtgttaatatttgccattcgccccgaaataaacatattttcagtggcgtaggcaaaggggttcatatgatgccaaaatatatatatatcctcgaaaatgaattactttgttaacgttagtattatatattgctttgatatttaacggatttgcatatttattatactccaataatatcacatataaatttgaattaatttgttttataattttaaatttataaaattataaataaaatcttttatttaaatctttaaattaaatcttttttataaattaatttctatagagctgcaagcgaaacgaaatatatacagtagaacaggttctaagctaaagtccctggaattagtacagtttctttggtgtatttcatccctgaccggctacgtccatgtcatgttggcaagcagctgtcaggaatgccgacaacaacaaccacgacgctatggcgaacttggaatggtaatttatttattttcccccgaaaataaacaaataagcattgataaccatttctcctgactgcagggtgtgcgtgccgcgatgctacgaggtccggaagaattgcctgactgggcaggccacgctggagcatcccctaaagcagcggacggtgacggtgggtaaatggtacaacgcccttatctgtaagtgattttaatgaaagaacaatctccaccaggtggtggacagcaatcccttgagccgagctctagagggcacagatccgctctcgcagtttgcacgccaagatgatgagctcaacgatccgctcagtcaaatggtcagcgaattcgtaagtagagtggtgcaccggcaaggaacatgactaagtttttcgcacttggatgttcaggatctcaagtcgaagcgtcgtgaacgggaccgaacggagcccgaggacaacacactgcagtggagcagccgacgactaggcatcctcaaccgctttacaaccaatgagaagctatcgctgtctaccagctttctggtgtcatctggtagcctggatggcggcaacgaaagcagtaagttcagtggtcggttgatctgtgatatatattaacaacaatcatagttaaagcacaaacggtggtggccgacaagacaaagtttcgcttggagcagttagaccacttcgacgatggcagcatgcgtcacatgatggatcttactcagcaggagtacattcagcggtttgagcaactcaagcaggagctgatccagtcctggcacaacgatcagcgagtaaaagcgttgaagatagccatacagtgtgccaaaatgctagcggacaccactgtgctgcaattctatccgagtcagtacgttcttatcactgatatactggatgtttttggaaaattggtatacgaacgactgcgtgctaaggcctctggagatcctgccgcatcggcggccacattagagcgggaacgggaagctgcccgggatacgtgccagaattggttttataagatcgcctcgattcgtgagttactgccgcgtttttacttggagctgtcaatattcaagtgctacgagttcctgtcatcatcgcgcgaggagtatgagcgcattttgcaacgtttgacccatcaactgaggggtatagctgatcctttggtatcgagctatgcccgctgctacttggtgcgcatgggcgttaccctaacgtcgagtaagacatacataagagagaactttgccgacctgttcctcatatatcctcaggtgagaccgagaaatattaaacgtttaatcacttttactacaaatttaatacttttaaagatctttcgcttcgtggcccgctttaatctgcatccggaaatcgtcaccgccagctcctacctacagctatatgccccagcctttgactacatgcttctctgccttgttcacaaaagcgaactgcacacccaggatattcttaatgagtgcaagcagttgaagaataagtaagtcatttttttttcagaattttaacagaactaattcgtattgcatttattcgcagtggtgctattctgatgtctgttttaagttccttcaactcagagttcattgcaacaaatgcattagagtttatagcgctaattaatgcttccgaaacgcccggaatctccaagtcccagttgctgcgctcgctgggaagctgcgttagcagctgccctcctctacaggagcagcgtgtaacttttctgaaggctgccttcgagacgatcaacaagttgactgatccaaatgagtatataaactgtgtggaaacatgggctgtctttgtatcacagtattttacggtcagttttaagtctatatccaaaatattatcaatgatgcttaagtctttttatcagatacacgaggtaaacagattgctaggagaactgaatacgcgaatgtgtcttggcaaagcctatgaaaagcactattcccaattgcaaaacattcttacccggataatgcaaaactatcgcagcattgagcttctgctgatacagcccaactttctgccctacttggatctctttcaaaaggagtcggtgcgggtcgaggtttgcaaaaacattctcagtttctacaaacagaatagtgacgaatatacttgcgacgctgtggtaacaaacgcattgatgtatctcgggaagatcttgaacgattcagtgaagtgcgtgttgctatagtggcaaagtttactttaaattctaatcacacaactatttattcagtgccctgtccgtggatgatgaacgtcgtcagatagctcagctcatcaatgtctttattcacaaagttcactttggaaatgacttggagcagcagctaagtttttatgtggaggcgcggggcacgttcagcaacctggacgcagtatacgttactctggtgcatgcggcctgcaagttagccacccgaaaccgttcgaaatcaacgggttttgttaaggcctgcatcgcctactgcttcatcaccattcccagcattgaagctgtccagcagcaaatgaatttgtacttactatgcggacagctggctctgcagcatctctgtctgggacaaggcaagtattaaattaatattgtttatctactttatataaatttatttctctacaacagctgatgcttgctttgaggccgctttgcaattggttaatgagttgcccgctgccacggtggactttgatggaaagcctcgcagcttagagccattccttgtctcgtatatgtgtaatatcctggccacattaatcgtggtaccagatagtccggaacagggtgtcctctattttcttcgccttctgctagaagtggttggcagacataaattcaaagttgacagctcagcgccgagtatcatctatctgcattccctcgatatgctgtatgtgcagagtctggaaaggtttccctatcatataaaaggaggtagtataaatggattacaattcgtatcgctgactaatggtttctaatacttatagtggtgtccaatgacgatttgtatggccacgaccccaaattcttgcaggaggtaaacaatatgtgcgctcaggttgttgatgccattcttctgcagctgaaatcgttgggagtagcgcagcagcaaagatcgcaagcggagctagccctggaactttttttaaggattgtaaagtacgctgatctggagagggaaactatcgctcaattggcagtcaatctgtggctcctagctaacaaggcacaatcacaattggatgtgaaaacactagtaagtgatagtatatttgtcaaccgtcatgtcccacttatttaatatgcgttttttctatgcagccccaaactctgcgcagtgtagagatcatatacaagcaaataaaggatgcatcacccataagggctcaaactattgccaaactgctactgcgcgtgcgcagcagctgacaatcgagcttgtaaatcctatggttatttatttgctgagattatatattcttatgtgcatgaatcttttacggattcatagcccggttctctcctacgtttttgcttaaccttgacgaggaaccgacaaattttgtattacatttctgtgcaattaaaagttataacgtttgtggatatgaataaaaattttaccatacctacgtaggtgataaacgcgtacttagtagatggtttcattaaactaaaacaacatttttatggtgtttgtaaaagcgcaattttttaatgcgtttactcaattatttattgcccaggcccgtttgccacagcccatttagcaactttagctgtgcgttaccaactatttatatgcgttaccacatttgaaattgtatgagacagctggtattacaaagagtatatcttattaattcacattgtagcactggtgtaaaagtggcatatacattgaattacgaatgagagtgtaaaaatacggtgtacatttgtgtattcttattatttttggtagttttaaacatttgaggcatttctgtcgtttgcaatttacaaataaatggctaaaaactatggctgacgaatgagaacaccaaattgaaatcaacgaacttaagcgaaagctatatgaatatcgaagttacatgtgagatatatcaccgtgtatgtatgcttacgtaaatatatatatatatatgattccaaatgggtatttcttgatcaaagatactaacgattttctgaagggtccttaaatatttacgagtaattcacctttttgttgggtgaaactatttagttattaaacttgtacaaaaataaaaataaaattttgaaaatttcacaaactttgtggcaaataattcaacaatatattgtaggtctattacgatataaaatgaattggcacttcatgtataaatatgttattaaaaaatcaaaacataatataattctagtttattcaaggccctaaaga

SEQ ID NO: 17975 - DNA, 2940 bp, DROSOPHILA
atgtcatgttggcaagcagctgtcaggaatgccgacaacaacaaccacgacgctatggcgaacttggaatgggtgtgcgtgccgcgatgctacgaggtccggaagaattgcctgactgggcaggccacgctggagcatcccctaaagcagcggacggtgacggtggtggacagcaatcccttgagccgagctctagagggcacagatccgctctcgcagtttgcacgccaagatgatgagctcaacgatccgctcagtcaaatggtcagcgaattcgatctcaagtcgaagcgtcgtgaacgggaccgaacggagcccgaggacaacacactgcagtggagcagccgacgactaggcatcctcaaccgctttacaaccaatgagaagctatcgctgtctaccagctttctggtgtcatctggtagcctggatggcggcaacgaaagcattaaagcacaaacggtggtggccgacaagacaaagtttcgcttggagcagttagaccacttcgacgatggcagcatgcgtcacatgatggatcttactcagcaggagtacattcagcggtttgagcaactcaagcaggagctgatccagtcctggcacaacgatcagcgagtaaaagcgttgaagatagccatacatcagtacgttcttatcactgatatactggatgtttttggaaaattggtatacgaacgactgcgtgctaaggcctctggagatcctgccgcatcggcggccacattagagcgggaacgggaagctgcccgggatacgtgccagaattggttttataagatcgcctcgattcgtgagttactgccgcgtttttacttggagctgtcaatattcaagtgctacgagttcctgtcatcatcgcgcgaggagtatgagcgcattttgcaacgtttgacccatcaactgaggggtatagctgatcctttggtatcgagctatgcccgctgctacttggtgcgcatgggcgttaccctaacgtcgagtaagacatacataagagagaactttgccgacctgttcctcatatatcctcaggtgagaccgagaaatattaaacgtttaatcacttttactacaaatttaatacttttaaagatctttcgcttcgtggcccgctttaatctgcatccggaaatcgtcaccgccagctcctacctacagctatatgccccagcctttgactacatgcttctctgccttgttcacaaaagcgaactgcacacccaggatattcttaatgagtgcaagcagttgaagaataatggtgctattctgatgtctgttttaagttccttcaactcagagttcattgcaacaaatgcattagagtttatagcgctaattaatgcttccgaaacgcccggaatctccaagtcccagttgctgcgctcgctgggaagctgcgttagcagctgccctcctctacaggagcagcgtgtaacttttctgaaggctgccttcgagacgatcaacaagttgactgatccaaatgagtatataaactgtgtggaaacatgggctgtctttgtatcacagtattttacggtcagttttaagtctatatccaaaatattatcaatgatgcttaagtctttttatcagatacacgaggtaaacagattgctaggagaactgaatacgcgaatgtgtcttggcaaagcctatgaaaagcactattcccaattgcaaaacattcttacccggataatgcaaaactatcgcagcattgagcttctgctgatacagcccaactttctgccctacttggatctctttcaaaaggagtcggtgcgggtcgaggtttgcaaaaacattctcagtttctacaaacagaatagtgacgaatatacttgcgacgctgtggtaacaaacgcattgatgtatctcgggaagatcttgaacgattcagtgaatgccctgtccgtggatgatgaacgtcgtcagatagctcagctcatcaatgtctttattcacaaagttcactttggaaatgacttggagcagcagctaagtttttatgtggaggcgcggggcacgttcagcaacctggacgcagtatacgttactctggtgcatgcggcctgcaagttagccacccgaaaccgttcgaaatcaacgggttttgttaaggcctgcatcgcctactgcttcatcaccattcccagcattgaagctgtccagcagcaaatgaatttgtacttactatgcggacagctggctctgcagcatctctctgatgcttgctttgaggccgctttgcaattggttaatgagttgcccgctgccacggtggactttgatggaaagcctcgcagcttagagccattccttgtctcgtatatgtgtaatatcctggccacattaatcgtggtaccagatagtccggaacagggtgtcctctattttcttcgccttctgctagaagtggttggcagacataaattcaaagttgacagctcagcgccgagtatcatctatctgcattccctcgatatgctgtatgtgcagagtctggaaaggtttccctatcatataaaaggagtggtgtccaatgacgatttgtatggccacgaccccaaattcttgcaggaggtaaacaatatgtgcgctcaggttgttgatgccattcttctgcagctgaaatcgttgggagtagcgcagcagcaaagatcgcaagcggagctagccctggaactttttttaaggattgtaaagtacgctgatctggagagggaaactatcgctcaattggcagtcaatctgtggctcctagctaacaaggcacaatcacaattggatgtgaaaacactaccccaaactctgcgcagtgtagagatcatatacaagcaaataaaggatgcatcacccataagggctcaaactattgccaaactgctactgcgcgtgcgcagcagctga

SEQ ID NO: 17976 - protein, 979 aa, DROSOPHILA
MSCWQAAVRNADNNNHDAMANLEWVCVPRCYEVRKNCLTGQATLEHPLKQRTVTVVDSNPLSRALEGTDPLSQFARQDDELNDPLSQMVSEFDLKSKRRERDRTEPEDNTLQWSSRRLGILNRFTTNEKLSLSTSFLVSSGSLDGGNESIKAQTVVADKTKFRLEQLDHFDDGSMRHMMDLTQQEYIQRFEQLKQELIQSWHNDQRVKALKIAIHQYVLITDILDVFGKLVYERLRAKASGDPAASAATLEREREAARDTCQNWFYKIASIRELLPRFYLELSIFKCYEFLSSSREEYERILQRLTHQLRGIADPLVSSYARCYLVRMGVTLTSSKTYIRENFADLFLIYPQVRPRNIKRLITFTTNLILLKIFRFVARFNLHPEIVTASSYLQLYAPAFDYMLLCLVHKSELHTQDILNECKQLKNNGAILMSVLSSFNSEFIATNALEFIALINASETPGISKSQLLRSLGSCVSSCPPLQEQRVTFLKAAFETINKLTDPNEYINCVETWAVFVSQYFTVSFKSISKILSMMLKSFYQIHEVNRLLGELNTRMCLGKAYEKHYSQLQNILTRIMQNYRSIELLLIQPNFLPYLDLFQKESVRVEVCKNILSFYKQNSDEYTCDAVVTNALMYLGKILNDSVNALSVDDERRQIAQLINVFIHKVHFGNDLEQQLSFYVEARGTFSNLDAVYVTLVHAACKLATRNRSKSTGFVKACIAYCFITIPSIEAVQQQMNLYLLCGQLALQHLSDACFEAALQLVNELPAATVDFDGKPRSLEPFLVSYMCNILATLIVVPDSPEQGVLYFLRLLLEVVGRHKFKVDSSAPSIIYLHSLDMLYVQSLERFPYHIKGVVSNDDLYGHDPKFLQEVNNMCAQVVDAILLQLKSLGVAQQQRSQAELALELFLRIVKYADLERETIAQLAVNLWLLANKAQSQLDVKTLPQTLRSVEIIYKQIKDASPIRAQTIAKLLLRVRSS

SEQ ID NO: 17977 - DNA, 6804 bp, DROSOPHILA
tttattgagatatcccatttaactaagggcaacatacttcttggccttgcgcttggcattgtagagtttctccctgtactttaagaggaatctgttcacagctctgccgccgtagccaatgttgcgggatttaatccatttgaggttcatgaagggcggcagggcgtgttcgcatgctttgtatgagacctgcaggccaaatgcgttcttcaccgccttctggggccgttcacccgtttcacctgtttccagcaggtgatacgccttgttccgctccctcactactgtctccaggttttccatggagattttcacctgcaattctaaagttttagaaaaggatctccaccatcaaatatcgcccaccttatcgatgcgctccggactagggaagacttccattttgtcattgcactcgtgctccatggtcagcagcatgttgcgctccttgaggagcacgaaccacagctggtgcagctccttgttggacttgatacgcagctcctccgtccgccaggcgcggcccaccttcacctcattctcgctccagttcttcttgtcgtcgaagaactccataagatcccggcgaacagcggaagtgtgcatttgcatcggcatttgaacatgcggcgtttgcagggcagccgcactacatattacataaaaacaaaggcgcgtttatatcggttactctgtgtaaaagtcggatttgtgaaagagaacggacctgcacgactgccatggctgcttgggagctgccaaaaagctcctgactgtcgcatttcccacagtttttgccaaatttaaacattttattaacgccgaagacattttttcgaccgaacaaaacagctgaagcaataacaatcgatacttttttgtatcgatttattggattgcgtgcgtactacatttttagccgggctttactccatttcagggctgccatgcatttcaactgaaattagtcgatagtataatttcagcatcgacttgttggccagctctagttgcgcttcgctcagtgctaatgaaaaatcgaatttttcgcttcaaatcgactgaagtttacacgggctaaagtattacagaagtttggctcaagccattacacaacatgcaataagtaaatgtaagtgaagtggccactccccgaaaaaaacaacgcgctgcactgtcatcttctctgttccatccaatccaatttgtatgccaaggaacgccaacttaatgtttggctgtgtgcatgcatgtgtgattgtgtgctggtgtttgtgggtttcagtacacaaatttaaattgataaaactcgacaaaggcagcggttctgaattgcagcgagtgcagggaatgcactgccaagtgcctgttaattgtgcatttatcacagcgaattcaagcaatttgcacctcgaaatgggcattcaaaaacaaattcattgaagagtaacgccaggatgaaaaaaaaaaaaacaaatgtagaacggtatagtaacaggacagtgttgccgagctgctccaagttccccggtactattgccgtgcagcgcagtgtagcgtacataaatatttatctcactgccttatcaggcagcattattgttgaagcgactgtgtatctgtgggcatattaattgtttgtttgtctgctcttagcaagtgttatataaagtgcagaacatcattgagttaaaaggtcagcgagtgaattgattgatcaatttggcaaggggaaggcgcaatgtgggggctacggagtaacttgtagggttttcttcgctcggctttcgtgcttttatcatttcccctttcccacttttcgaacaacttttctgctcacggtgaacgcccaaataaaaaaaaacacaaacaagtcttcttgtttgtactgtcgccatgcgcgcgtgtgtgtgagtgcttcggctttttgtgaccaggggttaatttaacggtgtcgccttaattatccgggttctgcatattcctccggtgtttgctttctccggacttgtgctgccacttgttgcccctgttaacggcgctgttagctgcaatccgaatcccccggtttcgtcgccatatcgtgcgataacctttcatttgccaatcggttgattatcatgttcttaatgaaagtagcaacaaatagctgaattttcgcttgcccaaacttactcagcgatgttttagaggggaccctcatcactactcctacagtttttagtttgcgacgcccattggtgataaatacttgtgtacatacatacaacatgtgattatttttatggaatgtgtttatctggaaccctctctatatgcgtcaacacataattgcacatgtttaaatttcccgaaaataaaatgtatatacaatgcctgcagctatagctgctgtcattgactttactttcattttagcagtgtaagttttaaattttgtttcctcccatccaagatatgaaactgtaactatgaaaactcactcctgagctgctccgaaaatatcatgaatacgacaattatgtgcacatcatttagtatacgtgatattttaggagcagctaaattatatttaaagttccgtaatttattgctttctcgtgatatactaggcaaatacattcacatacactgataaagaaactcagttatcgtttatttacaaacacaaccagtgttgacctcaagttaaagttaaagaatcggtaaatggcttgccaatgctcgattgcttcatcaaactcaccattgcttataacagtgccaattttaatgctgaaatcttatctacgaatattaactacaaccatttctcagttctttagtctaatgtaaaccaacttaatgtaagctacttctgtgtgtctggtaatgtggaggcagtgagtagttgtgctgtattctcttaaagctctgctctattcattaagatgtgcgtgtgcattgaggaagaaagccaacgaaagttgttcgccacattaccggcaatgttgcaacatcgggcgcgttgtaatcgtgtgcaagatgcgcgaaatccagtcaaacgcgaacagaagaacgcgcctcgaggcgcaatgttattaaataacaatgcagaaagagcagggagcacggagcagcagccacctcctcatgggaaacattaccagggtgccagttgaagagtctacaatgaaccacctcaaaccacgatccttcttttttcctcttttctcgtttccaaagacagaggagctaaaatgtcgcaaaaagaattggcggctctggttgccacgagaacgagtcgcaaacgcaccatatcctcgacctcattctctatttccactcgcactgatccaaaatccatcatagagatacacatattcaatgactccttgcccataaaaagagcttgctgcgaagtggagaatccaactttaaaagcggaacagcgagtgcagcaggaagaagagagcctgggccaagtgccgccgctgaccgaggaagagcagcagcggcacgatgagttccgaaatagtggttcgatattcctgcaggatttgccctgctttaagctgcagcaggcacagccgatagcaggatcatcacccattcccaagtgtcgggagtgcagaagaagaaatttggctacaacagagggcgaacccagttcagttagcgacgtttactgccggttctacgagttccgacgccttcagttcaatgagaatggagagctgtgcgtggttggcttcccaaatccctacagcgagccctcaccagaggacatcgccatttggcagccggataaaaatacaccgccgaccagcggttacatggatatacaggtttgcaggtacatcctactccatgccggcgaccagttctgctatatttggcaccaggaagcagaggctttaagtttgcatcagaatacggacggaaccattgcctggaagaaggccgtaaaaggaacacgagagatttgcgacgtgtgtgacaccacattgttcaactaccattggacttgccgcaagtgcggctttggagtgtgtctggactgcgttaaagatcgcaaggagggattgcgactgcggcgagcggagaacgctgcccaaaagggatgcgatgagtaccactggctgctctgcagcgaccccagtggcccacaggagcacgtccttaccgagctgatgctaacacagatcatagccggagatgccctcaacgtcttgggcaggctgctgcacgaggttcgtactttgtggcaggtgccacaggtctgcggctgccttctgagcaagcaagcgattgaagatgcacaatcaaaggaagtgatccaggatatgattaaggagtctcagctgaagcagcacaccagctactcgtcgctggcctccgagcagaaggtgcaccagcaacagcgcctcgatcaactgcacgccacgaagttggagtttgccagagagctaggtgtagattatgttccaggtcgagtgtggaccaaggaaaccttgggaaaggatccaataacaacggcgtttgataatttgaagcacattaattttctgagaaagggattggccggcttgagaaggtttcttccaccaaggaccatgacttttgcttactccactcagttggctccaggagttcctcacgagtttctgtgcgatggcagactgcttagactcaccgatgccatgcatccggataatcgagttcttttccaggaggtttggaaatgcggccagccagttatgatttcggaggtggctcgctctttgaacttagacttatggcatccacaagccttttgccgggactttggcgacaagcccaatgatcttattaattgcctgaatggcaatctggtgcccaatcagccaatgcgacacttttgggagggttttcagtgcatgaccaagcgtctgccagatgcatatggcaagccaatgctcttaaagcttaaggattggccgccgggtgatgattttgccgaaatactgcccaccaggtttgctgatttgatgaagggactgcccatgccggagtacacacttcgcacgggaaaccttaacatagctagctgcttacccaagatgtttgtgccaccagacttaggacccaaaatgtacaacgcatatggctcagcattgcaccccgacaagggtacaaccaatcttcacttggacatttcggatgcagtgaacataatggtttatgtgggaataccccaggatggggacacgagacctcagatggcggccacgcagaaagccatagaaattggcggatgcgattacatcactagagctcgttgccaatcgccagatgtattacccggagcactttggcacatctttccagctcgcgatgcagacaaaataagagatttacttaaccgcgtgaccctggagaagggtttccgtctggagccggatcacgatccaattcacgatcagaattggtacttggacgacaagttgcgagctcgtttattcaaagagtatggcgtggaggggcatccgattgtccagtgcttgggcgacgcagtctttataccagctggcgccccacatcaggttcaaaatctccacaactgtattaaggtggccgaggattttgtatcgccggaaaatatcacgcactgctatcatctaactcacgagtttagaaggctttcgcactcgcacacaaatcacgaggacaagcttcagatcaagaatattatctaccatgccatcaaggactgttgcaccatcctgaccagagctgtggatgagagacttaatgcggaattaaccaagctaaatgcagattagaattttcttaccttttagtttttttcaactatttaacatttattattattttttaagatcaaaaattgtcaaatattcaataaatacttacttagaactaaataaaaggtacatttatttatttgtcatccagtgcataattaagtaaattttctattttaaaaacctaaataaatatcaattcaaattaattgatttaattgaaatttctagtatttacatagacaacactaagcctaagcaagatactctccagcaacaaatgcccatgcatgctgaggacggagctgaatctgatgatgaggagtccagcccaggcagacattagcatcgtaaggatcatactactaatttggcgcccatatagaagtcaagtcaattacaacgccagaaagccttttatgttaatcgagagtggaaagggaaaataatttttttgctaaactagcctagagatcgaaatattaagaatacaactaaaatgacggtggatttcaacgattatttttgggtgagttaaataaggtgcatatggacggatcattgcttaaatatattcttccatttaatatccagggggagaagaacaatggctacgatgttctgtaccacaacatgaagttcggcctgattgccagcaaggagttatccgagtttctgcgcgagaagtctaacattgaggagcagaactcaaagatgatgtccaagctggcccacaaggctggtacactaaatagcacattcgctcctgtttggaccatactgcgaacatcggcagagaagctctccacgctccacctgcagatggtgcaaaagctgactgagctggtcaaggatgttgccaagtatgccgacgagctgcacaaaaagcacaaatccgtcaaggaggaggaatcgcagactcttgagtgtgtccaagccatccagacgtcgacggtggcagtgcaaaagttgcgcgatctgtacgccagcaaggtccaggagctggagaagctgcgca

SEQ ID NO: 17978 - DNA, 2711 bp, DROSOPHILA
ccagctctagttgcgcttcgctcagtgctaatgaaaaatcgaatttttcgcttcaaatcgactgaagtttacacgggctaaagtattacagaagtttggctcaagccattacacaacatgcaataagtaaatacagaggagctaaaatgtcgcaaaaagaattggcggctctggttgccacgagaacgagtcgcaaacgcaccatatcctcgacctcattctctatttccactcgcactgatccaaaatccatcatagagatacacatattcaatgactccttgcccataaaaagagcttgctgcgaagtggagaatccaactttaaaagcggaacagcgagtgcagcaggaagaagagagcctgggccaagtgccgccgctgaccgaggaagagcagcagcggcacgatgagttccgaaatagtggttcgatattcctgcaggatttgccctgctttaagctgcagcaggcacagccgatagcaggatcatcacccattcccaagtgtcgggagtgcagaagaagaaatttggctacaacagagggcgaacccagttcagttagcgacgtttactgccggttctacgagttccgacgccttcagttcaatgagaatggagagctgtgcgtggttggcttcccaaatccctacagcgagccctcaccagaggacatcgccatttggcagccggataaaaatacaccgccgaccagcggttacatggatatacaggtttgcaggtacatcctactccatgccggcgaccagttctgctatatttggcaccaggaagcagaggctttaagtttgcatcagaatacggacggaaccattgcctggaagaaggccgtaaaaggaacacgagagatttgcgacgtgtgtgacaccacattgttcaactaccattggacttgccgcaagtgcggctttggagtgtgtctggactgcgttaaagatcgcaaggagggattgcgactgcggcgagcggagaacgctgcccaaaagggatgcgatgagtaccactggctgctctgcagcgaccccagtggcccacaggagcacgtccttaccgagctgatgctaacacagatcatagccggagatgccctcaacgtcttgggcaggctgctgcacgaggttcgtactttgtggcaggtgccacaggtctgcggctgccttctgagcaagcaagcgattgaagatgcacaatcaaaggaagtgatccaggatatgattaaggagtctcagctgaagcagcacaccagctactcgtcgctggcctccgagcagaaggtgcaccagcaacagcgcctcgatcaactgcacgccacgaagttggagtttgccagagagctaggtgtagattatgttccaggtcgagtgtggaccaaggaaaccttgggaaaggatccaataacaacggcgtttgataatttgaagcacattaattttctgagaaagggattggccggcttgagaaggtttcttccaccaaggaccatgacttttgcttactccactcagttggctccaggagttcctcacgagtttctgtgcgatggcagactgcttagactcaccgatgccatgcatccggataatcgagttcttttccaggaggtttggaaatgcggccagccagttatgatttcggaggtggctcgctctttgaacttagacttatggcatccacaagccttttgccgggactttggcgacaagcccaatgatcttattaattgcctgaatggcaatctggtgcccaatcagccaatgcgacacttttgggagggttttcagtgcatgaccaagcgtctgccagatgcatatggcaagccaatgctcttaaagcttaaggattggccgccgggtgatgattttgccgaaatactgcccaccaggtttgctgatttgatgaagggactgcccatgccggagtacacacttcgcacgggaaaccttaacatagctagctgcttacccaagatgtttgtgccaccagacttaggacccaaaatgtacaacgcatatggctcagcattgcaccccgacaagggtacaaccaatcttcacttggacatttcggatgcagtgaacataatggtttatgtgggaataccccaggatggggacacgagacctcagatggcggccacgcagaaagccatagaaattggcggatgcgattacatcactagagctcgttgccaatcgccagatgtattacccggagcactttggcacatctttccagctcgcgatgcagacaaaataagagatttacttaaccgcgtgaccctggagaagggtttccgtctggagccggatcacgatccaattcacgatcagaattggtacttggacgacaagttgcgagctcgtttattcaaagagtatggcgtggaggggcatccgattgtccagtgcttgggcgacgcagtctttataccagctggcgccccacatcaggttcaaaatctccacaactgtattaaggtggccgaggattttgtatcgccggaaaatatcacgcactgctatcatctaactcacgagtttagaaggctttcgcactcgcacacaaatcacgaggacaagcttcagatcaagaatattatctaccatgccatcaaggactgttgcaccatcctgaccagagctgtggatgagagacttaatgcggaattaaccaagctaaatgcagattag

SEQ ID NO: 17979 - protein, 854 aa, DROSOPHILA
MSQKELAALVATRTSRKRTISSTSFSISTRTDPKSIIEIHIFNDSLPIKRACCEVENPTLKAEQRVQQEEESLGQVPPLTEEEQQRHDEFRNSGSIFLQDLPCFKLQQAQPIAGSSPIPKCRECRRRNLATTEGEPSSVSDVYCRFYEFRRLQFNENGELCVVGFPNPYSEPSPEDIAIWQPDKNTPPTSGYMDIQVCRYILLHAGDQFCYIWHQEAEALSLHQNTDGTIAWKKAVKGTREICDVCDTTLFNYHWTCRKCGFGVCLDCVKDRKEGLRLRRAENAAQKGCDEYHWLLCSDPSGPQEHVLTELMLTQIIAGDALNVLGRLLHEVRTLWQVPQVCGCLLSKQAIEDAQSKEVIQDMIKESQLKQHTSYSSLASEQKVHQQQRLDQLHATKLEFARELGVDYVPGRVWTKETLGKDPITTAFDNLKHINFLRKGLAGLRRFLPPRTMTFAYSTQLAPGVPHEFLCDGRLLRLTDAMHPDNRVLFQEVWKCGQPVMISEVARSLNLDLWHPQAFCRDFGDKPNDLINCLNGNLVPNQPMRHFWEGFQCMTKRLPDAYGKPMLLKLKDWPPGDDFAEILPTRFADLMKGLPMPEYTLRTGNLNIASCLPKMFVPPDLGPKMYNAYGSALHPDKGTTNLHLDISDAVNIMVYVGIPQDGDTRPQMAATQKAIEIGGCDYITRARCQSPDVLPGALWHIFPARDADKIRDLLNRVTLEKGFRLEPDHDPIHDQNWYLDDKLRARLFKEYGVEGHPIVQCLGDAVFIPAGAPHQVQNLHNCIKVAEDFVSPENITHCYHLTHEFRRLSHSHTNHEDKLQIKNIIYHAIKDCCTILTRAVDERLNAELTKLNAD

SEQ ID NO: 17980 - DNA, 2718 bp, DROSOPHILA
aggcacgcgaaatgaatcggaacacgggatgttatgcatggtagatatgtatgattgtgcggggccagaatacatcgcctgggtataaattattaaataaattatgtattcaaactgctgcagattggccaacttgattggtaatgaaacgggtattacattgatttttcattgtcgttcattgcagttaattatttattgaacagcggccggatttctgtttgcaactatgttgaaaaggaagctgtgattttttaacaaactctgttcattgtaaagtttaaaatcattccaatttaatgccctcaaaacctacgctgaaatggtcagttttaaaacgatatttattaatattttagttaatttactaagattatccgttttgcacttttaatgccttgcatttggtaatgcgtgattgttatttaaggtctgcatgaatttagttgattccgtttattttagctttcaaaatgtaataatcttctaatttacaactacacagaacgattaaattatgagtattgctataaaatcggccaaccgcgactagaaatactcgacttttaaggtcaacataaaagtaagtcaatgttttgattataagatttgatcaattacttctttacggatgatataatcatcgataaacgaagtacgaaaaaagctatgaactaaaatttggaaatttcccacatgcgactaacttttgaattgcaattggattgcctactgtattaagacagaaacaagttttggaaatgaatgaatggtttaaattgtttcaagtttttttaagattttttttgttttcaataaatttagttttaatagaaaaaaagatatattcattttagatttctgaatacttgtgttatatcgctttttattcaagtgtaataatcaacatatatatcatataatgataataataaatgtaacgtcccaaattaataataatataaagtagcatttgcgattgtttgccaaagcttaaagcagaatatatatttaatccatttcgatcattcgtaaagagtaacatgcaacaagctgtaaaaaacatcgattgtagtatatatgcacatggttggtttggaaccagatccagagataatcgcgtcgaccaggtcagttggggtcaatgattttcgcattaggaggcctaatttctgaccacggagcagtactcccgcagagccttcatatcacaggactttttgcagcacctctccacgattccttgccgttggcgagttcgcctccggacttcagccagggaattgagtacacccccaagatagctcccaggaaagagggcacttcgcagcggttccgatatcgagttatcctcctcctcgaactcctggacaaactgcaggggattgagggcgtccagatcgctgtcggcaccggctaataaaaatcgtggatacaatgtagatctagcaaagccagcttgaggatctgcatccttgtaagaacttacgcatggcgcgcttgtgtggaatcacgggattatactcctcgcacaccatactcagcacctcgttgagcttttcactgcagagcgttccttgggccaacttcactgtggagctggccagcaaaatcacggccaccatcgagatgaaggacaaaggcttgctcatggttatgggtttactgcttaggttgctttacgatcaaatggattaagttgggtcgagccgggtcgaaagctaactgatgatgtttggcccaaagtaactggcttatatactgcctcgtaagaaacttaaactgggtctgggtcggggtcggtctctcggggtcggggtctggatccacacacatgttatcctcaaaagtcaggttgtcaaattgtgttaggatgcgatgagtgcattccggagttggctcttctctctaacgcctggctaaactcattcaatgtcaaagctgacttatgcaaatggctattggaaaattgtgggtggtttttgggtggctgtgtttgggagaagaagggctttgtgggcgttttgctgtcagccaattaaacaatttatgtataaacagccaggccgtactaagccctgcatttatgaataccaaataagtccttggtcttaaagttacctcgcctttacagcccgtttgcctctaccatttctaccctatacttaccaatccgcgcctgggcgcccggcaggccggagtaggccaacaagaacccgagccagctgattggagccagcagcatcctggcaacgaattacgcctccttggtacttttcctttgactgtcttgtctttgccgctcacacaaattcttctttttgcactgtctacttttattcattagtcaaagttggtgctgcataaataagtgattacgaattggattacgaatgctgttaggagaacgggtgtacatatagtatgtatgtgggaatgccatgttcaagtgttcgtatgtatgtatgtatgtgtatgcatgctgggtaatgaatgtgtgtgtgttggccaagtgtcctatttcggtagacagtagatggctaactccaagtagctgcaggtcttgacgcagcactcgtcgtagacgccaccggtcaggtgtctcctgtggcgacgcatcttgatcaggacctcggatccgtacagattggttagcagtggactaaaagagtatcctgccccgtccagtgtctgccacatgctgctatcatcctgcac

SEQ ID NO: 17981 - DNA, 645 bp, DROSOPHILA
tcgacccggctcgacccaacttaatccatttgatcgtaaagcaacctaagcagtaaacccataaccatgagcaagcctttgtccttcatctcgatggtggccgtgattttgctggccagctccacagtgaagttggcccaaggaacgctctgcagtgaaaagctcaacgaggtgctgagtatggtgtgcgaggagtataatcccgtgattccacacaagcgcgccatgcccggtgccgacagcgatctggacgccctcaatcccctgcagtttgtccaggagttcgaggaggaggataactcgatatcggaaccgctgcgaagtgccctctttcctgggagctatcttgggggtgtactcaattccctggctgaagtccggaggcgaactcgccaacggcaaggaatcgtggagaggtgctgcaaaaagtcctgtgatatgaaggctctgcgggagtactgctccgtggtcagaaattaggcctcctaatgcgaaaatcattgaccccaactgacctggtcgacgcgattatctctggatctggttccaaaccaaccatgtgcatatatactacaatcgatgttttttacagcttgttgcatgttactctttacgaatgatcgaaatggattaaatatatattct

SEQ ID NO: 17982 - protein, 137 aa, DROSOPHILA
MSKPLSFISMVAVILLASSTVKLAQGTLCSEKLNEVLSMVCEEYNPVIPHKRAMPGADSDLDALNPLQFVQEFEEEDNSISEPLRSALFPGSYLGGVLNSLAEVRRRTRQRQGIVERCCKKSCDMKALREYCSVVRN

SEQ ID NO: 17983 - DNA, 3858 bp, DROSOPHILA
cggccaccgctgcctccaacgtgatcacaacagacgcctcggtgagttcggtggacgagacgaggctgcagatccgactacccggtggcattcagcgcaccaaatcctttccagccggcgaggtgctggctaccgttcgtgtctacgtgcgaaacgagatgctggcggcgagcgatgtacgcgactttaccctggctaccagttacccacgaagggagttccaaacggaggacgaggtcaagaccctgaacgagctaaatctagtgcccaatgcggtggttctggtgctgaccaaggagcaagtgaatcgtgtggttcaaagcggtggctccctgatgaccatgctgggcaccgtaatttgggctttgctcacaccggcggccaaggctttcgactacataaacaagatgggtcttcgaccgctcacccagaagctgagcgtgttcatggccaacttccggtggccagggcaacgggccggcctggaagtttaccagggcgatgcgtgagtactgcctcttcacttatttttcatattttgataccactctcttgatggttttagtgctgcccgtcgcaacatggatatgttctccctgcgaccgacaccagctccaggctacgaatacgatggtgcttcaacggaacagactggcggatcagcggagcggcccactccacaaaatcaaccgggaccgggaaatactccgccggctcataacaccagccaagcttccgcttcgcagtctcagcaattccaacagcgacccggtggctatcagccgccaaaatatggtgactcgaatattcgaagattgcaggatacgaagaaggatgaaaaggataaggacaaggcaacttataatggaaactccacgcagcagcaatagaataacgcaattcctttacagtaatctgtttgacgacagtctatagctatcgaactatgcaataacctgttatgctaaatttaattatatcaattcaatattccaaaatatcaattcgatgtgttttaatcaaacaaatgtgatcttagtaactagtaagagatacagtatgattggacagcttggtcagttttatgcagctgaaattaaactgaaattcaatagaacaattaggtaatcgtcacagaaatagtatatatgagtttgaaatacaaatatattcacaatgaatgtcttttaaggggggagttcatgcttataagctttaaatagaaacaaaacaaagttaatgtcaacaaaggagagcttacaaactaataagtgtgaaatcaaatacagattggttaacatcgtacgatgtttagaatttagtacaatataatcctatcgaattgtggatggataaccaaacaataaatgtataaattggtagatccttttaagtatatattataaaatatgacatctttttttttataatttactagttttgcagctatataaaaacgagtgttttagttcgtttatgattgttaagctccgaatctccagcacaccaaatcagtggaagtatcaaataaaattggagttaacgatgagtcctcctaaggcgcgcctcaaaatacttcccagcttgggttacacaacgacctgtttacaaggtgaaccacatgaggaattgcagcaacttgtagacgtttacgagcggtaacttccaatggcttttcctttgtagcggtggcaccaggctgggatagtgcacgaggctaccgatgtggcaattagtaatgatagtgccaccaggaacaccaacgggcacagcatcgccctgcttgataccatcgcagtcgatgagctccagggatttgctaaagcaaatgcgaatctccgatagatagctgatgccgtgtttgccatcgtacaggcagtggatggacggattcttccctagtgccttgactatcgcattattgatggccgccaccgtattgttggaatcgggatggatgtccgaggcgtctagaatgcgcgacatgatgtactcctcacgccaagtgagcccctgctcgaagtacttgagttcgttgtccagttcctccaccagcatggcgcatgttccgtgcttctgccactcgtgtttccaaagccactccgtggagtccatgcctttgagatccggccaaaaggtctccagtcgatcctcaatgggattcagtttgcttggatcaaagttggccgagttattgcagaaattcggtcccatttggtgcagtttcgttggccagatgccgtgaatggtccagaactccttcttctggggcagactgcactcctggtcgggattctcctcgcgccaatgatagcaagtggtcaccggccattgttgcgtgaaaatcagcacatcccagttgtgatcctgcacagacatctccctcgacgagtcttgcagagaatcatcatcttcccgaaaggggaaaccatcgaattcactgtcatcgtctggacgtttctgtgtcttctcattcaccgaagtcgattcatccgaatacgatatgtcgctgcaatgggtaatatgaaaccatgagtaattcggttcatttgtccgcctgctttgtttattgttaggcaaaaagtggattactgggtcaaccttgaacttgaatatatatcccggattaccgaaatataaagtttgttggttggcaaaaatccagaaatgaatccaatagaattttattttccatcgtttgtactcacctgaggggcgtggatttgatagtcaccagaaaacaggccaaaatggccacgaatagaaaccgctggctctgcattttgttgtaaaataataataataataactgcgatgcaaaatccgtagatggtatcgatatatcgagttcctgtatgtcgatgaatcgactgttcgtttggtatttttaatcgattttatattcgatttatgtaactttggcacctgagcttgaaatatttgaatatttgaaatatctggaaatatatttctaagccaaactaattgatatattcatgctttttgagaaaaaaattctttttagatgcgatttcaaaaactctattagctttagacgcttaataacttttccacttatcaacacccaagctggttaataaattacgacagacttatcttactaagaaaatgaaaaaattatttcagctgattaggattaattaaacacatcgccaggttgtctgctctgtctttagagtcgagtcggtgtcttgaaaatcccctggccactgatgatgataagactcgaaattgtgtggttcgcctatgttttcctttttagtcatcccactttaattagtgacaacgataattacacattgcaatgctgctgttgtcttttatcttttctggtgttgacttctgttgaaaacccaatgactagagctacaacagcggcagcaacaaatcaagtaacaacaacaaacgatggcagcaattgcttagcaattgattattgcttaactgaactttgtacttttgatgatcccacattttattttttcttatgtccccaattttttttttggggggggggggggttgcgatgcgctgaaacatacgacatagtgggtggttgagtggccagctgtcggaattccggacaagtggggtaaaactgtcacacttaatgccccataattgtaagggatattaaaggagtaactaaggtataagcaatcttggaaaagttcgtaagtttcttttatttattaaaaaaaagttaagtgactacatacatatatttactaatatgctacaaaaaacaccacattaacttatgatttttactacaattgctctaaagaaaatgttaagggaatctatcaactttcctctactataccaagaaagaac

SEQ ID NO: 17984 - DNA, 1659 bp, DROSOPHILA
catacaggaactcgatatatcgataccatctacggattttgcatcgcagttattattattattattttacaacaaaatgcagagccagcggtttctattcgtggccattttggcctgttttctggtgactatcaaatccacgcccctcagcgacatatcgtattcggatgaatcgacttcggtgaatgagaagacacagaaacgtccagacgatgacagtgaattcgatggtttcccctttcgggaagatgatgattctctgcaagactcgtcgagggagatgtctgtgcaggatcacaactgggatgtgctgattttcacgcaacaatggccggtgaccacttgctatcattggcgcgaggagaatcccgaccaggagtgcagtctgccccagaagaaggagttctggaccattcacggcatctggccaacgaaactgcaccaaatgggaccgaatttctgcaataactcggccaactttgatccaagcaaactgaatcccattgaggatcgactggagaccttttggccggatctcaaaggcatggactccacggagtggctttggaaacacgagtggcagaagcacggaacatgcgccatgctggtggaggaactggacaacgaactcaagtacttcgagcaggggctcacttggcgtgaggagtacatcatgtcgcgcattctagacgcctcggacatccatcccgattccaacaatacggtggcggccatcaataatgcgatagtcaaggcactagggaagaatccgtccatccactgcctgtacgatggcaaacacggcatcagctatctatcggagattcgcatttgctttagcaaatccctggagctcatcgactgcgatggtatcaagcagggcgatgctgtgcccgttggtgttcctggtggcactatcattactaattgccacatcggtagcctcgtgcactatcccagcctggtgccaccgctacaaaggaaaagccattggaagttaccgctcgtaaacgtctacaagttgctgcaattcctcatgtggttcaccttgtaaacaggtcgttgtgtaacccaagctgggaagtattttgaggcgcgccttaggaggactcatcgttaactccaattttatttgatacttccactgatttggtgtgctggagattcggagcttaacaatcataaacgaactaaaacactcgtttttatatagctgcaaaactagtaaattataaaaaaaaagatgtcatattttataatatatacttaaaaggatctaccaatttatacatttattgtttggttatccatccacaattcgataggattatattgtactaaattctaaacatcgtacgatgttaaccaatctgtatttgatttcacacttattagtttgtaagctctcctttgttgacattaactttgttttgtttctatttaaagcttataagcatgaactccccccttaaaagacattcattgtgaatatatttgtatttcaaactcatatatactatttctgtgacgattacctaattgttctattgaatttcagtttaatttcagctgcataaaactgaccaagctgtccaatcatactgtatctcttactagttactaagatcacatttgtttgattaaaacacatcgaattga

SEQ ID NO: 17985 - protein, 325 aa, DROSOPHILA
MQSQRFLFVAILACFLVTIKSTPLSDISYSDESTSVNEKTQKRPDDDSEFDGFPFREDDDSLQDSSREMSVQDHNWDVLIFTQQWPVTTCYHWREENPDQECSLPQKKEFWTIHGIWPTKLHQMGPNFCNNSANFDPSKLNPIEDRLETFWPDLKGMDSTEWLWKHEWQKHGTCAMLVEELDNELKYFEQGLTWREEYIMSRILDASDIHPDSNNTVAAINNAIVKALGKNPSIHCLYDGKHGISYLSEIRICFSKSLELIDCDGIKQGDAVPVGVPGGTIITNCHIGSLVHYPSLVPPLQRKSHWKLPLVNVYKLLQFLMWFTL

SEQ ID NO: 17986 - DNA, 13202 bp, DROSOPHILA
tttattgagatatcccatttaactaagggcaacatacttcttggccttgcgcttggcattgtagagtttctccctgtactttaagaggaatctgttcacagctctgccgccgtagccaatgttgcgggatttaatccatttgaggttcatgaagggcggcagggcgtgttcgcatgctttgtatgagacctgcaggccaaatgcgttcttcaccgccttctggggccgttcacccgtttcacctgtttccagcaggtgatacgccttgttccgctccctcactactgtctccaggttttccatggagattttcacctgcaattctaaagttttagaaaaggatctccaccatcaaatatcgcccaccttatcgatgcgctccggactagggaagacttccattttgtcattgcactcgtgctccatggtcagcagcatgttgcgctccttgaggagcacgaaccacagctggtgcagctccttgttggacttgatacgcagctcctccgtccgccaggcgcggcccaccttcacctcattctcgctccagttcttcttgtcgtcgaagaactccataagatcccggcgaacagcggaagtgtgcatttgcatcggcatttgaacatgcggcgtttgcagggcagccgcactacatattacataaaaacaaaggcgcgtttatatcggttactctgtgtaaaagtcggatttgtgaaagagaacggacctgcacgactgccatggctgcttgggagctgccaaaaagctcctgactgtcgcatttcccacagtttttgccaaatttaaacattttattaacgccgaagacattttttcgaccgaacaaaacagctgaagcaataacaatcgatacttttttgtatcgatttattggattgcgtgcgtactacatttttagccgggctttactccatttcagggctgccatgcatttcaactgaaattagtcgatagtataatttcagcatcgacttgttggccagctctagttgcgcttcgctcagtgctaatgaaaaatcgaatttttcgcttcaaatcgactgaagtttacacgggctaaagtattacagaagtttggctcaagccattacacaacatgcaataagtaaatgtaagtgaagtggccactccccgaaaaaaacaacgcgctgcactgtcatcttctctgttccatccaatccaatttgtatgccaaggaacgccaacttaatgtttggctgtgtgcatgcatgtgtgattgtgtgctggtgtttgtgggtttcagtacacaaatttaaattgataaaactcgacaaaggcagcggttctgaattgcagcgagtgcagggaatgcactgccaagtgcctgttaattgtgcatttatcacagcgaattcaagcaatttgcacctcgaaatgggcattcaaaaacaaattcattgaagagtaacgccaggatgaaaaaaaaaaaaacaaatgtagaacggtatagtaacaggacagtgttgccgagctgctccaagttccccggtactattgccgtgcagcgcagtgtagcgtacataaatatttatctcactgccttatcaggcagcattattgttgaagcgactgtgtatctgtgggcatattaattgtttgtttgtctgctcttagcaagtgttatataaagtgcagaacatcattgagttaaaaggtcagcgagtgaattgattgatcaatttggcaaggggaaggcgcaatgtgggggctacggagtaacttgtagggttttcttcgctcggctttcgtgcttttatcatttcccctttcccacttttcgaacaacttttctgctcacggtgaacgcccaaataaaaaaaaacacaaacaagtcttcttgtttgtactgtcgccatgcgcgcgtgtgtgtgagtgcttcggctttttgtgaccaggggttaatttaacggtgtcgccttaattatccgggttctgcatattcctccggtgtttgctttctccggacttgtgctgccacttgttgcccctgttaacggcgctgttagctgcaatccgaatcccccggtttcgtcgccatatcgtgcgataacctttcatttgccaatcggttgattatcatgttcttaatgaaagtagcaacaaatagctgaattttcgcttgcccaaacttactcagcgatgttttagaggggaccctcatcactactcctacagtttttagtttgcgacgcccattggtgataaatacttgtgtacatacatacaacatgtgattatttttatggaatgtgtttatctggaaccctctctatatgcgtcaacacataattgcacatgtttaaatttcccgaaaataaaatgtatatacaatgcctgcagctatagctgctgtcattgactttactttcattttagcagtgtaagttttaaattttgtttcctcccatccaagatatgaaactgtaactatgaaaactcactcctgagctgctccgaaaatatcatgaatacgacaattatgtgcacatcatttagtatacgtgatattttaggagcagctaaattatatttaaagttccgtaatttattgctttctcgtgatatactaggcaaatacattcacatacactgataaagaaactcagttatcgtttatttacaaacacaaccagtgttgacctcaagttaaagttaaagaatcggtaaatggcttgccaatgctcgattgcttcatcaaactcaccattgcttataacagtgccaattttaatgctgaaatcttatctacgaatattaactacaaccatttctcagttctttagtctaatgtaaaccaacttaatgtaagctacttctgtgtgtctggtaatgtggaggcagtgagtagttgtgctgtattctcttaaagctctgctctattcattaagatgtgcgtgtgcattgaggaagaaagccaacgaaagttgttcgccacattaccggcaatgttgcaacatcgggcgcgttgtaatcgtgtgcaagatgcgcgaaatccagtcaaacgcgaacagaagaacgcgcctcgaggcgcaatgttattaaataacaatgcagaaagagcagggagcacggagcagcagccacctcctcatgggaaacattaccagggtgccagttgaagagtctacaatgaaccacctcaaaccacgatccttcttttttcctcttttctcgtttccaaagacagaggagctaaaatgtcgcaaaaagaattggcggctctggttgccacgagaacgagtcgcaaacgcaccatatcctcgacctcattctctatttccactcgcactgatccaaaatccatcatagagatacacatattcaatgactccttgcccataaaaagagcttgctgcgaagtggagaatccaactttaaaagcggaacagcgagtgcagcaggaagaagagagcctgggccaagtgccgccgctgaccgaggaagagcagcagcggcacgatgagttccgaaatagtggttcgatattcctgcaggatttgccctgctttaagctgcagcaggcacagccgatagcaggatcatcacccattcccaagtgtcgggagtgcagaagaagaaatttggctacaacagagggcgaacccagttcagttagcgacgtttactgccggttctacgagttccgacgccttcagttcaatgagaatggagagctgtgcgtggttggcttcccaaatccctacagcgagccctcaccagaggacatcgccatttggcagccggataaaaatacaccgccgaccagcggttacatggatatacaggtttgcaggtacatcctactccatgccggcgaccagttctgctatatttggcaccaggaagcagaggctttaagtttgcatcagaatacggacggaaccattgcctggaagaaggccgtaaaaggaacacgagagatttgcgacgtgtgtgacaccacattgttcaactaccattggacttgccgcaagtgcggctttggagtgtgtctggactgcgttaaagatcgcaaggagggattgcgactgcggcgagcggagaacgctgcccaaaagggatgcgatgagtaccactggctgctctgcagcgaccccagtggcccacaggagcacgtccttaccgagctgatgctaacacagatcatagccggagatgccctcaacgtcttgggcaggctgctgcacgaggttcgtactttgtggcaggtgccacaggtctgcggctgccttctgagcaagcaagcgattgaagatgcacaatcaaaggaagtgatccaggatatgattaaggagtctcagctgaagcagcacaccagctactcgtcgctggcctccgagcagaaggtgcaccagcaacagcgcctcgatcaactgcacgccacgaagttggagtttgccagagagctaggtgtagattatgttccaggtcgagtgtggaccaaggaaaccttgggaaaggatccaataacaacggcgtttgataatttgaagcacattaattttctgagaaagggattggccggcttgagaaggtttcttccaccaaggaccatgacttttgcttactccactcagttggctccaggagttcctcacgagtttctgtgcgatggcagactgcttagactcaccgatgccatgcatccggataatcgagttcttttccaggaggtttggaaatgcggccagccagttatgatttcggaggtggctcgctctttgaacttagacttatggcatccacaagccttttgccgggactttggcgacaagcccaatgatcttattaattgcctgaatggcaatctggtgcccaatcagccaatgcgacacttttgggagggttttcagtgcatgaccaagcgtctgccagatgcatatggcaagccaatgctcttaaagcttaaggattggccgccgggtgatgattttgccgaaatactgcccaccaggtttgctgatttgatgaagggactgcccatgccggagtacacacttcgcacgggaaaccttaacatagctagctgcttacccaagatgtttgtgccaccagacttaggacccaaaatgtacaacgcatatggctcagcattgcaccccgacaagggtacaaccaatcttcacttggacatttcggatgcagtgaacataatggtttatgtgggaataccccaggatggggacacgagacctcagatggcggccacgcagaaagccatagaaattggcggatgcgattacatcactagagctcgttgccaatcgccagatgtattacccggagcactttggcacatctttccagctcgcgatgcagacaaaataagagatttacttaaccgcgtgaccctggagaagggtttccgtctggagccggatcacgatccaattcacgatcagaattggtacttggacgacaagttgcgagctcgtttattcaaagagtatggcgtggaggggcatccgattgtccagtgcttgggcgacgcagtctttataccagctggcgccccacatcaggttcaaaatctccacaactgtattaaggtggccgaggattttgtatcgccggaaaatatcacgcactgctatcatctaactcacgagtttagaaggctttcgcactcgcacacaaatcacgaggacaagcttcagatcaagaatattatctaccatgccatcaaggactgttgcaccatcctgaccagagctgtggatgagagacttaatgcggaattaaccaagctaaatgcagattagaattttcttaccttttagtttttttcaactatttaacatttattattattttttaagatcaaaaattgtcaaatattcaataaatacttacttagaactaaataaaaggtacatttatttatttgtcatccagtgcataattaagtaaattttctattttaaaaacctaaataaatatcaattcaaattaattgatttaattgaaatttctagtatttacatagacaacactaagcctaagcaagatactctccagcaacaaatgcccatgcatgctgaggacggagctgaatctgatgatgaggagtccagcccaggcagacattagcatcgtaaggatcatactactaatttggcgcccatatagaagtcaagtcaattacaacgccagaaagccttttatgttaatcgagagtggaaagggaaaataatttttttgctaaactagcctagagatcgaaatattaagaatacaactaaaatgacggtggatttcaacgattatttttgggtgagttaaataaggtgcatatggacggatcattgcttaaatatattcttccatttaatatccagggggagaagaacaatggctacgatgttctgtaccacaacatgaagttcggcctgattgccagcaaggagttatccgagtttctgcgcgagaagtctaacattgaggagcagaactcaaagatgatgtccaagctggcccacaaggctggtacactaaatagcacattcgctcctgtttggaccatactgcgaacatcggcagagaagctctccacgctccacctgcagatggtgcaaaagctgactgagctggtcaaggatgttgccaagtatgccgacgagctgcacaaaaagcacaaatccgtcaaggaggaggaatcgcagactcttgagtgtgtccaagccatccagacgtcgacggtggcagtgcaaaagttgcgcgatctgtacgccagcaaggtccaggagctggagaagctgcgcaaggacaacggctcgcacaaggatgccgagaagctagagagcaagctgaaaaaactgcaggaggagtacaaggctttgttggacaagcataaccccattaagaacgaatttgagagacgcatgacacagacctgcaaggtaagaagacttgcattagatgcattaagtttaaattagtttatattatattatccattctagcgctttcaagagattgaggaggtgcaccttcgtcaaatgaaggagtttctgtccacgtatctagaaatgctgcaaaacaatcacgatatggtgggtcaagtacattccgactttaagaggcagtttgtcgacatgtctgttgataaactcctggaacagtttgtgctcaataaatacacgggattggagaagccaggtatgttcacttgttaactatgttcaccttttaaacgaataaataaattgttattacagaaatgcctgaactggagtatgtggccttgtcgagtggttctcgccttcaacagccgcaggtctcggccagcgcatctaactccaattcggccaccagcattcaggctgctctgcgggctggaaatgcagcaacgacggcctcgggcagtgcggtgtccatggatcaacggggcgatgccttggcggcaatctctctgggcagcggaagtgcagccagcggtagtataccctttgccgaggatccgatactgggagctatgggctctccgcgtcccacatcgccggacatgctggcgggagccaatgcatcgggaatacaatcgcaaccgactggtggagccacatccacggtgaaaagcctgcgatcctggtttttgcccactgccaaacagcaaccgtctgcaggcgccggaaatttcggtatggccggaagtggcagcaccaacaataccaccaccacgacaacagcaagcaacaatagcaacaacttgaacaccaacaacacaacagcaacaactacaacaacaactggcacgaataatcttaccacaaatatcaccaaaaattcccctaattctgaggatactagcaatcaaggttctttctctttgattttatttcgtttatgtttttgtttattatttttcatttacatcgttgtatggttaaagtttattccatgtatctacttgtggggcctatcatttgttctatcaatttcaactattcttctgtaagatatttccttatatgttcttttgtatgtatttacgtttatggtcgactcttaattgtacctattcatgttgcctaaagttttaaattggttattagaaattgtgggatctaatgctatgtattaatttcacgagttagcattagaaagtagtattttattcattataattgtaaataattttatttatttttattttactcatttcttagtttaatgcgatctttaagtgtacactcaaacaccagccaatcaatcagacaattctcctgacttttacacaactactactgcacatccacacgcacacacaaatgccataatgccattgaaccaatagcacttacaactgcaatcttctctctatgcttttctctgtcttatttccgtactaatgctttgcacacaaccatcgcatccatcaaccactgctcatccaaatcatccatcatccaatcatccacccatccgtgcaccgatcgactaatcgaaatcaaaactttagatcagacacaacagcaaccggcagaggccttaactccaaccgcaagtgccactgcaattgcagcggcgagtgcgcctgggaagaagcaattgaacgcaacgacaagcgagcagcagctatcgaagtcattaaatgagcaagagcacctacaacagactgcagcagctacggcagccacaactgcagcagcaacaaccgccacaacgacaacgtccagacgtgcaacgtcacttttaaatatattcacatcaaactctcagggtaaatgatttaagaatgtcaatgaaactgattggcccccatttcaccacccgtccaacttctaaaacacctgtacaacatttccacccgaaaaaattgcatgtacctatccttaatatgtatatttaaaggcttttctgtgtgctcaacttagtgttctctcatatccgattaacatctaattgttattgaagcactttaaggcggtgtttgagttctgagaaagacaatgcatttaagtttcaactatatattcccatcaccgaagtctcaacacagaagtatattgatgtgttgaggtgtcatcttcttttcctgtgtattctattagccattagcttgcttatttacttaagaatctctactctcctgctttcattaatgtgatccacctttcgccggtagtctctggcattttacgcagtcgtcgcgacaagacaaaaaccaaaaaggctaagaaaaagaaagacaatgaggccgccgagaacatacaggaagaacgcctcaccaggtgggtacacaaaatatttatgaggctcaattaacaaaatcctaaacatgaacgctctcttaattattttctagtttggatcgaggcaacaacacgctgctggactatgacgaccatgggcgcagcatgaagacgcagaattccagcggcagtagcgctggcggtggcttggccgccctatcggtgacctcagctcaaggaagcgttgattctgcaggagcaagtagcatgggcggaagcggaggtgcggcagtggccagtgggagcctacccaatgcaggcgccctgaccaactcggcttcgatcacagctccgggcgccgcaagtgggaccggaactggatatgaggtcgatgaggagggatttagcatacagcctgctaaggaaatagcgtgggaggagggccaggataaatgtaagctcttaacttgaattaattctggacgcacgacttaaatggcgaactcttatagctggcagcttctattccgactcggatacggattcggacaatgacaaacaggaacgtcggatccatgtcagcattaagcctttgaagaatggtcaagcgcccatgtcggccagcgtggatgagctgcgtgccaccgtggagaacatttcgctttccccaactggagttttttcagtgagttccacttactagaaagttatataaatgtgattaaaaaatacaaatatatttccaacgcagcatcacagccagcagttgcaagcagcgagaggagctccggcgtcgcgtcaacagtcgccggaaatatcgaatgcctccactcccacggccagtgtgcatccttatgccccgctgcagagtcccacgctgtccaacaataataacgcaaacaacacgaccaacagtcgttatgccgatctgggcgatatcttctcagagttgggtgacatgagtatgtcggcgccctcatcggcgacgctgggaaaacctcccggaaggcaaataccaacaccgacgtcagcgtcaacaggtggaagcatagccataccacgtccgccatcacgacgctctgatatgattgccattggaccggcggcaacagggacagcgccaggtcgcggcagaatgtccccggcaccggtgacggccatgaatcgagccgagagcattggcagtctggagttccgtacggctatcgggggagtgggatcctcgcgaggcccctctccacttacaatcggtatttcggacactataccgctggctgtggcattccacgaaatcatacacgcatattttcggggcagcgatgagtcgcgctgccaggtgaaagtgtccggtgatatgatgctatcattcccagctggcattgccggccttttagccaataatccaaacccagccaagctgggttttcgcattaagcacgttcagaatctggaaaacctggtgcctaacggaaaactggtgcaaatgtaagtaattgtgaagttaattgtagatatcaaataatctcgttcgcatttgcagagatcgccagcagtcgagttctgtgagcacgatgctggagttcaatatgggtgctttaacggccctgctccgaaggcaggcggagaataacccgactgcctcctacttcaacgtggacatactcaagtatcaggtgcgcacgaagccgggagccagctcgtgtcccttccaacttgtcagctactggaagtgtgagtccagctacacggcccttaaagtggactacaagtacaataaccacgccatggccagtgcctcgccccttctgaatgtcacgctctcggtgcccgtcaatggatctgtgcgcaatgtccagtcaaagccgcattctgcctggtaataggaaatagaaatatggatacaatttctttaactattattaccgatcgcattcattgtttctaggttgggcgaatcgaatcgtttggtgtggaactttacggacatctcgcagaattcacaagacggcggagtggggacgctgcgggcacgcctggagcttaacgatggtccctctacaccagcactactggccactcagttcaactgcgagggcaccacactttcgggcatcgagtttgagctccagggcagcggctatcgcttgtcgctggtcaaacggcgcttcgtttctggtgcgtttgaatataccatacgtgtaatataaacagcatcgtaactcttgtttacttttcaggaaaatatgtgtgcgaaggcgatggcattcgcagtggagccacacccacgcctccgtcggtcgggtccaccagtccgtactcggcgaagtcaaattagttactccccactcaatagacggcaaatgggaacgaaaaatggcaatatggcaataggctcgtgaaaaactagagaaatttttgtaactaatcttaaatatgagacaaccacatatacacccaaaccatattgaattaggcacacgaatagaggagcctacatagttttctctgagctttttattatacccccctttcttgatttcgaaatggacatcacaatgcggaatgaaattgacaaactttaagatttccacagatcgaagcacgacaagattgaggaaactggaaattctatcaattcgcattccaacagtttagatccaaacgaaatcgaaagtgggacctattatgtatttttgtacacacaaaattctgtttttcacgcgaaatgttgaatctgcctgcgggaggtccgaaatgcgggcctgcaaaatctggatgtattatttgttatatatatacgtatgcgagtatatattattaaagtgtatttattatgtttaactgaatatgatgtaaacgaacgatattgtatgtagctatgtagatatctaaaaacaacacaccgaacgttaattttatgttcacttttgtacacacaaccaaatccaaatgtattaaatgtaagatacaaaacctgcactgcgtcttggctcttggaatctcgatggatattgctttcgtcaccgggcatcatctggtctggataaggcgacacctcggggcggtgctcatgcaaccggagtttgtcgtcgttttcagcgactctcgtttctccggcgatcaattaattatcgaatttaggcaaagaacatgacaaactggtttcggtctctttggggcgcctggcaaggcgaacacataaatacatacatatgtacatataggaaattagcaggccgttgaaaatagaacaagaaattaaatgaaatgaaatgctgaaatcaaaatcattaaaatgtgggtgcacagatctcgctggggagcattagcctaaaatttaatttgtaaatttctgtaagaaatgtttttaaaatcgtggggcagctgtcgttgtgctaccatcgaaaggcgatgacgtcatgccgccgccacaaattgatctcaaggtcgagtcgacggacgcgttttcatttcacttggcacacttgactggtgggctgccttttaaaatacaaaaaaaacacaaattgcactcgtccattaggaggcaggagactacctatatcttgaatctgttggaatctccggcaatatgcgaatccaatggatgcaagggtgactgacaggaggagtacaaaaaatactttacacttcctatggttagctgagcgtatagagatcgccgacgctggcgaacgataagattaaattactaaacaattgtgttcatacaaatgcatattgtatattgccattgcccgcgggtacagaacccattaattgtttaacaaaagcaacccaaccgacccaacaacactgatgtctgttgatatataaaattaacagccctgaaatctagaacgcagtcgctgctgtatttttagttagataacaaattattaacagatgctgggcgctgagcttttcgcaagtcagtttaaggagttagattaataaaaggtttctaat

SEQ ID NO: 17987 - DNA, 4373 bp, DROSOPHILA
ccagctctagttgcgcttcgctcagtgctaatgaaaaatcgaatttttcgcttcaaatcgactgaagtttacacgggctaaagtattacagaagtttggctcaagccattacacaacatgcaataagtaaattatttacatagacaacactaagcctaagcaagatactctccagcaacaaatgcccatgcatgctgaggacggagctgaatctgatgatgaggagtccagcccaggcagacattagcatcgtaaggatcatactactaatttggcgcccatatagaagtcaagtcaattacaacgccagaaagccttttatgttaatcgagagtggaaagggaaaataatttttttgctaaactagcctagagatcgaaatattaagaatacaactaaaatgacggtggatttcaacgattatttttggggggagaagaacaatggctacgatgttctgtaccacaacatgaagttcggcctgattgccagcaaggagttatccgagtttctgcgcgagaagtctaacattgaggagcagaactcaaagatgatgtccaagctggcccacaaggctggtacactaaatagcacattcgctcctgtttggaccatactgcgaacatcggcagagaagctctccacgctccacctgcagatggtgcaaaagctgactgagctggtcaaggatgttgccaagtatgccgacgagctgcacaaaaagcacaaatccgtcaaggaggaggaatcgcagactcttgacaaggtccaggagctggagaagctgcgcaaggacaacggctcgcacaaggatgccgagaagctagagagcaagctgaaaaaactgcaggaggagtacaaggctttgttggacaagcataaccccattaagaacgaatttgagagacgcatgacacagacctgcaagcgctttcaagagattgaggaggtgcaccttcgtcaaatgaaggagtttctgtccacgtatctagaaatgctgcaaaacaatcacgatatggtgggtcaagtacattccgactttaagaggcagtttgtcgacatgtctgttgataaactcctggaacagtttgtgctcaataaatacacgggattggagaagccagaaatgcctgaactggagtatgtggccttgtcgagtggttctcgccttcaacagccgcaggtctcggccagcgcatctaactccaattcggccaccagcattcaggctgctctgcgggctggaaatgcagcaacgacggcctcgggcagtgcggtgtccatggatcaacggggcgatgccttggcggcaatctctctgggcagcggaagtgcagccagcggtagtataccctttgccgaggatccgatactgggagctatgggctctccgcgtcccacatcgccggacatgctggcgggagccaatgcatcgggaatacaatcgcaaccgactggtggagccacatccacggtgaaaagcctgcgatcctggtttttgcccactgccaaacagcaaccgtctgcaggcgccggaaatttcggtatggccggaagtggcagcaccaacaataccaccaccacgacaacagcaagcaacaatagcaacaacttgaacaccaacaacacaacagcaacaactacaacaacaactggcacgaataatcttaccacaaatatcaccaaaaattcccctaattctgaggatactagcaatcaagtctctggcattttacgcagtcgtcgcgacaagacaaaaaccaaaaaggctaagaaaaagaaagacaatgaggccgccgagaacatacaggaagaacgcctcaccagtttggatcgaggcaacaacacgctgctggactatgacgaccatgggcgcagcatgaagacgcagaattccagcggcagtagcgctggcggtggcttggccgccctatcggtgacctcagctcaaggaagcgttgattctgcaggagcaagtagcatgggcggaagcggaggtgcggcagtggccagtgggagcctacccaatgcaggcgccctgaccaactcggcttcgatcacagctccgggcgccgcaagtgggaccggaactggatatgaggtcgatgaggagggatttagcatacagcctgctaaggaaatagcgtgggaggagggccaggataaatctggcagcttctattccgactcggatacggattcggacaatgacaaacaggaacgtcggatccatgtcagcattaagcctttgaagaatggtcaagcgcccatgtcggccagcgtggatgagctgcgtgccaccgtggagaacatttcgctttccccaactggagttttttcacatcacagccagcagttgcaagcagcgagaggagctccggcgtcgcgtcaacagtcgccggaaatatcgaatgcctccactcccacggccagtgtgcatccttatgccccgctgcagagtcccacgctgtccaacaataataacgcaaacaacacgaccaacagtcgttatgccgatctgggcgatatcttctcagagttgggtgacatgagtatgtcggcgccctcatcggcgacgctgggaaaacctcccggaaggcaaataccaacaccgacgtcagcgtcaacaggtggaagcatagccataccacgtccgccatcacgacgctctgatatgattgccattggaccggcggcaacagggacagcgccaggtcgcggcagaatgtccccggcaccggtgacggccatgaatcgagccgagagcattggcagtctggagttccgtacggctatcgggggagtgggatcctcgcgaggcccctctccacttacaatcggtatttcggacactataccgctggctgtggcattccacgaaatcatacacgcatattttcggggcagcgatgagtcgcgctgccaggtgaaagtgtccggtgatatgatgctatcattcccagctggcattgccggccttttagccaataatccaaacccagccaagctgggttttcgcattaagcacgttcagaatctggaaaacctggtgcctaacggaaaactggtgcaaatagatcgccagcagtcgagttctgtgagcacgatgctggagttcaatatgggtgctttaacggccctgctccgaaggcaggcggagaataacccgactgcctcctacttcaacgtggacatactcaagtatcaggtgcgcacgaagccgggagccagctcgtgtcccttccaacttgtcagctactggaagtgtgagtccagctacacggcccttaaagtggactacaagtacaataaccacgccatggccagtgcctcgccccttctgaatgtcacgctctcggtgcccgtcaatggatctgtgcgcaatgtccagtcaaagccgcattctgcctggttgggcgaatcgaatcgtttggtgtggaactttacggacatctcgcagaattcacaagacggcggagtggggacgctgcgggcacgcctggagcttaacgatggtccctctacaccagcactactggccactcagttcaactgcgagggcaccacactttcgggcatcgagtttgagctccagggcagcggctatcgcttgtcgctggtcaaacggcgcttcgtttctggaaaatatgtgtgcgaaggcgatggcattcgcagtggagccacacccacgcctccgtcggtcgggtccaccagtccgtactcggcgaagtcaaattagttactccccactcaatagacggcaaatgggaacgaaaaatggcaatatggcaataggctcgtgaaaaactagagaaatttttgtaactaatcttaaatatgagacaaccacatatacacccaaaccatattgaattaggcacacgaatagaggagcctacatagttttctctgagctttttattatacccccctttcttgatttcgaaatggacatcacaatgcggaatgaaattgacaaactttaagatttccacagatcgaagcacgacaagattgaggaaactggaaattctatcaattcgcattccaacagtttagatccaaacgaaatcgaaagtgggacctattatgtatttttgtacacacaaaattctgtttttcacgcgaaatgttgaatctgcctgcgggaggtccgaaatgcgggcctgcaaaatctggatgtattatttgttatatatatacgtatgcgagtatatattattaaagtgtatttattatgtttaactgaatatgatgtaaacgaacgatattgtatgtagctatgtagatatctaaaaacaacacaccgaacgttaattttatgttcacttttgtacacacaaccaaatccaaatgtattaaatgtaagatac

SEQ ID NO: 17988 - protein, 1089 aa, DROSOPHILA
MKFGLIASKELSEFLREKSNIEEQNSKMMSKLAHKAGTLNSTFAPVWTILRTSAEKLSTLHLQMVQKLTELVKDVAKYADELHKKHKSVKEEESQTLDKVQELEKLRKDNGSHKDAEKLESKLKKLQEEYKALLDKHNPIKNEFERRMTQTCKRFQEIEEVHLRQMKEFLSTYLEMLQNNHDMVGQVHSDFKRQFVDMSVDKLLEQFVLNKYTGLEKPEMPELEYVALSSGSRLQQPQVSASASNSNSATSIQAALRAGNAATTASGSAVSMDQRGDALAAISLGSGSAASGSIPFAEDPILGAMGSPRPTSPDMLAGANASGIQSQPTGGATSTVKSLRSWFLPTAKQQPSAGAGNFGMAGSGSTNNTTTTTTASNNSNNLNTNNTTATTTTTTGTNNLTTNITKNSPNSEDTSNQVSGILRSRRDKTKTKKAKKKKDNEAAENIQEERLTSLDRGNNTLLDYDDHGRSMKTQNSSGSSAGGGLAALSVTSAQGSVDSAGASSMGGSGGAAVASGSLPNAGALTNSASITAPGAASGTGTGYEVDEEGFSIQPAKEIAWEEGQDKSGSFYSDSDTDSDNDKQERRIHVSIKPLKNGQAPMSASVDELRATVENISLSPTGVFSHHSQQLQAARGAPASRQQSPEISNASTPTASVHPYAPLQSPTLSNNNNANNTTNSRYADLGDIFSELGDMSMSAPSSATLGKPPGRQIPTPTSASTGGSIAIPRPPSRRSDMIAIGPAATGTAPGRGRMSPAPVTAMNRAESIGSLEFRTAIGGVGSSRGPSPLTIGISDTIPLAVAFHEIIHAYFRGSDESRCQVKVSGDMMLSFPAGIAGLLANNPNPAKLGFRIKHVQNLENLVPNGKLVQIDRQQSSSVSTMLEFNMGALTALLRRQAENNPTASYFNVDILKYQVRTKPGASSCPFQLVSYWKCESSYTALKVDYKYNNHAMASASPLLNVTLSVPVNGSVRNVQSKPHSAWLGESNRLVWNFTDISQNSQDGGVGTLRARLELNDGPSTPALLATQFNCEGTTLSGIEFELQGSGYRLSLVKRRFVSGKYVCEGDGIRSGATPTPPSVGSTSPYSAKSN

SEQ ID NO: 17989 - DNA, 15662 bp, DROSOPHILA
gtatatgcgggtgtatataacatagtcatgtataagtacaatgtgtttgtgttggttttttgtgtttttttttttttgttgtttttcaatatcctgactacaagtacaaagaaggcaaacttacagcggccacttcaaacgcgaagcatttactttaaaagaaagctccggttgaagtgcttaaaacgatttttttgttataaacaattgttcgttcgatcttaaaggggaggtttttgtgtgtgtttgacactaattatcactacgccagttgaagttaaatagtttacgggttcctcttagttttccacgctgggattgcttcgatttgataggtctaagccaaatttataatagttttgtgtatatgcaaatgcaattattgctaataatacatgcgagtctccaaccgagttaataacttgttccgctcgttggtttcttttgcgtgtgatgcaatcattgtgtgacgctcctttccgtgggaaggatatttgtctaattctgacaagtcagaggtaacgatgctaaaatttgatataccagcaaccgattttgttggcctcaaaaatatgatttttgttctctgctccaccaagtcattctggctaataatctaatttgtctcttgatttcagttgcaatttaggtacacgattccgccttcttctgcagcttcaaccgctttcaatcacaaaagtgcagacaccgcaaatatattatacaaatatgtataatgctatatatatgctctgggtgattcaggtgtgtgtgtagatttgtgtgtggcttgtctctaaattctaattgcaggtagttcgttaacgctttcacaccagaatgtcgcaacaaatatatcgtatttgtatttgtattgttatagttttgtttttccttgcttttgctgttgtgattttcttttctttttgggccagcgtaaaacttggcttggctttaatactttcaatctaacactaattaagttcccaacaatgcaatcctatgctggtatgttggtttgttcatagaaatcgggctcgtcgtcgtcgttcttcttcatctcgctgccatccaactgaaaaaagtgcaaaaccactaattaaaatgttcttaaaatttgattccaaatatattaccgcttgcatttcctctggcttatacaattttgtcaaattttgccgtatcggcaccatcatgatcaggaagaaggggaaggccagcgagaattgggacgacttcacactccagaggagtaccaggcacagcacctgaatggtggtaaacaaatgcagcttccaaggacgcaatcgcttcacgtatgatgtgggtggataatgtttgaccggcatgaaatacagtcttattctgtggcatacaaaatggttaatatatattgtatattcatattgtattctattcacttacctttcgaacaactgcactccgctcatggaggccactcccatgtacaagaagactccaaagagcacggccatgggtatcaaccgaagaagcggagccatcagcaccgatagtccaatcatcagacacacaaagaatccggacaagcgctgctccttaacatcaacgatcctgggcgattcaccaggagcgtgggtgctgttcaacaaaatatattatattagttttaaattgctcttttaataatagacgaccttttgaactcaccgtgacataatggtgacggatgacacatgagtcaccgatcttacagtggcggcgcaatgccagggcattccaaatattccgcaagcgcagttgagcaggcaaagcagcacaatatcccagtggagaccagaacccttctttaagccacgatcaggcttgtccacaatcagctcggagatctgtgactccataaagataagaatgtagacgagcagggcaggtatcacacaagcaaatggtatccacgtggaagaggtatcgaaaccgatgtaccagccgcgcttagagggatcgctgggcgacagaccctccggaaccaccagtttctctgtgtacacagccggcaccaggtagtccaccagcacgaatatggcaatggagattggtacaccgaaatcaccgagggcacggcgagcattacgacccaagaagtgggaattacggaagagcttcaggtagtaggcaaccacgaaagtggccaatgtgaggatggtgcagaataaagcggtgttcggctgattcttgggcaatggtggtggaccaatgggcatggctgttgttgaaatgttcattaccatctgcgtaatattcgttgtaacactcgccgtcgcattgagtaggctttcattggtggcatgttcgtgggcgaccaatgtcggcggagggagattgtagtcagatagcaggggattttccctatagatcgaaatcagtttcataaatgtttccacaatatagatgagcgtaatcagagccgagaatatctcctgagtgaatctcgtcagcagacgaacatacacactgccctcgaaggcggatacagttagggctattattattaaccatactccgacgtaaactcttagggacaagaaatcgaattcatgttgcgtacagaataccatgagggcttcgtcaaatagaagcagtggtccggtggttccaatgatcacaagtggttggcaggacagacaatggaaaacaatgcccaccagggagcacgagatcagagtctctgagataccaatccagctgtttgtcttagcggaaacgagacctccaaatgtgatagccgttgagaggcaagcgaagtacataaagatggtggcagccagggtttcggtgttcaggccatcgagtatatcactcttgtacatgggcattctgcgtttaagatcgttcctcaaaccaccccacagacgtccagttttctccagcggactaggtttcttcttctttcggccattgtcatcatcggagtcgccatcaccaccaccatctcctccaccaatcgtgaatccaatggctcccagtgtttgcttctccagcaatgccttctcctcatccttgccaatcttaatcatctcactgtctcgcttcacctgcagtgccttaatctttcgcgtgcgaatccaatccttcttggccttcaactcttcgaagggcaagagatcgtggcgatcccaattaccgggcggcaggacgatagaatcgtccaggaactcattgatggctgatagcagatccttgcgatcatcagctttgtaggcaatggagtggaaatgctcgttagccatcagcgtggagatagaacgacccacttcatggtagtccaaatcgaagttacgaggtcccaaaagaacaaacatgaatcttactgggacaggaacctcggtcaatgtgggcatcaggacaccctccgataaacggacaaaggcaatggtaggctgctcaaggaactctacggcaccaacctttgtgtattaaagtaattgtatgattagtaaataaaaaactgtttttaaaacaagatatatgacttaccagcactgtggtggcttcagcacccgctggaatcctcttgaggatcgtgtcattctgcagcttcttgagatcctcctgtgacgaggagtacatatcgtccttcatgtcgatcttgagctcattgctgcgcttgctgccaccaatttcggcggccggcataatcttgatcttcttgtcatccgtgccagacaaattctgtggagcatttcaattcaatttaagtagggtataatcttaagaatacttttatctactggggaacatatagcaagcatcacatgcaaagctggtgccaaaacactcaaaacaaaatatatatcaaagtcgtgcaactgaacaaaatcggaatattaagtatatagtagaacagagtgcggtctagggcagcagtagagtctagagtagcgaatggaagggatctaaggtacttgaacaacacagtcacaatcacaattgagaacttgccaatcgtggaggtggagagcacacataaaaacagtggttctaaagggggagaaggtctacggaacttggctaaaacgtggtggggctaaaaagaaacatcgcgagttctataagcgcatttcggctgctttcgactccgtttaagccagggaatgaagccatttttaaatattggttagcaaacccacaaccttaactttaaacttaagccactgctaatccgaatcgaaaactcaatgattgtatcatctgaattaatttatgtaagatgctaataatttaaagtcttgttttcacttcaaccatctgtgaataggattcattcccttttatctgcaaccacagcatagcccacccctactttttggcttcattccctagctcgtggagcggagtacaaaaggcggggagtcttatggggttctagttcattacacccaggtaggacatcgtcgagtggcgtcggtgatcaatagctgccgctgcagcagtggctgtggccacgttgagcatcgccgccgtgggcggagcactggaggtgacgcagatgctcctcctggccttggccaggttgcgaggtggtggctgcgcctgctgatacggctggtgggcggagtccgcacccatccaaagaaactatcgttttttttttggagtgcaggaggtttttgtgtttgatttggtttttgtggcgaataaaaatcagttaacgcacaagaaagaaagaaattgaagagatacacaaacgtttggacaaagcggcgttaagttaagttatctgtacgatcatgtctatatacaatttagctgttcattaccgatttgggtataagttgctgttgttgtcgatgttgtcgttattattattgttgatgtttttggtgtacgagttgtgagtcatgagatggcagaaatagacaagaagataatgaaccacgatcatgggaattaacaaacttttgtcacaattgtcactgaaagccaatttatttatagcgtacaggcatgatgtcaatagataaaatggttggataatacgatattagaatgacaagaatgcgtcgggggtgttagcgaaaccatttggatgattgaatatcggcataggggttgatctcacctgcaggctggtgtagctgttgtacttcctcttggtgaagggcagcacaccttggtgttcgttgacatggcgatggcgcaggagcagcgaacgcatcaccgatggcttgtcattgatgtcaatcaggtcctcgatcaccatctgaaaaggtttaatgatattgatatatattacttaaaactgaatatatttggtaaaaagataactaacctgttctaccacgcgataggccacggcaggcaggtccttctcgttaagatcgagcaggacaacgcccgtttccaggcagcgacgcaaattgagcagcgagtggaaggagagggaggcaacatggggcttgccccaacgatcggagccctcctccacgtcctcctcatacttgatccaacgggccgtctccttccattcgcgatcctcgcccacgcctgtgagctcatccaattgcacaaagatctattagcaaagcatagtattataaaataaacatgtaagatactatagggatcctgtactgtactgacctcatgaggactatgatccacctcgggcttcttgttggtgaagggggaaatcgttatttggggcaactcgcgcaacttgatggatgagtgatggatcttatggcggcgcagggcacgcgggtcgtccgaacgatgtgatctcagctcgttaagatcagcctcctataagtggggaagaaacaagagattagatctagaactcgggttttcatataggatctgttcattggggctaagggcacggccaaggataagatggtcaacctgtttagccggcatttggccatttatctacaggtgcatccgtatgttttgtgggttagcaatgagagttggagagacacaatagctgatttagttagatgatttcaactacggttaaatgggggggttcgggttattggagggcatcgttaactggactaagtgttcagtgtgtccctacctccaatgccgtgtcctcaggctgcacagagatgcgacgcgcacctgcatcaccgttttcctcgagcttgtttttgggttccacgctgtcctgatgtgagaatttacgttgtctataatactgatggcggctgtaagtatattacaaattaaaattttaattattttctacatgcattgcacggaaaggtaaaagtattttgcgtatacgtaatgttgccccaaaggctcttatgaagcccgcattacgtatacgcagtgttgttcgttattttgattcggctctatcaagctgatttgttgtttctttctaaatgtatacaatataaatttaagctatatttaccttcttctgcgtttacgttcgtgcgattggtccgtgggctgttcatcatagctcaaactgggcgggatcttctttttgccgccaaactggacgtgcttctcgtccaccgagttgtccgagtgatcgccgtgtccggctctctccgagactagcgggaagtcttcggggatgtcatcatagttttgtgcattattcaatggctccgtttggctctcgtactccgagtcctcctcgatgttcagatcgtttgtgcggactgcagatatgcatacgtaagtatgaaatgttattatgtttatccgaaggatactcactgctattcttcttgcgggatccaatgggcagctgggagttgtcctggaaggtgtttacatcgaacttgtccttgcgcgcactgttgccggcaaagaccttgtccatttccgagtccagcagcacctcgtcgggatcctcattgccagactgcaaagcacaaaaaaaaaaaaacaaaaacaaatataccaattgtagttactcaattgttttcatgcgtttggtcacgttgtgcatgagtcaagtcatcgcaaatacttttcaattaagaatctatagggggaaaacaaagtcagacgagtcatgtgactcgcagcattattgtccctcgtcacgagtctttcgtctttcgcctttcgtcatgttgacgatctgtggaaaacacttagaggggcgagaagaatgaccacattggggagcaaacgtcggtctgcgcacattaatcatctaacatctaacatcaagtgcgatcgcacgcatttgagggccttttgaaagccaaacattccaacataataaaccgggcattcggtggttgagaatccaactggattcactgggcgtcgttcttaattggttttaatcgatctcaattgatttccatagtgacgaaggcattgattgcgcacttcttccaatcatcatcatcaacatcaatatcaacatcatttggcaacaggaaaaatatgtatttttgttcgccccgagcggcaagcaagcaaacccaattattgccaattgttttgcggctatcaaattacaaatataggaaaaatcttaaattgcttattgaaaatcactgaagaggttgccgtgaattcgattttccctcttccgacttttctgggaaatcatcatcatcatttcgctacacttgcgacttacaaatctatttcaacacatatttcccatttcaccctcattatcaatttaatttttcagttaatttgtatatgttaagttaggaaacccctaaaatatattcaacatctctcaacattcgtatattcccagctttaataactcctcttcgagagcttaagctgctcgagtgttttcttagttccgtttactaagtcaacatggaaattatcgcatgctcagatgtaggtacataaatgtaaattgaattaactaaatgcgattgggtccctcgggttgacgaaggactaccgcttgccggtccggttttgcagctgctgaatatttaatggcaactttaatacactgggcgagcgtatccttgacaattacattcacttcctgataagccgtgaggcagataagggcggaaacaaaaggtaaacagagtttcagtttgtgtttataaatagactaaaatttaataacgctgagagcctgcacgtgggaacgtcaatgtgtccaccgactggcagtcgctggagaggaagaccaacgaccaagtgtctgtgggttggttttgtgggtgtgattttgtgggtggttggcgtttgcatgtgataagctggagcgtaacgcgccatgttacgttaattaatcgataaacactaagttgtcccataatggctttcataccaatgctgactttgctgatcattatgaagttgttggcattgctgatttacagatacgtacaggcggcaggcattaaatgtattttgtcattcagccattagcttgatgcccatcataatgtggctataagctatagccacataagcccaccaaaccgcccacaagcgacctgaaccaccaccacccacttgctcacccaccacccatcgttcaggtaacaaaacgtcgcactttgtgcagcatgtcagcgttgcttatcacaaataatcgatggtatgttttggcctcaaccccaccgacctgccacgcccaccgcccattgccccgcctacccggcgtctgagctgtcaattctcgttgttgtttgtttagcgttccgagtggagctaaatgagtatgcacggttcatactactcctatacgtaatgcacacagtagctggccaaagaaatagaagcctcatgagatcatccaaagtggatattttggtgtgaaaaatgagcgaaacataatatttggacgactctgaaattaatgttatgttatgctagcagttgctaactgactgatacctttctaataatcttttcttatgatttaatatgattgtaaaacttaaatctacaatataaacataaattaaatatatcaacgcattaagatcaaatgtttatgtaagtgtcctaatagatgttcgcatgaattgcttccaccttctgacttcattttgcttcccatttgcataacccattctgagccccacaagcatatgcgttctgcgctgacgtttacttcttattttgttcctattttagagaagtttccttccccccttgagaccacggtgcacctagtcggttgacaagcgttgtgagcagacacagtcacagtcacagtcaccgtcatgccgtcagttcgctcgcaaagctgggcgtgcgtgtaagcagtttagaaaccgagactccccactccaagtggtggcaacaccctcccatccccccccccccccccccgcaaacagttgatgtgggggcaacaataagttgagccgagttcgcggagtgtttctgatgtgatttgacatctgcgaggcggcaggcaagcgagcggcagcacgtgacttacaagtcataagcaagttgaatgctcgtggcctaaacaactttttgtccaacttgccaaattgaatcaaattgcgactaaagcgaaacttgttaagattttgcgagttgctagctgcaacttgccaactgttgttgtcatcgttggtgactaagtttttacacttggcccgcacagcagattaaaagttagtccgctggcgtatatcgcgtataactttgtatttattggaaaactgtttgagttgccaaaaggaaagtcggttgggaaattggaaattggcaaagttcatataagccgcaaaaaataagcaaaaaatgtgatgtctaaaatacatagaaaaaaaaattgattccatgtgatatggtacttttaaatttatcaataatagtcataataataataactttaaaatatttcaatttattggctgttcgatagtaaggtttaaacaataaattcgcaaattttcatgtttacttctctttggctttatcgcaaatatcttttggactttttatggggaggttcaacatttgaccataactaacatgaccataaaaagcgtgcaaatgttgggaaaacagtaaccgtttaactttacatttaacttctgactttgagttggatatatttatgcatgtatacacaaaagtttttatttgtttgcagctgtcgagttttttgtccatggcctctgcataatttggttgatttttggtggccccttttccctacgcacttaggttattttttccatttccatccattttttttttgttgtttgcacaaattaacgatgcttctatattcgcttttgtctgacagcctgctcgcaatagtgtgcgtttgtgtgtgtgtgcgtttgtgtgtatctgtgttaatttaatgtgaattccgcagcggaaatgctcgcacaagcacaagagcgacggggaaaagtggaagtggaaaagcggaaaagtgggtacagaccgccggcaggtcaagggtcggggtgcggggcacgggccaaggggcgcggcgagacggacacgtgcgaaaggttaaactggtcaaaggcactggcattaaagcgtcgtatacgtaatctggtgatgggaaatcatgctgacaatgctgctcacccactaaacgtttatatattcacacactacagcttcgcacaatagaaaagtgttgcatactccaaggtcagtggatgtgtgtgtgtgtgcgtgagttcgtgtgtgtgtgtggatgttggttgcgattgtgtgtgagctagctgttggcaataaacagcgagagcctactctatttattatcgaaaatgaatagaacattttccaagaaatgtgctgaattttataggaattttgtggagggagaacatgaagaactgtaccggaaatgatttgggcaatggaaagggtttaatgggaatttcttctgatgaggaaaattatttaataagaaaatgaaaggctttcttagcatgaaaagtagcagttgtgtataaatgaatcttaaagacaactaagaaaaatatttccatattaggcccaaccaccaaaaactcttaaattatttaaaaggtttcccgctgatctaaaacctacgacactaagcggcttatacaactttcaatgcacgaaacttgtacaaaacttaaattaaaacccatcaaagttttctaacttaaggacgaagttcagtgaaaacccttgtttttccgtacaggtgtgatggagagtgaataatgcatgaactgctaaataattctcaacgtttttataatgccaacaaattggaaacacgaaaccgcaaaatccccttcgaacagtcaatcattcaacaatccggcaaaccgaaatgaaactcggttattattggtaatttttaagatgccacacacatacacaaaaaaaaaacaccttaaaatgtatatgtatgtgtatttgtaaccgcagacacacacgtgtgtgcaggaaggagtcaacactcctgtcgcttgggtaacattttccgtaacatttctgtgtgtttttcactgccgctgagccgttttattaccccaaaaagtatgcaacacccaaaacgaatttcctccggaattcatagtcgtatgtgtatgtatgtgtatctatacaagggatcttggagtttgcttgcctgtggcacactaaagggccaactcacttgttgggcccatctgccaacttttcgactaataattttcgaaaaagaaaaagggacagcactcgaatgtgaaaagacttttcacattttccgctcgaaatggtactattgtatatatggttgtgtgtgcctgcttgggctcttttgaaacaaatttcaaggttgtgtgctcttgaaaagtttgtgtgcgtgcgtttttgattaacattatagatcaaacaagctagactagttattccgcattaccttgagggctcctattttgcttgcaaaactttcgatcacgtttgctagtgtttggtaattgggtttttccctcacgcaaaatcctttttgtctgttgcacttttgacccgcgagttatgaggagagtatatatacatatatatatatatataaatatctattttttgaggccaaatattggccagctccgctgtctgggaaggctgcccagcaaatgaggggccatgctgcttgtggctgctgcctgctgctgctgttacctgatttctggcccagtgcgcaggcgttggccaaaagcgcgcgtataacggtagaacaggccgctcagctggcagcgctgcagcgtttcggccacgctcagctgattctcagggccgccacggcatacgggctttactatgtgccatctcacccatccacccacaatccagcaggatacgctgctgccgcctgccactgctgctgacgtaaatcggaatgcagttttcgacacagaaagctttgtagcaggccaaaagctttggcagctcagcatatttttttgttttcatttttggtcgcctccagtcgtagccatcacccacccacacaccagtgcataattaatggcaaagcttttgcgcgcacaggacctacccgatgatggtcaaggccgctcaaggccaacacttggtgttttgtgtatggcccacaaagatgggtcgtttgtatgtgtgcttctgtgtgtttgcgaaaaaagctcgctcctttttcgccatgcacaaaaatctattcacttgatggcactttgaacagcatgccagtacattagggctcattagctggccacccatatatgtttgtatgaacgcgtgtggtaatttttcgtttcgggtaattaccgataacaggcgagttgtaatggctaattgagttatatgcatgcctctacagtgcagcttaagatgagagagttcacccttggttcaacctgaattatgtaagaccattaacatcaaatggattgcgatggatgacaggagaaataattgattgattgttgccatatgtaataaatatttaatggttatcgatagggggtgttgtatcctttgatgataccagcacatttgatgaatgcgaaaagttatgtgggctataaatcaatccgtaacactagcttactaaattaataaccaaatatatgatgtacacatattaacagcggaataagcaagaaagtcatcaaatatgaatatgtgcttatgcacaatatgtataagaatatacttttttaagatttaaggctctttatgtttgaaagtgcttactacgtgggttcatttcgaacgtgtttactggaaaaaataaatgcattctagatcattccaatgcgaatgttccacctaaattatggcatactttgtggtgcaattaagttaattgaggttgctgctcccacggctactgcaacttgatgctttcacctggccaggtgtcaatgaattgattgcgactacaaattccaccgtactattacttttcattgtcagtgtcagagtgagtgctaaagcaacggccttgaccacgactatcgatttcccgttctgtgttggtgagtgtaaataagcgatgtgtgcgcttcatttgaatgcgctgagtgtctagctagcttcctgttaccgttattgccaactgtctgttgccagttgcacaattaaaatgcgtttacttcgacgcttttaacgtttagcctttaagctgacaacttgtcgccctccagccacacactgcgtatacgtaatgctggcaaaaacgcgagcacaaaagcggcactttggcatgaatgaatgcatgattaggcacactgatctactgccgcagcactcgagcacacaaaactgaaaacgaaatcgaaattgaaattgaaaatgaaaccgacatcgatttgctggaaactggtttcataattgtgtcacttgctagctggcgggcatttttgccggtgtgcccccaaactacggacacactccggaaatgtgtagaaaagtaaacaactgcgaaatggcagaaaccacaaaaaaaaaatcaataacaattacttgacattacccgtgtgggccagcgattgaattatttacaaattcgcaatggcaaaaaattcaaaaaaaaaaaataaacagtacatttaaaaaagtgatttatttaatggaaaactaccaacggcagtacacttatatattcactttttcatatatatatacgtatacttggattacaataacagaatattttgtgaagaaccttgactgggtaaaagttttatcgggatcatcatcatcaatcgtagtatgagctcactcagacatttgcctaattaattacaaagcccaagaccaatacattagtcggaattaataatagttaacatttcgatacataggaaatgcgactaagatcgggtgaaagtacttaagtaatttgaaaagcactattattcctatctttcttttcagctaatatttatttcagctaaggttttcttatatacatatataaatacatataatatatttatgattattactcaccttctttttggtattgaagcccaggaaggataatttgcggacattattctccctgccgctggccgaactgaagctcatcttgagtgttgttttagaaagatttcgtttaatttagatccaatcctaagatatgggaattattgaatgcgcttatttgatgatcaggcaatgcaatggcatcggggtgctggtgggcttggttatttgctgcggccactgtggatgctgcaagaatctcggcattcggggcagcgaattcaacgccctgaaagtagaaaaaacaaaaaattaataaatgaaatgaaaaaaaaaagaaaattcgaagcaaacagaggcgatgatggcgtggatggaacgcaatttcattaataaacaactttgactgttgctggtttttgtgtattttttttttgtcactgctaaggaggccaattgaacgaaaatataagtaccgagcgcaataaaaaccattcgacgcgactcaattaaagttaaatggcagccacacgcatgggaaaggagaataggggaaagggcggcagagggggcggggtcgattaagcacgcgactttcgttgacggctcttgatcaatttgcgttatttgagcactcaattattattcggaagcttgaggggcaatgaatgtggcaatcgacgcctcaaggcggtattctttgacgatcagatcgctaagttaacgatctgcatctccatttctagtgaagtaacactgcaccgaaagaaaatcttgctatatatatacgagttattatattaatattgtaataattacatgagttccgtatttttcaacacataataatatatatagtaaattttcacatttttaaacatcatcatgtgtgtcacatgactaaatgtagcacaattgactgcgatgactaattgccatcttatcgaattaaacttgcaataagtgagcaaaaaaatacttagaaaaattgtcatagttttatggtaggtttttcgaaaaaactacgttctaccccacaagccactaaaatttttaaacattatcaagtctgttgccttttttttttgtattcagattcagatcttgaattttctttgcttctctgatatagttgttaattttttattaactcctctataatttttaataaaggcgttactaaattatgtttctattgacaatcgcccatctaatctaatgtcatctgactgaaattgatgccataatttacgttcataatgggcgccgcccattcgtaaagatatagc

SEQ ID NO: 17990 - DNA, 3907 bp, DROSOPHILA
ggcgttgaattcgctgccccgaatgccgagattcttgcagcatccacagtggccgcagcaaataaccaagcccaccagcaccccgatgccattgcattgcctgatcatcaaataagcgcattcaataattcccatatcttaggattggatctaaattaaacgaaatctttctaaaacaacactcaagatgagcttcagttcggccagcggcagggagaataatgtccgcaaattatccttcctgggcttcaataccaaaaagaagtctggcaatgaggatcccgacgaggtgctgctggactcggaaatggacaaggtctttgccggcaacagtgcgcgcaaggacaagttcgatgtaaacaccttccaggacaactcccagctgcccattggatcccgcaagaagaatagcatccgcacaaacgatctgaacatcgaggaggactcggagtacgagagccaaacggagccattgaataatgcacaaaactatgatgacatccccgaagacttcccgctagtctcggagagagccggacacggcgatcactcggacaactcggtggacgagaagcacgtccagtttggcggcaaaaagaagatcccgcccagtttgagctatgatgaacagcccacggaccaatcgcacgaacgtaaacgcagaagaagccgccatcagtattatagacaacgtaaattctcacatcaggacagcgtggaacccaaaaacaagctcgaggaaaacggtgatgcaggtgcgcgtcgcatctctgtgcagcctgaggacacggcattggagttgcgcgagttgccccaaataacgatttcccccttcaccaacaagaagcccgaggtggatcatagtcctcatgagatctttgtgcaattggatgagctcacaggcgtgggcgaggatcgcgaatggaaggagacggcccgttggatcaagtatgaggaggacgtggaggagggctccgatcgttggggcaagccccatgttgcctccctctccttccactcgctgctcaatttgcgtcgctgcctggaaacgggcgttgtcctgctcgatcttaacgagaaggacctgcctgccgtggcctatcgcgtggtagaacagatggtgatcgaggacctgattgacatcaatgacaagccatcggtgatgcgttcgctgctcctgcgccatcgccatgtcaacgaacaccaaggtgtgctgcccttcaccaagaggaagtacaacagctacaccagcctgcagtttctttggatgggtgcggactccgcccaccagccgtatcagcaggcgcagccaccacctcgcaacctggccaaggccaggaggagcatctgcgtcacctccagtgctccgcccacggcggcgatgctcaacgtggccacagccactgctgcagcggcagctattgatcaccgacgccactcgacgatgtcctacctgggtaatttgtctggcacggatgacaagaagatcaagattatgccggccgccgaaattggtggcagcaagcgcagcaatgagctcaagatcgacatgaaggacgatatgtactcctcgtcacaggaggatctcaagaagctgcagaatgacacgatcctcaagaggattccagcgggtgctgaagccaccacagtgctggttggtgccgtagagttccttgagcagcctaccattgcctttgtccgtttatcggagggtgtcctgatgcccacattgaccgaggttcctgtcccagtaagattcatgtttgttcttttgggacctcgtaacttcgatttggactaccatgaagtgggtcgttctatctccacgctgatggctaacgagcatttccactccattgcctacaaagctgatgatcgcaaggatctgctatcagccatcaatgagttcctggacgattctatcgtcctgccgcccggtaattgggatcgccacgatctcttgcccttcgaagagttgaaggccaagaaggattggattcgcacgcgaaagattaaggcactgcaggtgaagcgagacagtgagatgattaagattggcaaggatgaggagaaggcattgctggagaagcaaacactgggagccattggattcacgattggtggaggagatggtggtggtgatggcgactccgatgatgacaatggccgaaagaagaagaaacctagtccgctggagaaaactggacgtctgtggggtggtttgaggaacgatcttaaacgcagaatgcccatgtacaagagtgatatactcgatggcctgaacaccgaaaccctggctgccaccatctttatgtacttcgcttgcctctcaacggctatcacatttggaggtctcgtttccgctaagacaaacagctggattggtatctcagagactctgatctcgtgctccctggtgggcattgttttccattgtctgtcctgccaaccacttgtgatcattggaaccaccggaccactgcttctatttgacgaagccctcatggtattctgtacgcaacatgaattcgatttcttgtccctaagagtttacgtcggagtatggttaataataatagccctaactgtatccgccttcgagggcagtgtgtatgttcgtctgctgacgagattcactcaggagatattctcggctctgattacgctcatctatattgtggaaacatttatgaaactgatttcgatctatagggaaaatcccctgctatctgactacaatctccctccgccgacattggtcgcccacgaacatgccaccaatgaaagcctactcaatgcgacggcgagtgttacaacgaatattacgcagatggtaatgaacatttcaacaacagccatgcccattggtccaccaccattgcccaagaatcagccgaacaccgctttattctgcaccatcctcacattggccactttcgtggttgcctactacctgaagctcttccgtaattcccacttcttgggtcgtaatgctcgccgtgccctcggtgatttcggtgtaccaatctccattgccatattcgtgctggtggactacctggtgccggctgtgtacacagagaaactggtggttccggagggtctgtcgcccagcgatccctctaagcgcggctggtacatcggtttcgatacctcttccacgtggataccatttgcttgtgtgatacctgccctgctcgtctacattcttatctttatggagtcacagatctccgagctgattgtggacaagcctgatcgtggcttaaagaagggttctggtctccactgggatattgtgctgctttgcctgctcaactgcgcttgcggaatatttggaatgccctggcattgcgccgccactgtaagatcggtgactcatgtgtcatccgtcaccattatgtcacgcacccacgctcctggtgaatcgcccaggatcgttgatgttaaggagcagcgcttgtccggattctttgtgtgtctgatgattggactatcggtgctgatggctccgcttcttcggttgatacccatggccgtgctctttggagtcttcttgtacatgggagtggcctccatgagcggagtgcagttgttcgaaagaataagactgtatttcatgccggtcaaacattatccacccacatcatacgtgaagcgattgcgtccttggaagctgcatttgtttaccaccattcaggtgctgtgcctggtactcctctggagtgtgaagtcgtcccaattctcgctggccttccccttcttcctgatcatgatggtgccgatacggcaaaatttgacaaaattgtataagccagaggaaatgcaagcgttggatggcagcgagatgaagaagaacgacgacgacgagcccgatttctatgaacaaaccaacataccagcatag

SEQ ID NO: 17991 - protein, 1239 aa, DROSOPHILA
MSFSSASGRENNVRKLSFLGFNTKKKSGNEDPDEVLLDSEMDKVFAGNSARKDKFDVNTFQDNSQLPIGSRKKNSIRTNDLNIEEDSEYESQTEPLNNAQNYDDIPEDFPLVSERAGHGDHSDNSVDEKHVQFGGKKKIPPSLSYDEQPTDQSHERKRRRSRHQYYRQRKFSHQDSVEPKNKLEENGDAGARRISVQPEDTALELRELPQITISPFTNKKPEVDHSPHEIFVQLDELTGVGEDREWKETARWIKYEEDVEEGSDRWGKPHVASLSFHSLLNLRRCLETGVVLLDLNEKDLPAVAYRVVEQMVIEDLIDINDKPSVMRSLLLRHRHVNEHQGVLPFTKRKYNSYTSLQFLWMGADSAHQPYQQAQPPPRNLAKARRSICVTSSAPPTAAMLNVATATAAAAAIDHRRHSTMSYLGNLSGTDDKKIKIMPAAEIGGSKRSNELKIDMKDDMYSSSQEDLKKLQNDTILKRIPAGAEATTVLVGAVEFLEQPTIAFVRLSEGVLMPTLTEVPVPVRFMFVLLGPRNFDLDYHEVGRSISTLMANEHFHSIAYKADDRKDLLSAINEFLDDSIVLPPGNWDRHDLLPFEELKAKKDWIRTRKIKALQVKRDSEMIKIGKDEEKALLEKQTLGAIGFTIGGGDGGGDGDSDDDNGRKKKKPSPLEKTGRLWGGLRNDLKRRMPMYKSDILDGLNTETLAATIFMYFACLSTAITFGGLVSAKTNSWIGISETLISCSLVGIVFHCLSCQPLVIIGTTGPLLLFDEALMVFCTQHEFDFLSLRVYVGVWLIIIALTVSAFEGSVYVRLLTRFTQEIFSALITLIYIVETFMKLISIYRENPLLSDYNLPPPTLVAHEHATNESLLNATASVTTNITQMVMNISTTAMPIGPPPLPKNQPNTALFCTILTLATFVVAYYLKLFRNSHFLGRNARRALGDFGVPISIAIFVLVDYLVPAVYTEKLVVPEGLSPSDPSKRGWYIGFDTSSTWIPFACVIPALLVYILIFMESQISELIVDKPDRGLKKGSGLHWDIVLLCLLNCACGIFGMPWHCAATVRSVTHVSSVTIMSRTHAPGESPRIVDVKEQRLSGFFVCLMIGLSVLMAPLLRLIPMAVLFGVFLYMGVASMSGVQLFERIRLYFMPVKHYPPTSYVKRLRPWKLHLFTTIQVLCLVLLWSVKSSQFSLAFPFFLIMMVPIRQNLTKLYKPEEMQALDGSEMKKNDDDEPDFYEQTNIPA

SEQ ID NO: 17992 - DNA, 3174 bp, DROSOPHILA
tgctgttcgacaaccagttcagagtgttggccagactgcagatgctggatgtgtccaggaacagcatcgccagcctcagtcctgctcactttgtgggcttgggctcactacggaagctgtatctgcagtacaatgctatattggaaatcaaaccggccacctttgccgccctgctgaacctggacaccttggatctgtcgtacaataacttggaattcctggaggaacagatcttcggaggcaacaccttgccgcgcatgcgaaggctcaacctgaatggcaatcgtatgaagcatctgcatccactggctttctcatcgttaccatttttggaatacctaaaactgggtcacaacgaactgaaatccttggacgtgcgcatgtttgcaccaatgcggcgtcttcagaagctccacttgggtcacaatctgctggaggagatcaacctcgatgtgctggagagcctgagtagcgtacaggagatcctagtggacaacaatcgccttacctttctggccaaggtgaatgtgagcttcccgaaccttaagcgcgtggccatcgagggtaatccctggcagtgtccttgcttcgtgaagctgcaacactggctggccaccagggatgtggtctatctgcgcgataacacgggctactacaagggcgaacgacccctgtgcatagtgaccaatgtggactactgcatccagaatttgcaggcggtacgacgcctgggaattttgggcgatttccagggtgaacaggtggaggcggatgctttcgatgacgatgccagtgcagctcaagactgattgctaccatttaatcaaaactatttacgtagactaaataaaaccgtgccaaactgggaaaaccctaaaagataccactctgtgtgccctgggatttgctagcaaattggtccacaaacaacgatcttaaatttaaatacgaaaactttaaatataacacaaaattgcacaaaaagatcttttcagacacggacattttgaagatatattggatcgatttatcatctttcgggcatattcatggttccagcgtctcgaatgggttttaatttacaaataaacaactaaaactcgaatcgtttaggcagacttgacgcgcagtgccagagcgctcagatcggcgatgcacttgttgagagtctccttctcctgctggggagagatgctggccaacacattggtggtgatccagttgaccatgtgcttctggctaaggcgacgctcgacgtggcggcactccacctggtagtcgagacgacgcttcacctccgagtacacattcatggcgcgctcacggaacgcggcctccagctgcaatgcaatgttctccttcttggcttccatcagcagcagggcaccgtcggcgcgccactgctccttcttctcggcctcgatggcgtcggagaggaccttcagctcagcctcgcgtccctccttccactcagattcgattttctgcggcagagataatttaaattagcggctgggttttaaagtccgtccaattatgataatccagctccaactcgaactgggctaatactcacatcgatctcgccatcagcccacttggcgatgaccgggccgagcttcttgacagcaatgatggccatgataccgagcgacagaccgctgtagtactcgtgctccatgacgtagatctccttggagcagagataggtgatcagacccacgccgaaggtgtagggtccggtgacaccggtcttgttgtagaagaactggaaccactcctcgggcaggaatcccagacggaccttgccgggatgctcggggcgctggcggcgctcgatggctccgccaggagcggcagcagcggctgccgaccgggtggcggccacggtcaaggggcgctgggctgaaagtgcagttcaccaattagttgtacgctacattttagttgcaaaaaatatccattgcgaatgggtggtgattacataaaccacgatgtccgacgactttgcaatgccgtaacaattttcacggtcattcgcggccggagattcacttgcccaccgcacgattagcgtacaccgattagctgggcagctattagcatggtttgcagatttacctgttagaagagcggctctcgagaacattttccaggcagttgcgacgaatttatgctactaaattcacccgaaattgtcagttcacaatagtgacaggttaagagagcgttgccagatcaaccgcttgtcagcccggttttacaacactggcaaagtgagccctatatttgaacttttcaaaataaaaatatgtttattaaaattgtatgtttataacttttatttgtattttcaacttcttttaaacttatttttatgatattaattttatatttaatcgagtgtttggcagtattaaaccatttacgcaaactgtttacatatttaaaattcgaagttggaatataaaaagctttagtagaataaattaaaaattaaacagccaaattgtatagccattttacaatgcttaagactaaaacggaaaaagatatacctcgtcataactttacaagtttttattttaaaaaatattacaatttgctagataaattgtgcctaaagtaatcagatttagctgcgaaacaatatgcattaaaatacttttacaaaatactatagaaacagcgaacgggatttgaatttaaatggttggttcgggtattcaactggatagatattcttgccattctcagttcaaagctatttacgtgcagatttcataaattaagcattaaagcatgagcatctttgttgtttgtcttcgctaaactaaatgactgtcttgtgcgtggaacttaaaacttaggaaaaacatacacacgggctacattcaaaagataagggggctatgctaattccaaatcactcggttacagctcgattcaaacaaaacatcataagactatttacagcagtagtgaacagatagatatcttttaaaacgtaataatacacttagcgaactatgttacaactttcaacttatgcctttgatgttgttctttgctagatcttcttctccttctccttctcgtctcacatcttctctattagcttccgtataaaaacgtaatgattctgcggaggtgttgcctaacatttataatgaa

SEQ ID NO: 17993 - DNA, 866 bp, DROSOPHILA
taaattcgtcgcaactgcctggaaaatgttctcgagagccgctcttctaacagcccagcgccccttgaccgtggccgccacccggtcggcagccgctgctgccgctcctggcggagccatcgagcgccgccagcgccccgagcatcccggcaaggtccgtctgggattcctgcccgaggagtggttccagttcttctacaacaagaccggtgtcaccggaccctacaccttcggcgtgggtctgatcacctatctctgctccaaggagatctacgtcatggagcacgagtactacagcggtctgtcgctcggtatcatggccatcattgctgtcaagaagctcggcccggtcatcgccaagtgggctgatggcgagatcgataaaatcgaatctgagtggaaggagggacgcgaggctgagctgaaggtcctctccgacgccatcgaggccgagaagaaggagcagtggcgcgccgacggtgccctgctgctgatggaagccaagaaggagaacattgcattgcagctggaggccgcgttccgtgagcgcgccatgaatgtgtactcggaggtgaagcgtcgtctcgactaccaggtggagtgccgccacgtcgagcgtcgccttagccagaagcacatggtcaactggatcaccaccaatgtgttggccagcatctctccccagcaggagaaggagactctcaacaagtgcatcgccgatctgagcgctctggcactgcgcgtcaagtctgcctaaacgattcgagttttagttgtttatttgtaaattaaaacccattcgagacgctggaaccatgaatatgcccgaaagatgataaatcgatccaatatatcttcaaaatgtc

SEQ ID NO: 17994 - protein, 243 aa, DROSOPHILA
MFSRAALLTAQRPLTVAATRSAAAAAAPGGAIERRQRPEHPGKVRLGFLPEEWFQFFYNKTGVTGPYTFGVGLITYLCSKEIYVMEHEYYSGLSLGIMAIIAVKKLGPVIAKWADGEIDKIESEWKEGREAELKVLSDAIEAEKKEQWRADGALLLMEAKKENIALQLEAAFRERAMNVYSEVKRRLDYQVECRHVERRLSQKHMVNWITTNVLASISPQQEKETLNKCIADLSALALRVKSA

SEQ ID NO: 17995 - DNA, 7871 bp, DROSOPHILA
tgattgcctccatttcaggccattccctgcaatttcggtttcgttaccttctgattttcatttaattagcgacgaactaattgccactaagcctccgaatctagttcgccggccgtgtttgcactgggcccatgttcctatgctccaatttcacgaccaaacattgacacagtccgcaatgtggattggggccaccagtggaacgccagtggagcaagtggagtgtctgcaaggtgttaatttgtcagcgtaaacccgtcagcagtcggcgggcactgctttcccacttctgttttaattgctgccaaaatcaatttgattgcatacatcaagagctatgtacatttcatgctcggtttttagcgttgtttggatactttacacactcaaaatcaaattcattatctcatactttccaaatagcactactatattaaaaattagtaaagttatcttcagtttcaaaatattctttattaaaaatattccttaaatagtgttaatatgtggtcattgttatgttttaacgattattgcatttgccaataaaacctaataactaataaattctaaacggcagttgtaaaacttgagccaaaccgtaaggatccgtcggagatatgatgaggagtcattaatctttcgtaatattcgatatgtgcatttataagatagttttcccaaggctcccgaaagtgtctgaagaccgcaagttagcccaagttaacctttctccattttcctcaactgaaaaggcatttggcaaatgaggtggaaatgctctcaagagcattgcccacacctgggccgcagatgaaccttgacatccgagtggctgctatgagcctgagcacttgggcttgccagccagggccactttcacttggtggtctcggagtggttttcggcgggttcagtgcccagagaacagggaaaatatggcgactgttaattgagtttatatactttatagtctaggtttgtgtggcggctgctgttgatgtttgcccaaggctgtttgtcacaattagcactgaaaagagccattattatagatgtgcctgcacggcgttgtcactttcatttaaggaatttcccacattttcactaccccctccacttataatccaatcaactacagttgagccaagaagagatgcccgaatgaaatgttaattaagctttggccgaggggaatttgacagttggctttgtggttattggcaagcgaaatctgtttgaaaatctgggtaatttgaaatcgaatctctaattggggaaattcattgcgcccgcttcaaggaatattcgagcatgcaaagaaggtttatcacgaacaagtgagccgttgaattcatctactaatttcaatgaattgtaattataattttctcatttatgaataatttcctaatgactatctctttttctgctacttgaacaggtggtcgcaagctctttgggggctatcgcatcacaccgaagcactgccgtgccaccaagacgctgcccagctcggatccacgggccaatggacccaccatctgcatgtttaaccacgagtgcgcacagcggggtggcgaggtggtgggcgcctgcatggacggcttcctcttcggcgcctgctgccagatcccgcccacccacgagttggccagcacgctgattaacgaggcgcagaacgcctacttccagcagcaccagcagcagacgaagctccagcagtcagcagcccaatcctcgttcgaaagctacggcgaacagcaacagtcattgagcgaggagcaggtggcacagcagccgtcgcagaacatctacgatcagcagaacctggacaaggtgtaccagcaactggacagcagcagtagcatcagtccacccaacggagcctacggcgatgagccgcagcagcaggagtatcagtcggagtcggagcagcccgtaagggatgagaatgcgtatcctaccagcagttcatccaccgaggccactcagtcgcagtcctcctccgccagtgtggaatttgagcaggagccctcccaaccagcagatgcctccaacgatcagaccactcagaagatcaacaaacagcccgtccagccacccaacttccacgtccacaagcactccgtaaccatcaactcaccctcttcgccgcctcaaaacgatgacttcgtaatgcaggtgctaagcaccttgccacctgagcatgcggatgaccatcatattgtctttaccaccgaggtgcccaccaagatcaccagtggattgcaggatcaaacgagctctgagtccaactccttcgaagaggtgtcttcgacgccagcagccacccaaaaaccgaaacccaagccaactcaaatgcccactcagaagaccactcagaaggccacgcagaagcccactccaaagcccacacagaaagccaagccgaaaccagttccccaactggcggagagcatgaagcgacccatccaacagaagccacagcaggtggcgaaacctaagccaagccctaagcctgcccagtccacaaacaaccaccaccacaaccacttgatcctggacggtggcgagttcacgcacagtgacatcacccaccccggagcagatgccgatctcgtggaggatctgcaattctccactggctatggcccccaacctgtgtacgcagaaccaccgaagcagcaacagcaacagcaacctgctgagcagagctacatttcctccagcactagtgcgaaacgtccaacgacaggtcataatagtcccaccactgtttcgtcaattaccacccacgtagactctatcgagtccatcatcctgcagctaaacaataccagtcatggtcccagctataatgttgtgagccagcagaccccatcatatggatatcctggagcagcagtggttcagactgagccagcagcccaaaatccgaccttctaccaggagaacgagtcggagaaggtccaggagtcggactcgcagtctgattacggttacaccaccacagttaactacgagtctttctacgacaaggtttcagatgagcaggatgcctccgctgctgtcagtcagtctgctgagatgcccaccgcacgtcctggatacggagaagatgtttccgctgtgctggaggaccatacgatgccggccaatggttaccacgatgccgaggctccagttgctccacagacttcggagtttaacaagatgccagtgatgggcattgcctatccagtggatatgtcttatatggaggaggagggaaatcttccggccactgcagctggttatggccagatgagcagtgactcctacgaggcgagcactgaatccacctaccagaagttgtcaacggtccaaacggaggagccgcagccaacttacgtgcgccccacaaccaatgccaataagcagaatcgcccagtggcctcctacattggaatggtgacaatgcagcactataacccgcagcccggaaatggtgactaccaggctcaagtgccccccgaagtatccgtgtcctcgcacaccaccaaagtccaggagcagatggatgagacctcgaatggctatcagcaatcggagaccacttctggctatgtttcgccaccaactgctgttcctgcgccagcacagcggcctcagtatgacgctgtccagggtgatgcttcctcggagcgacctgtcctggtgacggccagtcccaggccccgacccaagcccagtaccaagcgacctgccgtgaagagacccatcagcggcgagagcaccaagaagaaacctcagccacagccaagtgccggtgcctacaaccaagagaagatcagcgaacatagcacaagaaagccagtgtccaatggatacgataaggtacccgagtcgcccatcacacacattcagattaagaagccatcggcaactcaacacaaggaacaagagcagacgggataccccagacctgccagccctgcgggatacgaacagacaactgccgcagctcctgcgccagctgctccttctctcaactacgacaagccggatgctcctcccagccagtacgaccagccctcggctccatccgcaagttacgatcagttggcgccgatgccgtctctcaactacaacgagcagcacgctagttcaccaggaaggaagccgtcaacggccaagcccatttccaccagctatgtgaccggacccagtaccccacgacccccagccaccgttgattaccactatgacaatgtgccaccactgttcatggcggacgacaagctggatgccttcatccagagcactgcggagaacattgtcggatcaaccccgggcaactatcagcctccgctggtggctaccgcatcgacgcccgcttacgcccatagaccaaccagcagtggtagctatggccataagaagcctggcttcgtccagatcaatggaacacccaaacctcccagaccgacggtgctcattacgcccaagcccactgccataaatcttgtgacctacagctctttgagcgacgatagcaacaagctggcctccagcacaagttcttatgtgaccggaagaccgggagtacagggagtaagttccaacgacttcaaggatcccggatactttggcagtagccccgtccatgtggcattcacgcaatccaccacagaggccgtctacgcagtgccctccgatgacaagccagcattcccaggatacttcgggccaacgccctcgtatcccgccttctcagttcccggcgagaaagtgggccagaatgttatggaggaaacctacacgtcgcccaatgatttcgtcaacttcccgccggtaaggaaccccaatctgaacatgtcggctgcctccagcgcagtgaccagcgatctcgacctctccacacccgcctttgtggaggatgtggtgctcaaggacaagatgcacaccctggttcacaaattggtagcctcgctgcagggtaactttgaggccctggccgatatgatcgaagagccgggaagcaacaagaccgtggccacctaccaagccggagcaggaggaactgccaagcctgtgagagtagtaaccacacggaagcctgtgaggacagccaccacaaccaggcccaaggtaaccacaaagaaaccagtcacccgggtcacgacaaaggctcccaacaagaagacctccgctgtcagcaccaccactcgcaagcccgctacgcgtcgcaccaccgttgccgcaaaggtaaccaccaccactcggagaccggcgaccaagaagccaactcgcagggtaagcagtaccgtgaagaccacgaccgttagttcggctagaccggcggacgacgagatcgtggacgaggaggacgaagaggacgttaacccgaatcccagcgacaacgagattgaccaaggagctactttgagctcgtacggcggagccaacggtcggaagattcgtaagtgtggactgaatgtagcatggactagcatggacccgaaacaactgtctttctctctctatttcttgttctctcacctgcccttcacctgttcctaatcgctcgcgcatctaactcaccgcaccctcaatcctaatcctccattgtatttccgactcatccaaaaatatagcacgccgcaagcacaagcggcgtaatcagaagaccacctagaccaattcccataaagaaaccccctcctagttctagtgccccttttccactccccctccactcaattgtcccaccagttctatgcttccccaactctcagactcgacttctcgaacactccccactcctaacctcgcatttcactccccatcaacagagtgcggtgtacggccccatgtcaagtccggccgcattgtcggaggcaagggctccaccttcggcgcctacccctggcaggtcctcgtccgggagtccacctggctgggcctattcaccaagaacaagtgcggcggcgtcctaatcaccagccgctacgtcatcaccgccgcccattgtcagcctgggtaagctattactcaaacttatggttttggtgggcttaattcagggatttcatttgaatcctccgcagattcctggcctctctggtggctgttatgggcgagtttgacatttccggcgacctggagagcaagcgttcagtgaccaagaatgtcaagcgcgtcattgtccaccggcagtacgatccagccacgtttgaaaacgatctggccctgctggaactggacagtccagtgcaattcgatacccatataggtgagtttcatatcatatacatatgtatactttagtaagggctaatctattcctcttttcgccaacagtgcccatttgcatgcccaatgatgtggcggacttcactggacgcatggcgacagtgacgggatggggacgccttaagtacggaggtggagttccctccgttctccaggaggtgcaggtaagcacgcagtgaacagagtgtcctttaaattgcgaactgacccggggctaatttaaattaggtgccgattatcgagaacagcgtttgccaggagatgttccacaccgctggacacaacaagaagattctcacctccttcctgtgcgccggctatgccaacggacaaaaggactcgtgcgaggtaagctcggtgaactcttttcttttgaaaatgtaccctaatccgtctcactatccgacagggcgacagtggcggtccgctggtgctgcaacgaccggatggacgctacgagttggccggaaccgtttcccacggcatcaagtgtgcggcgccgtatctgccaggtgtctatatgcgcaccaccttctacaagccgtggctgcgcagcataacgggcgtgaaataggtagtcgcctccacagttttcaagtttctccccatcccagagatggccagcgccaactaactgctgaggcaggagcaccaagtgtaaatagaacgtagagttttaagagtcgcggctagaagcgtgggaaagttggctcatcctttgcgacgtcgcatcttcggaccccttcctcgaaccccctccatgctaccatcatttcattagcttaatagaaaatcaactgcagcatttcaaacgacattcgccgggtatttccacattccgagttagcgacatttcgcttgaggatgactgcagatttcgtttttttgagtacgcgtgcctaacacttgtagagtctgaatgagaattacgctgattgcaaaacgtagggataagacatatttattctagttctaagcctatttatttgactatttatttatttatgtgacgtgacgtgaggaagcgcgacgatttgtgcgtttgattcaactaaaaaaattgttatcttcataggcaaattgttgttatgttcaaatgagagcgagagcaaatgtttttagttcaattgaatttactaatttatcgatttatattattaattcttttatctaaatatgttaattgttaagtgaacgaaccaatcgaaaaaaaatcgaaataaacgacatacattttagtaaaaacaaacaaaggggttgcatttgtaaactatgatttcagaattttctccagtagctagccttaaaagtaactaaaggttaaacttttatgtatgtattttagcattgaatgtcagctttacaaaactcaaagagcggtggaattcttgacataaactgagctgtagccttgatgcaatttccgccacgcgagcttgctctcctttttttgaaagttgccacttcagtcagccctagcttttccccattgggaatattgtatgtggttgcgcctgggagcttctgtttcagcttctccagatgtcaatgctgctgctaaatcgacactaaag

SEQ ID NO: 17996 - DNA, 4674 bp, DROSOPHILA
atgtttgcccaaggctgtggtcgcaagctctttgggggctatcgcatcacaccgaagcactgccgtgccaccaagacgctgcccagctcggatccacgggccaatggacccaccatctgcatgtttaaccacgagtgcgcacagcggggtggcgaggtggtgggcgcctgcatggacggcttcctcttcggcgcctgctgccagatcccgcccacccacgagttggccagcacgctgattaacgaggcgcagaacgcctacttccagcagcaccagcagcagacgaagctccagcagtcagcagcccaatcctcgttcgaaagctacggcgaacagcaacagtcattgagcgaggagcaggtggcacagcagccgtcgcagaacatctacgatcagcagaacctggacaaggtgtaccagcaactggacagcagcagtagcatcagtccacccaacggagcctacggcgatgagccgcagcagcaggagtatcagtcggagtcggagcagcccgtaagggatgagaatgcgtatcctaccagcagttcatccaccgaggccactcagtcgcagtcctcctccgccagtgtggaatttgagcaggagccctcccaaccagcagatgcctccaacgatcagaccactcagaagatcaacaaacagcccgtccagccacccaacttccacgtccacaagcactccgtaaccatcaactcaccctcttcgccgcctcaaaacgatgacttcgtaatgcaggtgctaagcaccttgccacctgagcatgcggatgaccatcatattgtctttaccaccgaggtgcccaccaagatcaccagtggattgcaggatcaaacgagctctgagtccaactccttcgaagaggtgtcttcgacgccagcagccacccaaaaaccgaaacccaagccaactcaaatgcccactcagaagaccactcagaaggccacgcagaagcccactccaaagcccacacagaaagccaagccgaaaccagttccccaactggcggagagcatgaagcgacccatccaacagaagccacagcaggatctgcaattctccactggctatggcccccaacctgtgtacgcagaaccaccgaagcagcaacagcaacagcaacctgctgagcagagctacatttcctccagcactagtgcgaaacgtccaacgacaggtcataatagtcccaccactgtttcgtcaattaccacccacgtagactctatcgagtccatcatcctgcagctaaacaataccagtcatggtcccagctataatgttgtgagccagcagaccccatcatatggatatcctggagcagcagtggttcagactgagccagcagcccaaaatccgaccttctaccaggagaacgagtcggagaaggtccaggagtcggactcgcagtctgattacggttacaccaccacagttaactacgagtctttctacgacaaggtttcagatgagcaggatgcctccgctgctgtcagtcagtctgctgagatgcccaccgcacgtcctggatacggagaagatgtttccgctgtgctggaggaccatacgatgccggccaatggttaccacgatgccgaggctccagttgctccacagacttcggagtttaacaagatgccagtgatgggcattgcctatccagtggatatgtcttatatggaggaggagggaaatcttccggccactgcagctggttatggccagatgagcagtgactcctacgaggcgagcactgaatccacctaccagaagttgtcaacggtccaaacggaggagccgcagccaacttacgtgcgccccacaaccaatgccaataagcagaatcgcccagtggcctcctacattggaatggtgacaatgcagcactataacccgcagcccggaaatggtgactaccaggctcaagtgccccccgaagtatccgtgtcctcgcacaccaccaaagtccaggagcagatggatgagacctcgaatggctatcagcaatcggagaccacttctggctatgtttcgccaccaactgctgttcctgcgccagcacagcggcctcagtatgacgctgtccagggtgatgcttcctcggagcgacctgtcctggtgacggccagtcccaggccccgacccaagcccagtaccaagcgacctgccgtgaagagacccatcagcggcgagagcaccaagaagaaacctcagccacagccaagtgccggtgcctacaaccaagagaagatcagcgaacatagcacaagaaagccagtgtccaatggatacgataaggtacccgagtcgcccatcacacacattcagattaagaagccatcggcaactcaacacaaggaacaagagcagacgggataccccagacctgccagccctgcgggatacgaacagacaactgccgcagctcctgcgccagctgctccttctctcaactacgacaagccggatgctcctcccagccagtacgaccagccctcggctccatccgcaagttacgatcagttggcgccgatgccgtctctcaactacaacgagcagcacgctagttcaccaggaaggaagccgtcaacggccaagcccatttccaccagctatgtgaccggacccagtaccccacgacccccagccaccgttgattaccactatgacaatgtgccaccactgttcatggcggacgacaagctggatgccttcatccagagcactgcggagaacattgtcggatcaaccccgggcaactatcagcctccgctggtggctaccgcatcgacgcccgcttacgcccatagaccaaccagcagtggtagctatggccataagaagcctggcttcgtccagatcaatggaacacccaaacctcccagaccgacggtgctcattacgcccaagcccactgccataaatcttgtgacctacagctctttgagcgacgatagcaacaagctggcctccagcacaagttcttatgtgaccggaagaccgggagtacagggagtaagttccaacgacttcaaggatcccggatactttggcagtagccccgtccatgtggcattcacgcaatccaccacagaggccgtctacgcagtgccctccgatgacaagccagcattcccaggatacttcgggccaacgccctcgtatcccgccttctcagttcccggcgagaaagtgggccagaatgttatggaggaaacctacacgtcgcccaatgatttcgtcaacttcccgccggtaaggaaccccaatctgaacatgtcggctgcctccagcgcagtgaccagcgatctcgacctctccacacccgcctttgtggaggatgtggtgctcaaggacaagatgcacaccctggttcacaaattggtagcctcgctgcagggtaactttgaggccctggccgatatgatcgaagagccgggaagcaacaagaccgtggccacctaccaagccggagcaggaggaactgccaagcctgtgagagtagtaaccacacggaagcctgtgaggacagccaccacaaccaggcccaaggtaaccacaaagaaaccagtcacccgggtcacgacaaaggctcccaacaagaagacctccgctgtcagcaccaccactcgcaagcccgctacgcgtcgcaccaccgttgccgcaaaggtaaccaccaccactcggagaccggcgaccaagaagccaactcgcagggtaagcagtaccgtgaagaccacgaccgttagttcggctagaccggcggacgacgagatcgtggacgaggaggacgaagaggacgttaacccgaatcccagcgacaacgagattgaccaaggagctactttgagctcgtacggcggagccaacggtcggaagattcagtgcggtgtacggccccatgtcaagtccggccgcattgtcggaggcaagggctccaccttcggcgcctacccctggcaggtcctcgtccgggagtccacctggctgggcctattcaccaagaacaagtgcggcggcgtcctaatcaccagccgctacgtcatcaccgccgcccattgtcagcctggattcctggcctctctggtggctgttatgggcgagtttgacatttccggcgacctggagagcaagcgttcagtgaccaagaatgtcaagcgcgtcattgtccaccggcagtacgatccagccacgtttgaaaacgatctggccctgctggaactggacagtccagtgcaattcgatacccatatagtgcccatttgcatgcccaatgatgtggcggacttcactggacgcatggcgacagtgacgggatggggacgccttaagtacggaggtggagttccctccgttctccaggaggtgcaggtgccgattatcgagaacagcgtttgccaggagatgttccacaccgctggacacaacaagaagattctcacctccttcctgtgcgccggctatgccaacggacaaaaggactcgtgcgagggcgacagtggcggtccgctggtgctgcaacgaccggatggacgctacgagttggccggaaccgtttcccacggcatcaagtgtgcggcgccgtatctgccaggtgtctatatgcgcaccaccttctacaagccgtggctgcgcagcataacgggcgtgaaatag

SEQ ID NO: 17997 - protein, 1557 aa, DROSOPHILA
MFAQGCGRKLFGGYRITPKHCRATKTLPSSDPRANGPTICMFNHECAQRGGEVVGACMDGFLFGACCQIPPTHELASTLINEAQNAYFQQHQQQTKLQQSAAQSSFESYGEQQQSLSEEQVAQQPSQNIYDQQNLDKVYQQLDSSSSISPPNGAYGDEPQQQEYQSESEQPVRDENAYPTSSSSTEATQSQSSSASVEFEQEPSQPADASNDQTTQKINKQPVQPPNFHVHKHSVTINSPSSPPQNDDFVMQVLSTLPPEHADDHHIVFTTEVPTKITSGLQDQTSSESNSFEEVSSTPAATQKPKPKPTQMPTQKTTQKATQKPTPKPTQKAKPKPVPQLAESMKRPIQQKPQQDLQFSTGYGPQPVYAEPPKQQQQQQPAEQSYISSSTSAKRPTTGHNSPTTVSSITTHVDSIESIILQLNNTSHGPSYNVVSQQTPSYGYPGAAVVQTEPAAQNPTFYQENESEKVQESDSQSDYGYTTTVNYESFYDKVSDEQDASAAVSQSAEMPTARPGYGEDVSAVLEDHTMPANGYHDAEAPVAPQTSEFNKMPVMGIAYPVDMSYMEEEGNLPATAAGYGQMSSDSYEASTESTYQKLSTVQTEEPQPTYVRPTTNANKQNRPVASYIGMVTMQHYNPQPGNGDYQAQVPPEVSVSSHTTKVQEQMDETSNGYQQSETTSGYVSPPTAVPAPAQRPQYDAVQGDASSERPVLVTASPRPRPKPSTKRPAVKRPISGESTKKKPQPQPSAGAYNQEKISEHSTRKPVSNGYDKVPESPITHIQIKKPSATQHKEQEQTGYPRPASPAGYEQTTAAAPAPAAPSLNYDKPDAPPSQYDQPSAPSASYDQLAPMPSLNYNEQHASSPGRKPSTAKPISTSYVTGPSTPRPPATVDYHYDNVPPLFMADDKLDAFIQSTAENIVGSTPGNYQPPLVATASTPAYAHRPTSSGSYGHKKPGFVQINGTPKPPRPTVLITPKPTAINLVTYSSLSDDSNKLASSTSSYVTGRPGVQGVSSNDFKDPGYFGSSPVHVAFTQSTTEAVYAVPSDDKPAFPGYFGPTPSYPAFSVPGEKVGQNVMEETYTSPNDFVNFPPVRNPNLNMSAASSAVTSDLDLSTPAFVEDVVLKDKMHTLVHKLVASLQGNFEALADMIEEPGSNKTVATYQAGAGGTAKPVRVVTTRKPVRTATTTRPKVTTKKPVTRVTTKAPNKKTSAVSTTTRKPATRRTTVAAKVTTTTRRPATKKPTRRVSSTVKTTTVSSARPADDEIVDEEDEEDVNPNPSDNEIDQGATLSSYGGANGRKIQCGVRPHVKSGRIVGGKGSTFGAYPWQVLVRESTWLGLFTKNKCGGVLITSRYVITAAHCQPGFLASLVAVMGEFDISGDLESKRSVTKNVKRVIVHRQYDPATFENDLALLELDSPVQFDTHIVPICMPNDVADFTGRMATVTGWGRLKYGGGVPSVLQEVQVPIIENSVCQEMFHTAGHNKKILTSFLCAGYANGQKDSCEGDSGGPLVLQRPDGRYELAGTVSHGIKCAAPYLPGVYMRTTFYKPWLRSITGVK

SEQ ID NO: 17998 - DNA, 3946 bp, DROSOPHILA
tcgcgtcgagggtttgacaatttggaagcacttaaaactaaatctctacagaatgtgcaatcaatcttttacagtatttctttaataattttatgtatttttcgtgatttgtgtgggttggatgcatgggtggtgtgtgtgtcctttgtgtatcttatgcctaagcaggacaattgaatgtaacgaatcgaaattttatttatttatgaactaagcgaatacaattttaaaaacacacaaaaaaaaaaaagaaatctaaggggtaagtttatgtttatgaacgggggtccaatacgcggactcaccccaaatgagcgattatagtgctcattaaggtatgtgtaaggtgatgctttctagagagttctgggtgtttaagaggtggcatgtatgaggcgataatgttatccttgttttgtttaatctaattacataaattatgctaggatagcccatgagcgttaagaaaagagaactacataaattaattgggtgatggttgcaatccccatttctcttggttgctttatgttggtttttgttttctatattctaggctcagttgaaagcggcgtgccaccaaaaatgttggttaaaataatcgtatatggtaactggatgcactgttctttggagtggttctttatctctctcgttttaccgaaattgttgcagctttaacttccgttccgttccgatattggcctccagggttcgggtttcatcggttacttcgtaatttcagtagctcaatttacttgtttttttgtctgttttgttttttatcagatcagtgtaaaatttcatagcgcgcctcctcctttgattcgaccttgctagctttgatcctgtcgcctttcacctgtttgtagggtttacgctcgcactcatccattctttaacatctatccattcatacgtatccgacgtgttctgctactgcttactacttactgctcctggttgattagctagtccatggaactccgccttatgcctctcataatctcttcagcatgcgtttcttctccttgagcaacttctccttcttcttgtcctgcagcttcttgtccaggcccgcatgcttcttcgtcgagggtccaccatcgtctttggcatcgccaacagcgcctacaccgcatttggcaggctaaaataaaagatatacatatgtatgagctaagtgtgtaaagcagcgtgataaacaatatcatattgggatcattcaacaccttatgctagtattccaatgatacacaatcataacagaagggaaaacccctaatttacctgggcatggatctctgtcatcatgcgcgccctctgtgagtagtcatcgtatcgttccaacagcatcttgccggcctcctcgttcagcgccgattccggattcgggacaataagcaggcatttgatggtgagcagaatgtgcttgatgcccagatccggcttccagtccttctttagtgtgttcacacagatctccccgttggcggccacattcggatgaaagatcttggtgaggaagtacgccttgggtggcgtcagcgggaagtccttgttcagcgtcagtttgacgcggaaaattccagcggcgtacggagtgccagcaggtccatcgatcaatgcctgaatatccgtcacatcgctctcattgattagcaccttgatgccttccggtggcgtggtttccatctcctgcagctccctcatcacctgccttatcgtctgcggcgacaggttctccacattcgagtattgctgcaaatgggggaatggcattagtatggaatggcaaaagtttatatatacaaaaattgattttaatgacagggttgagtcattatttctagttggaattgtacttattggaacatacgaactttaaaaatggatggcaagtacagtacagtacttgtaggcaaggattattacatacaaacttaactaacaaaatcacatgtctccacaaacagggtatttattaatgaaattcatactcttagtatgctggaaagtatttgtaaggacgcgattttaagctctcactactaaaccattcataagattaagaagcatctgttggataggattctttacaatcacggatacaacttcttaagaatcgtttcgtattattattattagaatgctaacaattatgtgaggaacatgctcatcctaccgaactcatgatgtctgaatttcctgctgctgtgcgtgtgtgtgtctgtgttgatgcgggcctgcgctggtgtgcgtgcgaatcgctgtctcaaggtttcagtttcgtcagcttattcctgcagctgagctcttcggctctcggatagtcgcaatttcaccgccttttcccagctgccttggaaaagtggtcccaaaatatatgaatatgtgcgttgtgggctggctttaactattcctttgcgtgtagactccttatgcttcctttggccccgctagtctccttgtctgttgtttgggtttatgttttcacacgcactcgtttaaagactatatatatatatgtatttggtatagcacctcctctcgaaaatcttgatttttagtttttctagcgacttaaaattttgtttcgttggttgcttttgttttgaaatcgattcgctcaactttgtcgtagctgctgtgtgacctatctcgactctggcgttcacatctaaacaaattcagttgtctaattggacacttcacgctcgacaacaacacacaaaaacagtttcattttacagtaaccctcgtcgctggcgctgcgctacaattggggcatattcgtgctggcgtcttgcctgccttcgatttaaaagcgggtttttatttatttatttaaaaaacgtctttgattaaaactgagcatttaaatatagctaattcttgtcttgtaacagttaagcctcttttttcgtgcaaacagcagccactttgcaaatgtagcgcatctgaagatccacccagcccacacaaacaaactgtctctacactaacgcagcaacatggctgctcagactctatcgatatatcgatatatgcacaacatcggttcatgcctaagttactctgggaaatatttaaaaacaaacaaagaacataccgttattaaaaaaaaaaacttattgttgtgataaattcaaaacctttgctagctatattgaaaacaaattattattatttctaagtctttttagatactttcattgttgtttaaatctattgcttatagcatatttgtggtattttagaaaactgaaatggtatattttggttttgcattccccacggtcactctggatctattaccatccgataaccgatagtgcctaccaatatcgaagtacgatagtgcccgataggttcatccatccattttttttatttaattagttttaatttagatttctaactctaatttattggcggccccccactatcgtcgctccccgccatcggtacgctgcactttggttcggtttcggttcgcatcgggcgtatcggttcgatttcgatcctgaagatcagatcagaatctgcggaactcaactgccgtgttttgtgttgtgtgtgaggaacggagaggaaaactgtcagtgcactcttgatcgggcggatcggagaaaatgtcgaagaacaagataaacacaacgtccgcaacggcggccagtgacacgaatctaatcgaggtgaaatcgaaggtgagtcctaactttcgtggcccccggattccacgcccctttctgcggcgctgagctgctgattcatgcgctcaggaatgggattaatagcttaaattggagttctgtgcgtggaaagggggtctttagtctgaggagcaatgtgtctaccaatttgggaactcctatctgttgagctcgattgtgtcaaagcggccagagcagggattaatgcttggagtgcgaggtgtgaggag

SEQ ID NO: 17999 - DNA, 1382 bp, DROSOPHILA
caaagtggctgctgtttgcacgaaaaaagaggcttaactgttacaagacaagaattagctatatttaaatgctcagttttaatcaaagacgttttttaaataaataaataaaaacccgcttttaaatcgaaggcaggcaagacgccagcacgaatatgccccaattgtagcgcagcgccagcgacgagggttactgtaaaatgaaactgtttttgtgtgttgttgtcgagcgtgaagtgtccaattagacaactgaatttgtttagatgtgaacgccagagtcgagataggtcacacagcagctacgacaaagttgagcgaatcgatttcaaaacaaaagcaaccaacgaaacaaaattttaagtcgctagaaaaactaaaaatcaagattttcgagaggaggtgctataccaaatacatatatatatatagtctttaaacgagtgcgtgtgaaaacataaacccaaacaacagacaaggagactagcggggccaaaggaagcataaggagtctacacgcaaaggaatagttaaagccagcccacaacgcacatattcatatattttgggaccacttttccaaggcagctgggaaaaggcggtgaaattgcgactatccgagagccgaagagctcagctgcaggaataagctgacgaaactgaaaccttgagacagcgattcgcacgcacaccagcgcaggcccgcatcaacacagacacacacacgcacagcagcaggaaattcagacatcatgagttcgcaatactcgaatgtggagaacctgtcgccgcagacgataaggcaggtgatgagggagctgcaggagatggaaaccacgccaccggaaggcatcaaggtgctaatcaatgagagcgatgtgacggatattcaggcattgatcgatggacctgctggcactccgtacgccgctggaattttccgcgtcaaactgacgctgaacaaggacttcccgctgacgccacccaaggcgtacttcctcaccaagatctttcatccgaatgtggccgccaacggggagatctgtgtgaacacactaaagaaggactggaagccggatctgggcatcaagcacattctgctcaccatcaaatgcctgcttattgtcccgaatccggaatcggcgctgaacgaggaggccggcaagatgctgttggaacgatacgatgactactcacagagggcgcgcatgatgacagagatccatgcccagcctgccaaatgcggtgtaggcgctgttggcgatgccaaagacgatggtggaccctcgacgaagaagcatgcgggcctggacaagaagctgcaggacaagaagaaggagaagttgctcaaggagaagaaacgcatgctgaagagattatga

SEQ ID NO: 18000 - protein, 190 aa, DROSOPHILA
MRELQEMETTPPEGIKVLINESDVTDIQALIDGPAGTPYAAGIFRVKLTLNKDFPLTPPKAYFLTKIFHPNVAANGEICVNTLKKDWKPDLGIKHILLTIKCLLIVPNPESALNEEAGKMLLERYDDYSQRARMMTEIHAQPAKCGVGAVGDAKDDGGPSTKKHAGLDKKLQDKKKEKLLKEKKRMLKRL

SEQ ID NO: 18001 - DNA, 3306 bp, DROSOPHILA
cagaacagaaaatagtttaacaataatattgctggaataaacacatccaaggtaatacttagaacagcacgtcgtcatcgccctcatccaggatattggcctgctggcgcacatcgatgccctgctgcagcaactccgccttcttggcgtcggccttgatgcgtgcctcgcgcttcttgtcctggatcttcttcagtcggtagaactcctcacgctcgagctcgtccagctccgagatgatgtaggccaaagtcctatcgattcgggggatgatcacatgctcaatggcgttcacacgacggttggtgatcttgatcacctcgtccagggtgacgaatgaggtctgcagcgaggccagctccacgagcagtttaacggcgctttggtagttcttcttcagcttggccagctgctgaccaccacgggctagaccggccagttcgtaggtgtcggatccgtcctggtaggactcgaaaacgggcagagtgacaccagccacgttgtccttcttggtgcggatcttgatctgggccttggtcacgttttgcagcaccacttggttgatgtcgccagacgtgaatttggcctccgccagcgagaaggctgcctctttcataacatcacccatcagggtcttggtctcgatgatcttgcccagaatcaaacggaatcgcatctgcagggcatccgccttcttcttgagcagaccgtgacctttctgggctccagccagacgggccttcatcaacatctgggcaccacgggacgggaaaatcggtagcctatcttttccggacattttgctgtttttttcggatggtaattggctggactaaacaattttcaactgcgtatcaagaaaactgcaaccgtcgcagaacactgaaaaactccaactggaaaatgacggatgacagtgttggctactgcccgtagccaatcgataaccagttggtgctgggtagtgcgcttagatacagtactgcaaaatacgcagccacagctgattttgcatttaaaagtaaacaaatctaataaattccatttctttattggatttataatgcttctgcaacgcgtgtggttgacacatttaaacaaccatctacgccaatacgcgaacaagtcgcgagcccacatcaaaccagccatggccgtgagcatgcggatggtccatcaggagatcctgcattatgtaaacccctttgccaggatcaacgtgaagtccgatgttttcctgcgcatccagcccgcggatgtgcatcagtataccagcggggatgtgtttatcgcccaactggttggcggccatgtcaagaactcgaatgtctctctcgatgtgaaggtaaccgatgaggacaaggtggtcaatgtggtggttaaacaactggcggagcagccctcaaagcttgaatgccatctgcaaatacctgtgcgttccgatgtctctgtggacgcaaaaggtagtgtgcgagtggaaggcatacagagtgaactgctgcaagtcaaagcaaaggaaggcatccttaccaaaaatatcaaggccacccatataaacttgtacagtgaaaatggcaacatcaattgccagggcacattgctgggcaagattacccaaatagagtcacaaaatggggtgagaaaaaatttactatcaatctgatcttattattaacctttatatttcttttttagaacattgcgatggataagttgcaaggagacagcttgaattgttccaccaaagctggcagtattgtaaccgattgttgttatgtggaaaagtcaaagtttcagacacaaactgggcgtctggagctcaagaatgtccacaaaagcagcgaagtgcacgtccatcagtcgtcggatctcaatatgagtatgcgaaacaacgaagaataacaccatcatgctaaaaactttcaatttcagctggagtacatggcaatattcaaataactaccaaaggaggaaatttaaatgtccaactctctgagctagtggggagcaacaaaatcgacgccgagaacttattagaagaggctatcatacacatttcccaagccatagagcagaatcttcacatcgaggtaacagcccccgaagtgaaattggaaaacgaactggagcatgtagcccatgctctcaacgagagcaagaacaaattcgtgctaagcaatccaaatacaaatcgactggaagtaagcagcacaggcgacaagggcgtgcgcctgggaaaacagtcatggagcgatatgatgcgtaataagttgaaggctaccggcaccttggacgatttaccttaggtaaagacagagactaactaagttaagaatatattgtgctgcaagctacaatctcagtcatttttgctttatccatcatggaggcatgttgtttaggcttggcccgactccttagccactttatcctttaagcattcaagtgcccttgagaaaatggcttcttcctttccggctttgagtgcagacacaaacagttgcaccttttcatcgccaatctcttggagatccgagttttccgcttttatcaccatacatgccaacaggcgcagcaacttcaaggcgttctccacatactgctcctttggagcgtcatcctcctcctcttcgtcctcttcgaactcattggcgtcgggatcacttccccccgtgtagttgtcaatgtgctgtttaagtctataccacaattccaaaagatttaagaaggcctccttgtgatagaagtacttcaggcgctgcaaaaataaatatttaaatagaacgtcgaatattaagtatcttttccaaacttacactccaaatgtgcgccagatcctcgagatactcctcctggcgttcgcctaatggaatgagttgcagaggctgctgcaaaaactgcagtattcgcgctagacaactgactatactgggtgcatacacatccatggaggcctgcgcctctggcagttggaccagaatggtgcatatattgaggtaggtttgtatgatctccacatcacaggttatttttggtccgcacgagtcgtaaccgacgtcggcatcttcatcactgtcgtgggccgctggcacttctgcatcttcgttgtcctcgccagcttcctcgtcggtcaattttgtctgatcatcgcgcatgagtcgcaaaaacgcgctattgaccccctcgcagagttctggcactagaaagacctccgcaaaaggctttagattcaacgtggagtttgcgttttcctcctccaccaaggcgcaactggccagcacagcatttgtggccttcagtgcagct

SEQ ID NO: 18002 - DNA, 1194 bp, DROSOPHILA
cagctgattttgcatttaaaagtaaacaaatctaataaattccatttctttattggatttataatgcttctgcaacgcgtgtggttgacacatttaaacaaccatctacgccaatacgcgaacaagtcgcgagcccacatcaaaccagccatggccgtgagcatgcggatggtccatcaggagatcctgcattatgtaaacccctttgccaggatcaacgtgaagtccgatgttttcctgcgcatccagcccgcggatgtgcatcagtataccagcggggatgtgtttatcgcccaactggttggcggccatgtcaagaactcgaatgtctctctcgatgtgaaggtaaccgatgaggacaaggtggtcaatgtggtggttaaacaactggcggagcagccctcaaagcttgaatgccatctgcaaatacctgtgcgttccgatgtctctgtggacgcaaaaggtagtgtgcgagtggaaggcatacagagtgaactgctgcaagtcaaagcaaaggaaggcatccttaccaaaaatatcaaggccacccatataaacttgtacagtgaaaatggcaacatcaattgccagggcacattgctgggcaagattacccaaatagagtcacaaaatgggaacattgcgatggataagttgcaaggagacagcttgaattgttccaccaaagctggcagtattgtaaccgattgttgttatgtggaaaagtcaaagtttcagacacaaactgggcgtctggagctcaagaatgtccacaaaagcagcgaagtgcacgtccatcagtcgtcggatctcaatatgactggagtacatggcaatattcaaataactaccaaaggaggaaatttaaatgtccaactctctgagctagtggggagcaacaaaatcgacgccgagaacttattagaagaggctatcatacacatttcccaagccatagagcagaatcttcacatcgaggtaacagcccccgaagtgaaattggaaaacgaactggagcatgtagcccatgctctcaacgagagcaagaacaaattcgtgctaagcaatccaaatacaaatcgactggaagtaagcagcacaggcgacaagggcgtgcgcctgggaaaacagtcatggagcgatatgatgcgtaataagttgaaggctaccggcaccttggacgatttaccttag

SEQ ID NO: 18003 - protein, 376 aa, DROSOPHILA
MLLQRVWLTHLNNHLRQYANKSRAHIKPAMAVSMRMVHQEILHYVNPFARINVKSDVFLRIQPADVHQYTSGDVFIAQLVGGHVKNSNVSLDVKVTDEDKVVNVVVKQLAEQPSKLECHLQIPVRSDVSVDAKGSVRVEGIQSELLQVKAKEGILTKNIKATHINLYSENGNINCQGTLLGKITQIESQNGNIAMDKLQGDSLNCSTKAGSIVTDCCYVEKSKFQTQTGRLELKNVHKSSEVHVHQSSDLNMTGVHGNIQITTKGGNLNVQLSELVGSNKIDAENLLEEAIIHISQAIEQNLHIEVTAPEVKLENELEHVAHALNESKNKFVLSNPNTNRLEVSSTGDKGVRLGKQSWSDMMRNKLKATGTLDDLP

SEQ ID NO: 18004 - DNA, 3038 bp, DROSOPHILA
gccaccagtaaccaacaaaccatggacgcaacactattcctacaacgccctcaaatacacgggtgcaacgatgagaaatgcataattgatttgaattgaacagaacagaagagaacagaacagccactgcaaatttgcgatagcggcaacagaaactgcatacataaacagtacatatagttatatagtatatataaaaatgttgaattaattattaattttcgcgcctatatatatatacaatatatattttcttaaattttcaaaagaaaacggaagaaaactaaggaaacctaacaaaaaaaaatataaaatataaaactgatacagacgcgaaaagtatattcgatttaaaattctctgcgcaactcatctttttttttattaattttttggaatctatctctgtcgttttgcacatttttatcaaaagaaaaggatttatataaagaaaaaaaatacactgacacattttcatttacccaaacgcgaaaccgaatagaaaaggattaaacgtagtttatagatcgcaaatgcacataaacagattacacacttgggttacttgtttacttaagtgaatgtacgtaccgaagataaagggaagcaacagaaaaaatatttaaatggattaaagtattttgatgtaagagataagtccttatgttaatgcattttatgtttacctttgaaataatgagacgcagatgtaacttaaagaatgtggaataaagaataagctcatttatcacaataaattttcagaaatcacttcacatgctcattataaatgcggctggaaaggatgggtacgccatatatataaataaatacatatataaggtcttaatgtcgatctcatttaatttgggcgcctttcaatttgaaattcgattctatcgcaacgggcaacgacagatcgatatctcatgcacagcaaaccgatcgacattatcgattgtgacatcgaattttcggacagctgacagctgcagtccgtatggatttgtttatccgaaaagaactgagcctatccacgagcagcgtgcttgaagatgtggcgccgcactgtctcaagctactcacatggctgcacgattgtcaggaggagatgcactccgagcaccgccatctgcgactgagccaatccgttgtggaatccctgctaaaggctcacctgtacctgttcgagtgctatgatcgcttcgggcaatcgctggccgaacgctgcgattgccgtggcttcttcgctagctgctctgcattggtggatcgacggaagtgtattcgtgagctgtgtaccaccatcgtgaacacacgaaagggagaaactcatgcaccactgcttcatctttcgcatcgaacgttggccgagattcagcctgcgtggagtgagatcggtgatttggactggtcggcaatacgccaatcggatgcgctttcttccagcgattttatcaatcccgatcttcagcagatgcgacggctagtcaagcggattggccgcttatccagccttgaggacatgcagaccgcaataaagcgctccatggagctgattgagtaccaggtgtggctgcagctttttagggagccaaaggacagcgaaattcacaaggattgctacctaatgcgccacatgatctgtgacactttatcggagggcggatctaccgcttgcaccggcttcctgcacaatatctttctgttcgtatcgcaatccgccaatgagatgagattctgggccagtatggagcatgtacgtctggccggcagccttattgcctacctaatcgaccattggaatcgccacctgccctacctagacttggatgagatgcaattgaccgctgatgcaccagtcacggctgtctcgcagctgcccgtgaacgaggccacatacataacctacctgatgctggccaccggatccatatgtcgccggcagttcgcccagcagctgcgtgcccaactaccccccaattcctggacacatttgctggagctgctaaataaagtggcattcgttttcacttaactacactacgagtttaatcatgtttcggcaaaaactcgcagttgccatcggtcaggcgaaccaccttctcgcccttctcggccaggatctcctcgatgttgcgcttgccgtccagatctgtgaaccagttcagattgtcggcgatcaggtggtgattggagcagccctcgcaggtcacgataacaacgccgcgttggtatgccagcttcgaaatggtcttcatgttccgggtctggcacaccttgcaggtgtagatcagctgcatcttggcctccagtttcgccagaggaatgctattcgtggccaccgtcttgtccgcatcgtcctgggagcagagcaaaataattatacttaacttttttgttatacataattttaaatattgcattccatttataatattttaaattacaaatgtaaataacattatttaatatcaattgggtagtttatttgtatttacaactgatttccaaacataccactggcttactgcagtgtatactgcggcaaatgcacgtgtagttgttgctgctgctaaaaacagctgtttgtgttttggttgcaaagtgatgcacttgcaactgcaattgtggactatttaaagcatcaatttgtgttcttcgggaactggtaagtagtgcgcctcttctcacacctgcgctgattttataaaatttttttagggcggacatatcctcgattttgttgatattatttaactcaatcgaaaagtgtgaaattcatttaaacttagagatggcacctcctttcatttcaaaactagtcgcgagtcacgattttaaaaagttactatagctgtcactggtgctgataaaatttgctgtaactcacagacattaaaaccaattgttaatataaattctactgtgaaatattaagttaagttattaatgaagtccacctggactctggggcttaaaaataacttatttttcaaacaggtagtaaccgtttctccgctatcccgtgacactgc

SEQ ID NO: 18005 - DNA, 1038 bp, DROSOPHILA
atggatttgtttatccgaaaagaactgagcctatccacgagcagcgtgcttgaagatgtggcgccgcactgtctcaagctactcacatggctgcacgattgtcaggaggagatgcactccgagcaccgccatctgcgactgagccaatccgttgtggaatccctgctaaaggctcacctgtacctgttcgagtgctatgatcgcttcgggcaatcgctggccgaacgctgcgattgccgtggcttcttcgctagctgctctgcattggtggatcgacggaagtgtattcgtgagctgtgtaccaccatcgtgaacacacgaaagggagaaactcatgcaccactgcttcatctttcgcatcgaacgttggccgagattcagcctgcgtggagtgagatcggtgatttggactggtcggcaatacgccaatcggatgcgctttcttccagcgattttatcaatcccgatcttcagcagatgcgacggctagtcaagcggattggccgcttatccagccttgaggacatgcagaccgcaataaagcgctccatggagctgattgagtaccaggtgtggctgcagctttttagggagccaaaggacagcgaaattcacaaggattgctacctaatgcgccacatgatctgtgacactttatcggagggcggatctaccgcttgcaccggcttcctgcacaatatctttctgttcgtatcgcaatccgccaatgagatgagattctgggccagtatggagcatgtacgtctggccggcagccttattgcctacctaatcgaccattggaatcgccacctgccctacctagacttggatgagatgcaattgaccgctgatgcaccagtcacggctgtctcgcagctgcccgtgaacgaggccacatacataacctacctgatgctggccaccggatccatatgtcgccggcagttcgcccagcagctgcgtgcccaactaccccccaattcctggacacatttgctggagctgctaaataaagtggcattcgttttcacttaa

SEQ ID NO: 18006 - protein, 345 aa, DROSOPHILA
MDLFIRKELSLSTSSVLEDVAPHCLKLLTWLHDCQEEMHSEHRHLRLSQSVVESLLKAHLYLFECYDRFGQSLAERCDCRGFFASCSALVDRRKCIRELCTTIVNTRKGETHAPLLHLSHRTLAEIQPAWSEIGDLDWSAIRQSDALSSSDFINPDLQQMRRLVKRIGRLSSLEDMQTAIKRSMELIEYQVWLQLFREPKDSEIHKDCYLMRHMICDTLSEGGSTACTGFLHNIFLFVSQSANEMRFWASMEHVRLAGSLIAYLIDHWNRHLPYLDLDEMQLTADAPVTAVSQLPVNEATYITYLMLATGSICRRQFAQQLRAQLPPNSWTHLLELLNKVAFVFT

SEQ ID NO: 18007 - DNA, 2581 bp, DROSOPHILA
ggagcgcaaggccccgcccactgctgaggagctggacgccgaactggactcatacatcaacgacatgaagatctaaatagtgaatagtctgaattagtctaacaagaatagaagagcagcccaatctatagttttaagcctaccatatggacaccccccgcatggtacataaatgcaaacgcatcgacaacgccgcgcccaggagcagatctttgaaagcatcggacatcaaatcaatcaaccacttgcgcatttatccattaattgttagttttgccaatgcggcggatgttaagataactgaaatacatttgatgctgtatttattgtatttagaaatgcgctttatcaagttcgacgataaattgatggaccttgtcaaattaaactgaattgtaataaatactagaattaatttcgtgaccaaatcgaattgtatttactgactcaataggctaggagtattgtttaattactaggcggcggcggactccgaagaatctccatcaacttgcaaaaataaaagagccatcacttacaattaaatgttttatttggagtaatacatcgatggttatattggtattcgtttggacgaattttacagactataagaagattcgattggacactttaagtacaaatgctaaattaggcttagtaggtggtagattttagcaaagtcaatccatatcatccgtatttgtggggcggaatcacgagttacttaatttcaacaatttcgttagacattttaaacctgttacttagacaatagaacaaatgtgggacatgaaaatgaaagggcgaaaggaagaacgacttggagtgctgcttggcaaaatataatcagtttcccttcttcttcggctgatcagcaggttaatataggtaatgcgcctctaaatataggtgtatacgtatgttataagcgagttatgtatatttatagttttatgattcttatgtcggtctgaggatgtgatggtgagtcattaaatgcttggcagctgcttctgctcccgggcacacttccttccctccttcctccctctaccagaatccgcccgacgagaatccgccgggtggaactcggccgcgtgcctctccatttgtggccgctggtttgttcgccggctccttgggctggctgggtggggcggacttggcctcctccttctggatggagacctcttcgcgaattttctccaccaccttgttgggatccgtggagcccatgcaggcattgaggtttgaggagttctgttggttgtacttggcacgcggggcgggaacggccacgtcgggctccgagaagatattggtgtgtccgccgcctgggggcttcagcactcggctggagggacgggcactggtggtcaggccgattttcagctcggtggatgtcattttgtcgctgctggttgtggtttcagtgactgcaatgcataacaatgaaaagtgaatcagatgcggtcggaaatacgagtaccctagactacaaattcagtcacgccacttgcggatgtgacgcccggcacaatgacgcccgtcatccgacatcaccccaccactggcaaatcttggcgaagtggagtgaaaacgagagacccatttgttctgcccttctgccaccttatcgacggtttctctacacacatatgtatgtatgtatgtatatagaaactcatctatttttcttgctgcgctgccctcaactttttaactttgccgttaactgtaattgcgcgttttgtggctgtcgcactttcgttgttgtttttgccattgttcatttctccgtttttgtgttaggcgttcgcacagtgggctcaaaaagtgcgtttgggcattgaccattgactacagttcaaacaataaagtcctttggtgatataaagtgccaatagtcagagtggtcaattaagaaactaattaagttaatagaaagtgggttatatgtatatatgaaaataatatgctttacatatcatctataaaacacacttcctcgcatccaagatgcaaatgacaaatattagtttcgtaatgattttttgcctcgcttatggcggaaaagaggtcgcctcccaggcgatgacatctgaggcaagtgcggtgaagaagcatttgtaatgatgcgtcatccgctgggggaggcacattccgcccaactcccgcctggggtgtatcccatttggggtggctgttggcgacaacaacaaacacaggccacacacactggcaattttgttggggtacgggaaaacaaagcaatgtgaatgaccgcaccgagtcaaagatctctagattagaaggctcacaagcgatttcgattcccacagttgaacgctttccacctgggcaaaaaacactaccaacgtactgcacagaacaaaatacggtcgcatctaaatttattatgatgaatcgaatggatatctaaaattttatttacataactaaaacaacaccaaagagagagagatagatataaggcgtaacaatgaaaacaaattagctggcaaaaaatgacatcgtacaagcattttctctcagtgcagaaaggcaataacagaga

SEQ ID NO: 18008 - DNA, 528 bp, DROSOPHILA
tttgccagtggtggggtgatgtcggatgacgggcgtcattgtgccgggcgtcacatccgcaagtggcgtgactgaatttgtagtctaggtcactgaaaccacaaccagcagcgacaaaatgacatccaccgagctgaaaatcggcctgaccaccagtgcccgtccctccagccgagtgctgaagcccccaggcggcggacacaccaatatcttctcggagcccgacgtggccgttcccgccccgcgtgccaagtacaaccaacagaactcctcaaacctcaatgcctgcatgggctccacggatcccaacaaggtggtggagaaaattcgcgaagaggtctccatccagaaggaggaggccaagtccgccccacccagccagcccaaggagccggcgaacaaaccagcggccacaaatggagaggcacgcggccgagttccacccggcggattctcgtcgggcggattctggtagagggaggaaggagggaaggaagtgtgcccgggagcagaagcagctgccaagca

SEQ ID NO: 18009 - protein, 118 aa, DROSOPHILA; identical to SEQ ID NO: 2844

SEQ ID NO: 18010 - DNA, 3210 bp, DROSOPHILA
ggcgaaccaccttctcgcccttctcggccaggatctcctcgatgttgcgcttgccgtccagatctgtgaaccagttcagattgtcggcgatcaggtggtgattggagcagccctcgcaggtcacgataacaacgccgcgttggtatgccagcttcgaaatggtcttcatgttccgggtctggcacaccttgcaggtgtagatcagctgcatcttggcctccagtttcgccagaggaatgctattcgtggccaccgtcttgtccgcatcgtcctgggagcagagcaaaataattatacttaacttttttgttatacataattttaaatattgcattccatttataatattttaaattacaaatgtaaataacattatttaatatcaattgggtagtttatttgtatttacaactgatttccaaacataccactggcttactgcagtgtatactgcggcaaatgcacgtgtagttgttgctgctgctaaaaacagctgtttgtgttttggttgcaaagtgatgcacttgcaactgcaattgtggactatttaaagcatcaatttgtgttcttcgggaactggtaagtagtgcgcctcttctcacacctgcgctgattttataaaatttttttagggcggacatatcctcgattttgttgatattatttaactcaatcgaaaagtgtgaaattcatttaaacttagagatggcacctcctttcatttcaaaactagtcgcgagtcacgattttaaaaagttactatagctgtcactggtgctgataaaatttgctgtaactcacagacattaaaaccaattgttaatataaattctactgtgaaatattaagttaagttattaatgaagtccacctggactctggggcttaaaaataacttatttttcaaacaggtagtaaccgtttctccgctatcccgtgacactgccaatcgatgacatctgttaatgccatctcacgtgatactatcgacagtactatcgaccatctggtagtaagcactcatattttcgaattttttttgtggaaattctcgagtcaaacaaattatataaagggcacgaaccgatggcgacacgtgtggtggcaacggcgacagtgcgggcggtgaaaggccggaagttaatcccgacgcgggccgctctgactctggtaaggaaaccaaaacctggtgaaatcggcgcatgctgctgctgatgaagtaacagtccccttcgatctgatgattctgatctcccccaatccttttcagacacccgcggcggtgctacgcatcaagacgcttctgcaggacaagccggacatggtgagtgactgctgacaagttgtcatcgaaccaaggctacactttagtgggcattctatcgccttccacgattgagatcttgataatctcgcctagctctttaaaggttcccgtgcatgttatttaagttttagcactggttgcatggagtataggaagttcgcaagagggcttcttcaagcattatatttgacaataggctttttcctcagtcagtcatatattttagcgcaaattattagctataaatataagccatgctaactaattcggcctgcgttaatcagctagattttccaaattttgacccgaccaaattttgatgagcatgtttatcttgttgttaatcatttagtttttaagtgattaaattctttgaattgagacagacttattagaataccgagttctttgtctttggtcaataaacaaggctgcctataaattagccacacagttaatgacagaaattcgatgttgtttctgccacaggttggcctaaaggtgggcgtacggcagcgaggatgcaatggtctgtcctacacgctggactatgccagccaaaaaggtaagccactctggacagaatgttgttcggtggagatctaatgctgcgttctgtgtcgatttttgccagcagacaagttggatgaggaggtggtccaggatggcgtcaaggtcttcatcgacaagaaagcgcagttgtcgctgctgggtaagttcataccagcttagcatagcattggacaagccagctaatacagagtataattcgcttgcaggtaccgagatggactttgtggaatcgaagctgtccagcgagttcgtgtttaacaatccgaacattaagggcacatgcggctgcggcgaatcgttcagcatgtaaaccgatggagatccggaggagatccgccggcacccgcctcgcagacagacctaaattaactaagttaaatgcagtacgcggcccgaccttgtatctcattacgttgttggcaaaagcaccgcatcctttgtaaattttacttcgcaaacgaattctaaatattaagttgtgttctatagttaaattttagttgtagcgctaggtaagtgacgcacccgcttccttgccgcaggctggcagtttgtcctctttagccctagttcaatatatagacaaggaatgttctagaaaacccatgtgcaaatcaagtttattattgaaaaaatacttcgactacgtgcatgttaccgctgattgataccctggaaaccgtactcctcgtagtcgtcttgcgtgtaaacaaactcttcaaagttggggctggtcgcaacctccttgccgccgtaccacgcgtaccgcaccggatcctcgggacagatgagtgacacttcaagatcgtcgggcaccagggcacgtaaatcgcgctttaggcgcggcagaaatcccggaaactgggcactgccgcccacaataaggatgttgagcaggagttcgcggtgcgcttcccaggggcaagccttcagacaatcggccaccgcttccggaatgcccacctgttgcacaccaatgtccgagggattgaagagcagctcgggcacggtgaaacgttcattgcacagcgacaccatttgctgttgctcctcatcctcgcgcggctttccgggaacacgaacatagccccgtttgacggtggtgaagtctggaaggacataatcaactgtgacttcgcgtcgcttctcctccgaataatgcacctgcatcgcctgcttgaagtcctccgccacaaagcagacatcttccttgatctggttaactacatgactctcgtccatgacgtttaggtggcgataagagattagctcctttagctggttggtcagcgccttcccgcccatgtcga

SEQ ID NO: 18011 - DNA, 482 bp, DROSOPHILA
gaccatctggtagtaagcactcatattttcgaattttttttgtggaaattctcgagtcaaacaaattatataaagggcacgaaccgatggcgacacgtgtggtggcaacggcgacagtgcgggcggtgaaaggccggaagttaatcccgacgcgggccgctctgactctgacacccgcggcggtgctacgcatcaagacgcttctgcaggacaagccggacatggttggcctaaaggtgggcgtacggcagcgaggatgcaatggtctgtcctacacgctggactatgccagccaaaaagcagacaagttggatgaggaggtggtccaggatggcgtcaaggtcttcatcgacaagaaagcgcagttgtcgctgctgggtaccgagatggactttgtggaatcgaagctgtccagcgagttcgtgtttaacaatccgaacattaagggcacatgcggctgcggcgaatcgttcagcatgtaa

SEQ ID NO: 18012 - protein, 131 aa, DROSOPHILA
MATRVVATATVRAVKGRKLIPTRAALTLTPAAVLRIKTLLQDKPDMVGLKVGVRQRGCNGLSYTLDYASQKADKLDEEVVQDGVKVFIDKKAQLSLLGTEMDFVESKLSSEFVFNNPNIKGTCGCGESFSM

SEQ ID NO: 18013 - DNA, 3561 bp, DROSOPHILA
tgcccaaccgcttggtggctcctacgtgcgactcgagtccgaatggaaggagatgctcaagcaacgtcacagccatcacacgatccagggaaccaatgccactggcacatccgtggctcaaagcaacagcagctgcctgggatccgcacttgcaactggtggctcctccgtgtccgtcatgtccaagcaaaagcacaagtagaaattcgtattatatgtgtgaagtcattaacttattggattcgccagcaagcatcgtagaccaaatatttagtgacagattattagtcaaatatttagtgcaaaccataaatattcacattgaaatgtagaaaaattaaatgaatatgtagaagaatatatatataaatgattatatctggatgatatcgatgggttctattttactttcacgttttgtgcaattatttggtttgtaaatcaccaagaatttggattttatttcaattttggcattagacagagccttaaaaaatggattaaacaagaattatagtaatatacattacatatctcaatcaatctagggtaaattacattttccattcttcagtctaggcatgatttacaaaaatctattttaagtttgcagcctcttcttcacaaaccgaaatcataacttctcattagacatttattaatatttttatttatttatttattaacttaacgcaatttacaaagacttcgatttgttatacactcctcgccttcacatttattttgttttgtaaatcatttttgtttgtgttttagtttaagcttgaaatggaaaacaacagtactgtttaagaaagagcctgcaagtaaatgcgactgcacgtaaattaatgaaacagaacctgggttcaattacataacaccacatgctcaatggggcgcgggcatggcctttggctcaaccttctggtgacccacccagcggcaaagatgtgcacattaatcataataaaattatagaacagatcagagaattattataactacagggcaatgtaatttcgtggataagatttacgaaaatatattggtgcgtgagtgtacaagaatttagcgtgattgccgttctgaaggattgatgctgaagttggccggtgttcttggtgctgccaccgccgcgaatggtactgatgctagtgcggctgggacaagctaactgaacaggccctcggtggccttctccaaattccaattctccttggagagcacggcgcgcgcctcatgctcgtcgatgcccatgtccctgagacgttggatctttgaatcacaatcgggaaaggtgtgcggtccgcccgcatacgcgttggtccagtgcttggccgtaagcaggaacagatcgtacttgtccttaaactgataggccaccactgcgtcctgtggatcgtccggctctgcggcggccaggagcgcctgcagcgacagcagtacggtgcgcagtgtcatcgctgcagcccagttgtcctttaagatgtccaagcaaatcgcacccgtaaccgacgatatattcggatgccagatgcgcgttatgaagcgtacctgcgaagaagtttgcaatttatttaggtttcaattacaagttacaggttcttattgcgcctttcagaattcaagttaacattgtggattcatagaagtgtcactttctacgaagtgaagtcataagatacgatttttgaaagatgaggtgtactcatgtaagagttgtttatttctaagctagcatattgtataggtgcacaaagtctgacatggctattacgtacctttggtggattgaagggatatgtctcgggcaccttgatctccaggacgaacttgccgccctcgtagggcgtgtcaggcggaccggcgatctcgccgcgcagctccgtccaactgtcattgaccagttcgattttgatggaacactggacgatctgttcagggattacaagccaaattaacaaatcagtggggccaatgtttacatttcacaaagaaaacggagcccataagcgcgccaaaaacgccaccaacgttcgcggacaccctcccccgccccctgcaccacgaccaggggcggtggtgcagctggcattgccgaggtgccgtttgagtgtccttcggccttggagctcgggactcacctcctcgctgcgcatcacctccttgaactcccgcttgatccgcgacactgccatgttcgccatgatgtttcctccgtttctcggactctcctttctgctctctccctgttccctgttcaccgttctcctttctccgccgctcctcttcaccacgctcttcttgctgtgttctgttctgcctctgtttttattgttgcccccccgtgcaattttggattttgtgagtgttgtgcgttgcgtaaattacgcctggctgttggcctacaaggttgctcctttcgatcgcttttcgaattgtcgaagcaacgagctcgaccagcgcacggaaaataaaaaacttattattccaatttcaacacgaatctgactttttacagcgctcagcacgtctattttgccagcgctatttcttttttgtttttccgtagtgtgaccgccgcggtgcattcggataattctgaaagctcgcctatcgattgacgtatcgatagggcttcggggaaagagcgcgaaaattgctaacgaagttcgaatgttcaaatgtttagcatatgaataaataactattacatagggacgtaatgaattggtgctacttgctgcgagccatatattgcctagatacgcccttaatactacccaggtacacccacttcactcaactcataactatttaatcatattaaaacctattaaacattttaaggaggagtcttcttcttaacattggtcctccaattatgtccactggatgacatgatgactttgtttccctgaaggcgacatatcagaatctgggaatcttaaccgacacattttcctaactcgtttcgataatacaaatgaaaagaaacaaaagcaaaatctacataaaaataaccatatttacaaactactttcctaataaattcagctaagccccatacacgaagtactcattcttacctctttgttgataaaatctatttacgttacaatgattggctgaatcaattccaaagttggtttttgtaccattggataaaaaagccgcagcttttccttggcacacgtcaaaggttattttccattgcgtctctgatcttgaatactgaatacatggccttattatataatcgaagttcttttgacctcagtaatatggttccattacgctcgcccgccttgtctgcggtcggaaatttgaaacttgttttgcgccccataaacaaaaacaagaagtttaatcttctaaggcgtaggtctctcttggcaacagtccaaaaataatagacagccattaattatgcgccatacgatcctgtgtttataatggttatacttggaaaaggggtacacgaagtgttactttattcacattgcaattttaaatcaatatgagagaactttacctaaaaaatttttaagtgataaa

SEQ ID NO: 18014 - DNA, 1124 bp, DROSOPHILA
aaaagaaatagcgctggcaaaatagacgtgctgagcgctgtaaaaagtcagattcgtgttgaaattggaataataagttttttattttccgtgcgctggtcgagctcgttgcttcgacaattcgaaaagcgatcgaaaggagcaaccttgtaggccaacagccaggcgtaatttacgcaacgcacaacactcacaaaatccaaaattgcacgggggggcaacaataaaaacagaggcagaacagaacacagcaagaagagcgtggtgaagaggagcggcggagaaaggagaacggtgaacagggaacagggagagagcagaaaggagagtccgagaaacggaggaaacatcatggcgaacatggcagtgtcgcggatcaagcgggagttcaaggaggtgatgcgcagcgaggagatcgtccagtgttccatcaaaatcgaactggtcaatgacagttggacggagctgcgcggcgagatcgccggtccgcctgacacgccctacgagggcggcaagttcgtcctggagatcaaggtgcccgagacatatcccttcaatccaccaaaggtacgcttcataacgcgcatctggcatccgaatatatcgtcggttacgggtgcgatttgcttggacatcttaaaggacaactgggctgcagcgatgacactgcgcaccgtactgctgtcgctgcaggcgctcctggccgccgcagagccggacgatccacaggacgcagtggtggcctatcagtttaaggacaagtacgatctgttcctgcttacggccaagcactggaccaacgcgtatgcgggcggaccgcacacctttcccgattgtgattcaaagatccaacgtctcagggacatgggcatcgacgagcatgaggcgcgcgccgtgctctccaaggagaattggaatttggagaaggccaccgagggcctgttcagttagcttgtcccagccgcactagcatcagtaccattcgcggcggtggcagcaccaagaacaccggccaacttcagcatcaatccttcagaacggcaatcacgctaaattcttgtacactcacgcaccaatatattttcgtaaatcttatccacgaaattacattgccctgtagttat

SEQ ID NO: 18015 - protein, 199 aa, DROSOPHILA
MANMAVSRIKREFKEVMRSEEIVQCSIKIELVNDSWTELRGEIAGPPDTPYEGGKFVLEIKVPETYPFNPPKVRFITRIWHPNISSVTGAICLDILKDNWAAAMTLRTVLLSLQALLAAAEPDDPQDAVVAYQFKDKYDLFLLTAKHWTNAYAGGPHTFPDCDSKIQRLRDMGIDEHEARAVLSKENWNLEKATEGLFS

SEQ ID NO: 18016 - DNA, 3238 bp, DROSOPHILA
taggacaaaacaaaaaaaaaggtggaggcaagctggcacgccaggatgcaatggcccgaagagcacgtggcggacaaggagttccccgcgtggaacaggatgcataaatgaatgaaatggcgttttaggcaattcgcagcgaccaagtttgtgctgacagttcgccaactatgctaatgagaccgtggatgccaggagctcctaaagcggatttcttgccgtgctgccgtcaggaaaatgacgaaaatgaggaagcattccgctctttttacggtggcaacacttcagtcgttcgaggaactcctgatcttatttttaatcgcaactgcacgagctatttatatcatacaatatatatcacaacttacgaatgccacgcactttttatgaactattttggctttggaccccattgtccgtcccatggcgattcaacttttccttattgccttgactgccgacacagtttctttagttcatcataagccgtcgtaagttagtaacaaaagccgggagcaacttttggcgtattttgctgagtaaatcaatacaaaactctattcaaatagaaatatacattttgaataagtttgtttcattaatgagcatttcaaagaagtaataccactaacttttattcatactagttctaggttttcataccatacaaaaaggactattttatgtaaataaatgcgtacttagttatttcaaataaaatattacaagcaacttaatatttaaaataaaatgtgttttaaatgtgtttaaatgtttaaatgaattgccgctagtagtggaaggtgtaaatagcacacacaaagtttgtattttacatagattctcttgacacttcagctaaaaagtatgcagcatataaatagcctttaaatacttatcgatttactttcacacacaatctgcgctggctcagttgtcataaattcacaataacttttaaatagtttaattattgatcttatacacgatagagttcaggatgtgcgacgtgctcctcccatgcgagtataatccaaaggaatgtccgagtcctgcggcggagaagagccgcctcttcacgatccttttgctctactgttggcagcgggagtacgataagagaccctaccgccagttccagttcaagcgactcacgttcgaggaacggattggtcggaggtaccactgcatccgtgacttgcggatcatcgttaactatctgctgcggcgtccccagttgtctgtccaaatttccagcttggttgtcagcaactgggatgcgggcttgctgaaggactttgtccgctcgctgctccccgtttggtacatcgagctgcgactgatgcggtttcctcgggagttcttcgtgatgctgcgtctcaatgcggccaagatgaatgttagccagctcagcttggaaggtaactaatgtggagttcaaggtactcgtccctttgggctacatgcttaactcactctttctctatacatccaggaacacccctcaccgatgaagacgtgcgcatcctgcgagaattcctgctggtaagcaagactctgcgcaggctcaacgtgtccagctgcagcctgacacagttcaacttcgctctgatcgcggacggagtgtataagtcgcctggagtgcgacgcttgagcgccaaccggctgctggggatgagcctcagcctggacacggagaaaatttcatccgtgctgagctcgctgctgatgcagaatacactctgggctctttcgctggagcactgcgaactgaccgcccaggacatgattcccattgccgagcacctggcacggaccaactcgaaatttcggcgcctgcgaatcgcctgcaacaagatcggtccggatggagccttctttctgctgcgtggaatgtccatgggtggcaatctggagttgctggacctgagctactgctcgattggtacgcacggcggcgagtgggtggccaagtacctggcctcgtgccgcagactgcaggtcctgcacttgaactacaacgacatgggtccgacggcagtgaatctcatccttctggccatgaagaaacagtgcaagctggaaaaactaaccttgtatggcaaccactttgactcgcgtaccgcgatgatagtgcgtcgcttgctggatgccgaggtagtactccactccgagctggacatcagttacacatacgacgaggcactgcaggattacagagtggtgccttggcgttagaaagtggatagaaagttgttagttgtgtttactcgtaagtaaattaaagtctatgccgctaaaatcagttgtggtagtacttctcaaagatatcggttgcagacgtgttacgtggtactatgattttttaaaggaaatttgaatatatattttttaggggaaggtataaaaattgtattttaaattacgtcgtaactaatagtaaaacatcaatactaatatttctaatagtaagatttttctaacaaagtttcctaatatgcatataaatggaagttttcggcccactgtgcggcgtaagctttgcaaccacgtgctcactttctcgctctccggctttctctcgcattcccaatgaatgaagaggcggtgctgccagactactgttgagtgggatggaaagcttggcttgggagcgagcttttaggaccaaacagctgacccgacggagtggcaactttcgctttcgtttccggcttctgttttgttattgtgagagcgcagttcgtgtgcgtgtgtgtgcacttgtgaatgtgtggcgatttcaaagtcagacagcaacaacaacgacagcataatgagcgaaaaagaaaacgacggcgacgcgtggagagcgagggcggagagggagcagaacttcggcagcggcgcgacggcgacaggacaacgctaacggtatccttgttgagagtttcgcaatatattttcattgctgcagtctcatcgaaagcgtcgaagcaaccgaatcgcatcgaacatccgacaaatcggttagccgatgcaaaactccattgagaaatgcacagcataaaaaaattcaaaataacaaaaaacccgaataggaaactaacgaattcttacacaacattccaaactagataactagataataatcccgtgctcgtttcgtttgtttgccgttcagtgacagtgctagaaagtgatgtgctccagttcttgtataactcttcataattaacaagaaaactaaaactgtgtt

SEQ ID NO: 18017 - DNA, 1164 bp, DROSOPHILA
atgtgcgacgtgctcctcccatgcgagtataatccaaaggaatgtccgagtcctgcggcggagaagagccgcctcttcacgatccttttgctctactgttggcagcgggagtacgataagagaccctaccgccagttccagttcaagcgactcacgttcgaggaacggattggtcggaggtaccactgcatccgtgacttgcggatcatcgttaactatctgctgcggcgtccccagttgtctgtccaaatttccagcttggttgtcagcaactgggatgcgggcttgctgaaggactttgtccgctcgctgctccccgtttggtacatcgagctgcgactgatgcggtttcctcgggagttcttcgtgatgctgcgtctcaatgcggccaagatgaatgttagccagctcagcttggaaggaacacccctcaccgatgaagacgtgcgcatcctgcgagaattcctgctggtaagcaagactctgcgcaggctcaacgtgtccagctgcagcctgacacagttcaacttcgctctgatcgcggacggagtgtataagtcgcctggagtgcgacgcttgagcgccaaccggctgctggggatgagcctcagcctggacacggagaaaatttcatccgtgctgagctcgctgctgatgcagaatacactctgggctctttcgctggagcactgcgaactgaccgcccaggacatgattcccattgccgagcacctggcacggaccaactcgaaatttcggcgcctgcgaatcgcctgcaacaagatcggtccggatggagccttctttctgctgcgtggaatgtccatgggtggcaatctggagttgctggacctgagctactgctcgattggtacgcacggcggcgagtgggtggccaagtacctggcctcgtgccgcagactgcaggtcctgcacttgaactacaacgacatgggtccgacggcagtgaatctcatccttctggccatgaagaaacagtgcaagctggaaaaactaaccttgtatggcaaccactttgactcgcgtaccgcgatgatagtgcgtcgcttgctggatgccgaggtagtactccactccgagctggacatcagttacacatacgacgaggcactgcaggattacagagtggtgccttggcgttag

SEQ ID NO: 18018 - protein, 387 aa, DROSOPHILA
MCDVLLPCEYNPKECPSPAAEKSRLFTILLLYCWQREYDKRPYRQFQFKRLTFEERIGRRYHCIRDLRIIVNYLLRRPQLSVQISSLVVSNWDAGLLKDFVRSLLPVWYIELRLMRFPREFFVMLRLNAAKMNVSQLSLEGTPLTDEDVRILREFLLVSKTLRRLNVSSCSLTQFNFALIADGVYKSPGVRRLSANRLLGMSLSLDTEKISSVLSSLLMQNTLWALSLEHCELTAQDMIPIAEHLARTNSKFRRLRIACNKIGPDGAFFLLRGMSMGGNLELLDLSYCSIGTHGGEWVAKYLASCRRLQVLHLNYNDMGPTAVNLILLAMKKQCKLEKLTLYGNHFDSRTAMIVRRLLDAEVVLHSELDISYTYDEALQDYRVVPWR

SEQ ID NO: 18019 - DNA, 3642 bp, DROSOPHILA
ccagtgttccagcaggcgttgtgaatgcctctgtttcaactccttgtacagatcattgtacttttccacattaaccaaacctagtgacttcacctttgcttcatcctgcttggactgagaccagcttaagagctttggtctgagcacaaattccaaccagttggtgttcgatttggacttcagtttaaactctcctccaaggaggcccacggaaaagccttcaatgctatcgctggcaaattggcactcatagagacaattctcaaaatctgtaattaggaatataataagaattgtctaagaagtaagtaatattgtgattatcctcacccacaattccggtgcctaggatgttttccgccagtttcttggacagcagtttgaatccgatcgtaaatcctgtgcacgtgcgctggcttggatcctcttttagagacatcgccaactcctccgcactggattcacacactcgcccattctgctgctttgtcacttgggtaatgactacctcgaatatctttttattcaaagcatgatagtttttgatcagtattccaatcgcttgccagaattgtgcttcttctactgctgccatggtgtcgaaagcgaaaggtggctcaaggaaaacgaaaatattaagtatacgcacgatgggtagctgcgtctatcgatatttgtttggcgcgtatttaaaacgaacccttgctaacatattatcctgcgttagccatcgttattattaaacggatattaattcttggggtttattttaagttattaatgagaaaaatgtatcagataaagaaaactatattgtaaatacatacagtagtataaccttcaatatgaaaatgtagcctcaacatcgggataaatcaattaaaatggaaatgaaaataataataatttaataaaatccattagaaattttttttggagatctcgatagccaatcacttaaacatcgattgattgagacttatcgatatggtattgtgttgcgtaatcagctgggaaacacgcagctgaatcttcaaaattacctgttgcatttaatagattagacacaaattatataccatgtcattcctgcgaaaatcggtgcacctattgggttctgtggcgaggcgccaacgacacctgaaagtggtcagtacttggagtgatcagaggggtatgttgttatttgtttggttttacccatgacagattgaaggagcgatctcgacagctgcgcgggacttcagctcaaagccatcggaagattacgccaatttccccggtgccaaggctccatttgtcagcaaattgaacctcattcaaccggaagactatgcgccaataccaatttaccgggtgatggaccaggatggctatatagcggatgagacccaggatccccagctgggccgtgaggttgtggagaaaatgtttcgcgatatggtgctgctgaacaccatggacaaaatcctgtacgaatcccagcgacagggcagaatctcattctacatgaccaatttcggcgaggaggcttcacacattggcagtgccgccgccttggagatgcgggatctcatctacgggcagtatcgtgaagcgggtgttctggtttggcgtggcttccgtatcgaccagtttatcgatcagtgctacggcaacacggacgacttgggtcgcggcaagcagatgcccgtccactacggctcaagggaacttaactttgtcaccatctccagtccgctttgtgagttaatatagtcttatttatttgatgagagaatgcttatccagtttctctgttgtatggcagccacccaaatgccccaggccgttggtgccgcctacgccatgaaattgaggccaaacaacgatgcctgtgtggtctgttactttggtgagggagctgcttccgagggagatgcacatgctgcctttaactttgctgccactttgggttgtccggctatcctcttctggtgagtaactttaagatacatattattttgataagataacctattttggatgtatttcttatcttatcaaaaataccattcaaataagtttcttcatgacgtacctttctccacagtcgaaacaacggctttgccatatccacaccatcgcatgaacagtacaagggcgatggaatcgccggtcgcggacctatgggctatggaattactaccattcgagtggatggcacagacgtcttcgccgtctataatgcgatgaaggctgccagggagtatgtcctcaaggagaacaagccggtggtgttcgaggcactggcctatcgagtgggtcaccattccacctcagatgatagtacagcctaccgaccagcggaggagatcgagatttggaactcggtggagcacccaatatccaagcttaagcgctacatggtgcacaaaggctggtttgacgagactgtcgaaaacgaatatgtcaaggacataaggaaaaaggttttgaagcagatcgcagtgtccgagaagaaactcaagcccaactggcgtgagatgttcgaaggcgtctacgcggagatgccggatcatttgattgagcagcgtagcgagctggaaaaacatatcgaggcccacaaggagcactatcccttgaaggactttgagaaatagattccagataggtgccataaagatgctaacaaatcagaaatcaaaacgaaccgagagactcgatcgaaagtgcatttattatgattaagcaataggcaaacagttttttgtgggttcaacccgtttgttatgactcatctgtacaggtgggtcggtggatatgtgaaattagacactttgggtttttgggttttctctgaccaacgaagaggataaacttggttgcatcctaggtcttaatttgcacatacaaagtgacccactctggtgcaggtgttatgaaaaggtgttaaaatttattaaatttgatttacatacaatatacatatactgaaacaatacgaatacaaatatatacttttgacttaacgcaacgcatcgcagacaaaaacgcgggtggagatgaagctacctgttgcaggatgactcgctgaagcttggctggaatgatgcaggaacgggagttgcccctttcaattggtgcgtagctgatagtcgccgttctgcgtgatgtaccgcacccatggcagcgcctgatagccgctcttctcgatgatcttcagatagcgcacctggatgcccgacgtggtaaagtagggaatctcgaagcgcacctgaattggcggcttgccctccgtattgtcctcgctttccacgctcggcagaccgaaatgtgcccgcattagatactccttgccacccgggaacgatttgatcgtccagatgattgcgttctgctccggtgcgtacttgcagcttccaatggtggtcttgaacttgggtgagtccgcgtcggcgggcactggtatgacgatttccacgttgttggccgtcgatcttcgcttgaactgagacttcgccttaatcatgtactccacacgggagtgggcatgccgctcgatcactgattcgatccaaatcaggggtttgacctgtcaacaggggtttagttagtcttgcattttggtgctaagtacataaaaatactcacatgcgtgtt

SEQ ID NO: 18020 - DNA, 1400 bp, DROSOPHILA
gcgtaatcagctgggaaacacgcagctgaatcttcaaaattacctgttgcatttaatagattagacacaaattatataccatgtcattcctgcgaaaatcggtgcacctattgggttctgtggcgaggcgccaacgacacctgaaagtgattgaaggagcgatctcgacagctgcgcgggacttcagctcaaagccatcggaagattacgccaatttccccggtgccaaggctccatttgtcagcaaattgaacctcattcaaccggaagactatgcgccaataccaatttaccgggtgatggaccaggatggctatatagcggatgagacccaggatccccagctgggccgtgaggttgtggagaaaatgtttcgcgatatggtgctgctgaacaccatggacaaaatcctgtacgaatcccagcgacagggcagaatctcattctacatgaccaatttcggcgaggaggcttcacacattggcagtgccgccgccttggagatgcgggatctcatctacgggcagtatcgtgaagcgggtgttctggtttggcgtggcttccgtatcgaccagtttatcgatcagtgctacggcaacacggacgacttgggtcgcggcaagcagatgcccgtccactacggctcaagggaacttaactttgtcaccatctccagtccgctttccacccaaatgccccaggccgttggtgccgcctacgccatgaaattgaggccaaacaacgatgcctgtgtggtctgttactttggtgagggagctgcttccgagggagatgcacatgctgcctttaactttgctgccactttgggttgtccggctatcctcttctgtcgaaacaacggctttgccatatccacaccatcgcatgaacagtacaagggcgatggaatcgccggtcgcggacctatgggctatggaattactaccattcgagtggatggcacagacgtcttcgccgtctataatgcgatgaaggctgccagggagtatgtcctcaaggagaacaagccggtggtgttcgaggcactggcctatcgagtgggtcaccattccacctcagatgatagtacagcctaccgaccagcggaggagatcgagatttggaactcggtggagcacccaatatccaagcttaagcgctacatggtgcacaaaggctggtttgacgagactgtcgaaaacgaatatgtcaaggacataaggaaaaaggttttgaagcagatcgcagtgtccgagaagaaactcaagcccaactggcgtgagatgttcgaaggcgtctacgcggagatgccggatcatttgattgagcagcgtagcgagctggaaaaacatatcgaggcccacaaggagcactatcccttgaaggactttgagaaatag

SEQ ID NO: 18021 - protein, 439 aa, DROSOPHILA
MSFLRKSVHLLGSVARRQRHLKVIEGAISTAARDFSSKPSEDYANFPGAKAPFVSKLNLIQPEDYAPIPIYRVMDQDGYIADETQDPQLGREVVEKMFRDMVLLNTMDKILYESQRQGRISFYMTNFGEEASHIGSAAALEMRDLIYGQYREAGVLVWRGFRIDQFIDQCYGNTDDLGRGKQMPVHYGSRELNFVTISSPLSTQMPQAVGAAYAMKLRPNNDACVVCYFGEGAASEGDAHAAFNFAATLGCPAILFCRNNGFAISTPSHEQYKGDGIAGRGPMGYGITTIRVDGTDVFAVYNAMKAAREYVLKENKPVVFEALAYRVGHHSTSDDSTAYRPAEEIEIWNSVEHPISKLKRYMVHKGWFDETVENEYVKDIRKKVLKQIAVSEKKLKPNWREMFEGVYAEMPDHLIEQRSELEKHIEAHKEHYPLKDFEK

SEQ ID NO: 18022 - DNA, 3243 bp, DROSOPHILA
atagagttccgcgcctatcgatatattgttgatcaccaaataaataaaactaaataacaacgcaatggaacacgcgacaagtgaattgagggaatttatctcagatctggtgattccgcaccagcgttgcaatgttaacatcaatccggatcacatcacaatgctggagggcaccaagatcaagaagcagcactcccgaaaacgtcgcgcccacaaatccagtacgctgagtcgccgggaatatgcggcacttggtttgaacactcttcccaccaagcagatgaagtacgaggaggcactgccactgcaccacctgtggaagggctatgtacgcgagcatctggagctgagggaaggtgacgaggtgccccaggtgcacgatgctcgctacgacgagttcagccgcaagttggtgaaactggacttgcacggtgccaagatgaaggtgctgcagtccaagtgctccaccctggaaaatttggctggcatctgcgtcatggacaccaagaacgtgctgaaactgctcggcaaggaccatcggctgcgcacaatacccaagagcgagtgcgtctttggtatgaaagtgggcaacatggagttcaccatattcgggcagcacctcaacattcgacccgccgagcgaagcgttaagaagatcaagaactttgtgaagcccttcatgtaggaactacaggaccaatcattagccatagaaattgaatcctattgtaatttaaggaaaaaagtttattggaaagttagcatcgcttttcaatagaaatttaataattgccctcaaagatcctctaaaactttacttgtatttgagattgttgtgtttaatatatatataaaaccgtacattaattgtttttcttgttttttttttttttttttgggggggggggggtatatttcgcgccgcgtttttttcgtatttaggttctagtttatgggagagattacccggattcaaatatatccagtttgtaggaaagatttatgcgggcgtcttggtcatggtgatgacagcggatggaaccaagccgagcacttccagcggcttctcgtagtcgtcctcggcgaacagcttgcgcggaaaggtggtcatcagagagaagggcgactcgatgccggtcttcatctggatgaacacacgtacggcggacagctgctccttgacgttgaaggtttcctgtagtgttgagccatcctgcaggcgcacctggatgcgggtttcggtgtagtctcgcggcggagatttcacaccggccggtggtgacgaaactgtggtggagctcacggatggagctggctctgcgttgcccaattccttttgttctctgcataccatgaattataatgaattatgaagtggaaggatagggctaatccttacctagccttgcgtgctgccttgtccgcctcaatttgagcctttacccgatcgcgggccgccttctcctcgtccttttcgcgcttgcgctgctcaacgatcttcttcatctccaactcctccatgcgccgcttggcctcggtcatgtccttgccggacttgatgcgattcttttcccgctgcagggcttcgattttctcgcgctcctcgcgttcgatgcgtttctgcttgagcttctcctcgatgagggccagctgggccttcttctcctcctcggtgagcgccttcttttcctcctccgattcggagaatttggtgtgaccggttttggcggcatggtactccacttcggtgtgatctctaagaactttgccgcattcgtcgcacttcagggacttggctaccggagcagaggtttcacctgcgccactggtgctactggaagctgctgcggccgaggaatccacagccgcagctggttgagctgtggaaccaggggattcgccggcaccttgacgggatggtattggatcatccacgtgggccagcagccactccattgccggttctacgcccttgttactggtcacctccagtgcatattcactgtgaaatatatttcaggattaaagcaaattcgattgttgcagtgtaacttattttgccggtgaccagttggccattgtattcgatacttacacacgttcccgagggaatcccatatccatcaatgtctgcacttcactcatagcgttggctgattgcgtcccaaaaattaatagttcagtttcgtatatttatgaaaacgaaaaattaacaatgacacacaaaaacaaagccaggcgagatggataactatcgatagctcgacccgtggtatatatcggtgtaatgcaatagttgcagctatggcaaacaaaaatgataaataaatagttttaaatataatataaattttaaatatatagtaaataaattaagacaaggagcggacaaccaaatacattccataattcttttaattttttttatagatattacacatacttttaaataagcattccatatagctgaaatctacccatcattttcgagtagtgtagtgccaccaccaccatagatagttcgaggttgcctgcgacgtttaccaactctgcaaatttggcgtctacggagataggttttttcgactttgaaagagaaatttcaacaattttataatcaaaaccatgtcaccgaagactaaaaaaatgatcgtcaagattccgcgccatccctacttcaatgtgcagggcgaacggagcgtggagcgcgaggtggagtaccaggtccgaaagtgtcgcgtgaatctggagcgcatcaagtcgtcgacttctccgaattcccgtccattcccgttaaaaccgaagcccaagagatgcattgtacgtgtagcccgactgccggacgtggagcgcagcgagatttccgtgacaccggccagttccatcatgaattccgacattgacgagagtaggtgccaggtcttctagggaacctacgccacagactactttaaagcattcttcttcatgttatccttacagatagtggcagcgatcaggagtctaatctgacaatctagtcgtctcatactcaaagagcaatcaacgcatccagctgacaaacttctaatcgcacttggagtcattcgaagtacacagagtacatgtccaagataaaccaaatagatgtgcggggctatccttttcctgaatatatatgtataagatccttatctaagactttatgcaaatcaagctcgatttcttaatacaaactcgtgcgcctaaatagaattttctctt

SEQ ID NO: 18023 - DNA, 1094 bp, DROSOPHILA
ctcgcctggctttgtttttgtgtgtcattgttaatttttcgttttcataaatatacgaaactgaactattaatttttgggacgcaatcagccaacgctatgagtgaagtgcagacattgatggatatgggattccctcgggaacgtgttgaatatgcactggaggtgaccagtaacaagggcgtagaaccggcaatggagtggctgctggcccacgtggatgatccaataccatcccgtcaaggtgccggcgaatcccctggttccacagctcaaccagctgcggctgtggattcctcggccgcagcagcttccagtagcaccagtggcgcaggtgaaacctctgctccggtagccaagtccctgaagtgcgacgaatgcggcaaagttcttagagatcacaccgaagtggagtaccatgccgccaaaaccggtcacaccaaattctccgaatcggaggaggaaaagaaggcgctcaccgaggaggagaagaaggcccagctggccctcatcgaggagaagctcaagcagaaacgcatcgaacgcgaggagcgcgagaaaatcgaagccctgcagcgggaaaagaatcgcatcaagtccggcaaggacatgaccgaggccaagcggcgcatggaggagttggagatgaagaagatcgttgagcagcgcaagcgcgaaaaggacgaggagaaggcggcccgcgatcgggtaaaggctcaaattgaggcggacaaggcagcacgcaaggctagagaacaaaaggaattgggcaacgcagagccagctccatccgtgagctccaccacagtttcgtcaccaccggccggtgtgaaatctccgccgcgagactacaccgaaacccgcatccaggtgcgcctgcaggatggctcaacactacaggaaaccttcaacgtcaaggagcagctgtccgccgtacgtgtgttcatccagatgaagaccggcatcgagtcgcccttctctctgatgaccacctttccgcgcaagctgttcgccgaggacgactacgagaagccgctggaagtgctcggcttggttccatccgctgtcatcaccatgaccaagacgcccgcataa

SEQ ID NO: 18024 - protein, 331 aa, DROSOPHILA
MSEVQTLMDMGFPRERVEYALEVTSNKGVEPAMEWLLAHVDDPIPSRQGAGESPGSTAQPAAAVDSSAAAASSSTSGAGETSAPVAKSLKCDECGKVLRDHTEVEYHAAKTGHTKFSESEEEKKALTEEEKKAQLALIEEKLKQKRIEREEREKIEALQREKNRIKSGKDMTEAKRRMEELEMKKIVEQRKREKDEEKAARDRVKAQIEADKAARKAREQKELGNAEPAPSVSSTTVSSPPAGVKSPPRDYTETRIQVRLQDGSTLQETFNVKEQLSAVRVFIQMKTGIESPFSLMTTFPRKLFAEDDYEKPLEVLGLVPSAVITMTKTPA

SEQ ID NO: 18025 - DNA, 2997 bp, DROSOPHILA
gcactcacatacgattccctttcgaaggcgcgcaggaaacttagcacattgttcgtctcgatgtcgctgcagttccaaaagaccaccgagccctcgcggaagaagaatatctcccgcggctgctgacccgtcggatatttggccgccacaaagagcacattctgctccacgtccagattgtctgtggagaagaaacgcttcgtctcgtacaggttctgttcgcggagggctatctgcagatcctccagattgtactcctcggcggtcgtataaccacgggtgttgagaaaccccaaagcggacagttcatcgatggccaagcgcttctttcgaatgatcctggtgcgaatgggcgatagtatcgactccaagcgctcctcggctagcggcaatggctttacccgcggttgcgtttgagttctaggtacagaagctgcttgagctggcgccgcagccgatgaggtggcttcactggccaaccatcggcggcggtccatcatccactgcgtctgcgtctgctggcgcggaattcgaagtcctccaaggaccatctgcccgaatctcaggcgtgcaaagttcatggcttttgatttatgctccagcagcaattagtggcccatttctgggagttgagatcggtttggtaacgaatcgtatctggtggctatataatatagtagccggcctccgattgccttttgttgtgattatcgaatccgataggcactcagtggtgaactcggttcttcggccgttagttatttctaagctatgaattttcattattgcttggtatttatactacaaatttggtagttgaaattctgttatttgctttttgaaatgctgtaacgagtcttcaactcatactacataaacttctgccaatagagacaaattactgaacctggatacaaaatagccaaaatgtgagaactgaatttaagcggccaaccgcctgcactgctccgataacgatagccatcagctgttttcatcgctccacttaaccattttcttccccatttggggcaaaacaaaacgcagtaactaccccacattcagcacgtgcggcgccagaattcaggacgcactgcagcgggcggcaagagcagaaagcaacgcggatgtgcaacaccgcttagtagcaacataaaatgaacgcattgcgcaacatcttcacatcgcgaactctcaactatttgcgccagaatggacaaaacgcgatcctcaacgccacccagcagcaacaagcggtggacgccgtgccgctaaccaacgatgccgagcagcacctaaaatcgtcgcgtccagcaccgctttccataccgcgctccatactcgatgcgtgccatttcacggccaagcagtttgacctgggaggctccacgtccggaaaccaggcgaatggctctctgtcgccgacgacactgaagcgcttccgacgcatgcaacgccgcatggagctggtgtaccgctgcaagctgtgcaacacccgcaacacgaagaccatcagcgaagaggcctactacagcggcgtggtgatcctacagtgcgacggctgtgccgtcgaccatctgatcaaggacaatctgggactgttcaccggcagcgatggcgatagcagcattagctctggaatcagtaccagcaagaatatcgaccaggtgctggccgaccggcatgcccgcgtccgggtgatcaaggtgaacgagcgcggcgagctgatttaggaactctagtcaaaggggcatcagtagaggtgagaacctggtgccgtcaacctgcgaatcgtgtctgaggaggacacactcgacacggggtggcacattgaacccaagcaaccaagcacccaagtacccaactgcaaaccggaatcccacattctgtttccgagctcagacggctgtatataataattgtactgtaattgttgattgtttcgggccgtgagtaatgcctaaaaaagtgattaaaggaacgaccagttcaaaagcaaaaaacaaacattgtatatggctaaatctgttattccgctgtagactatctaatcagggtgcacagaaagaaaaatgtctcattgttgatataaatgttaaaatacatatgtatatgtacaatcatcaagttttggctacaagccatcaatttttgtcaatatacgccgtgcctatcttatattgaccaggtttttttttctgtgtacgcacacgcatatatactagacgtgcccagtcaaaagtggactcatttatttatctggagagccctagaagccggtagaagccgaaggggctcggtggccgctcgctaattgatcggatcgatcaaaacacagccggagtgctaattatcgcaacaataaaaattggcacgctgccggcctggctacgcaatggtgaaatgtgccggattggtaggtatagatacggctttggggctagacactaatgcataccatatataaatacatataagtatgaaaaacacgcccctgtcgagtgatcttttctgcgtcgtaaggggccgccgaatccctaagagatatgcccccaaattggctaacaacaacggattttgtgcgctgatggcatgtggacggaagatagtaagcccacggagtctgtagttattgccaagtggttctaccaactgttacatccatctcttgacatctaaattaattaacttcatttgaaacttcattaagatctatcccaatctgctgctctgccataataaatattgaaatagatatatatgtagatatggtttattattttgaaaacaccaagcagattgtttcagtgctgcatataattgcatataatttcgaatgcccaactcagcatgacactgcgcttttggtgacgtcaagacaatttgtaaacaaacaagatgattccgaggcatggcgtctagttccacctccattgaatctttccagacgcgcgacaacaagtgtcaagagatactgataaaaacgtcatcgcttat

SEQ ID NO: 18026 - DNA, 997 bp, DROSOPHILA
ctccacttaaccattttcttccccatttggggcaaaacaaaacgcagtaactaccccacattcagcacgtgcggcgccagaattcaggacgcactgcagcgggcggcaagagcagaaagcaacgcggatgtgcaacaccgcttagtagcaacataaaatgaacgcattgcgcaacatcttcacatcgcgaactctcaactatttgcgccagaatggacaaaacgcgatcctcaacgccacccagcagcaacaagcggtggacgccgtgccgctaaccaacgatgccgagcagcacctaaaatcgtcgcgtccagcaccgctttccataccgcgctccatactcgatgcgtgccatttcacggccaagcagtttgacctgggaggctccacgtccggaaaccaggcgaatggctctctgtcgccgacgacactgaagcgcttccgacgcatgcaacgccgcatggagctggtgtaccgctgcaagctgtgcaacacccgcaacacgaagaccatcagcgaagaggcctactacagcggcgtggtgatcctacagtgcgacggctgtgccgtcgaccatctgatcaaggacaatctgggactgttcaccggcagcgatggcgatagcagcattagctctggaatcagtaccagcaagaatatcgaccaggtgctggccgaccggcatgcccgcgtccgggtgatcaaggtgaacgagcgcggcgagctgatttaggaactctagtcaaaggggcatcagtagaggtgagaacctggtgccgtcaacctgcgaatcgtgtctgaggaggacacactcgacacggggtggcacattgaacccaagcaaccaagcacccaagtacccaactgcaaaccggaatcccacattctgtttccgagctcagacggctgtatataataattgtactgtaattgttgattgtttcgggccgtgagtaatgcctaaaaaagtgattaaaggaacgaccagttcaaaagc

SEQ ID NO: 18027 - protein, 191 aa, DROSOPHILA
MNALRNIFTSRTLNYLRQNGQNAILNATQQQQAVDAVPLTNDAEQHLKSSRPAPLSIPRSILDACHFTAKQFDLGGSTSGNQANGSLSPTTLKRFRRMQRRMELVYRCKLCNTRNTKTISEEAYYSGVVILQCDGCAVDHLIKDNLGLFTGSDGDSSISSGISTSKNIDQVLADRHARVRVIKVNERGELI

SEQ ID NO: 18028 - DNA, 3540 bp, DROSOPHILA
agttgacgaattttcccctggaactgaatatgccggtggccgataagttctagtaaatataataaaagaaatgctggtgaagcatttattaacagttattaacaactttttatttcagttcgggcttagccaaaaacgatggtgtattgcatgtctttatcaattcgtttagctaccgccgattgcgacgtgacttgctttccaatatggttactttggtgtgtaagttgattaaaatactcctttatgaatttgtattaaaaatgtcaattttcagctaatctaggcagcgccttcagtctttttgtgggcatgagcatgctttcggtggtagaaattatctactatttttcagtaattttacgcaagaactacaaactggaatgcgaaactcgcagtcagatgcttcacaagaagccgaagttcgcgtggcccaaagctaatgacactcacagtaaagagcagaaatcagttttcataattcacaaatcgtaatcagcacgatgggcgaatgcaaaaaaatattgccataaattagagcaataaaatcgattttaagctgactataaggtccgaatgaactttgatatactcttttggaggcggttcttgttttctttaggaagaaatacatatacttttattgtgttgtcttgaagaactaacatttaaacttagattcgaattcgattatgtgatgtgattgtaacacaagctttaaatcctatgcaagttacaatgtttatgcggttatcttttacgggactaaaccaagcagccgcctggtaggaaaatccaagatacccgcgagttgcaaatatctatcctactatcgcatattgccataggtcagccaatggacattgtaaatctgcccccaatctgggggcgaccatctggtggtcgtaaattggacccaagcgaagcaaatccgcgataagattgtccgtggggtataaaaaggggaaattgctatgaagattactcacagtatatacggtcatgttcaagttcgctttgaccctgacgctctgcttggcgggcagcctttcgctggcccagcacaatccccattggtggggcaatcgcaacaccatcgtccacttgttcgagtggaagtggtcggacattgcccaggagtgtgagagttttctcggacctcgaggattcgccggcgttcaagtgagccccgttaatgagaacatcttatcggcgggtcgtccgtggtgggagcgatatcaacccatctcgtacaagctgaccactcggtctggtaatgaggaggaatttggtgacatggtccgtcgttgcaacgatgtgggtgttcgtatctatgtggatgtgctgttgaaccacatgtccggagattttgacggtgtggctgtgggcactgctggaacagaggcggaacccagtaagaaatccttcccaggagttccatacaccgcacaggacttccatcccacctgcgagattaccgactggaacgatcgcttccaggtgcaacagtgcgaactggttggcctcaaggatcttgaccagagcagcgactgggtgaggagcaagctaattgagttcctggatcacctcatcgaactgggtgttgctggcttccgggtggatgccgccaagcatatggcatcggaagatctagaggtgagtttagcttttcccagtttggaacgattagttaatggtgtttttttccgcagtacatctacagcagcctgagcaacctgaacatcgatcacggctttcctcacaactcccgtcccttcatcttccaggaggtaattgatcacggtcacgaaaccgtctcccgtgatgagtacaaggatctgggtgccgtcaccgagttccgattctccgaggagattggcaacgccttccgtggcaacaacgcactgaaatggctgcagagctggggaaccgattggggattcttgccctcgggtcaggccttgacctttgtggacaaccacgataaccagcgagacgcgggtgccgtgctgaactacaagtcccccaggcagtacaaaatggcaaccgccttccatttggcctatccctacggcatcagtcgggtgatgagctcattcgccttcgatgaccacgataccccgccgccgcaggatgcgcaggagagaataatttcacccgagttcgatgcggatggagcctgtgtgaatggctggatttgcgagcatcgttggcgtcagatctacgcgatggtgggcttcaagaacgccgttcgggatacggagatcaccggctggtgggacaatggagacaaccagatctccttctgtcgcggcaacaagggcttcctggctatcaacaacaacctgtacgatttgtcgcaggatctgaatacctgtctgcctgccggaacctactgcgatgtgatttccggcagcctgatcgacggatcctgcaccggcaaatcggtcactgtgaacgagaatggctatggctatatacacatcggatccgatgacttcgacggtgtactggccctgcatgtggatgccaaagtttaagtaaaggtaacacagaaatctgggctttatttttgtctcaaattacaataaaaacgaacgcacataatgttggaaggtattagctctaactattcgagtatgtttgtgagcggtaacaatagcaataaaaatgcaaagtaaggtatttaacgcgattcgattcgattcgtttttaactggacttagtctaacaaatgccacgacaacgacatcctgtgaataaacaaccggaaaagcggaatactaaatatatgtatatacatatgtagtattcagtatataagctgggcaaactgggcctacatccacatccgatccagctggcacactgtgaacgtaaacccgctctgcaaatagaaaaagttggcattgtgaaattgtagttgggtgttctggccggaattgaatccgaatcgctacaatttgctccattggcgatcacctctcacaagcattcagaggcgcaatggaaaatcgatcgaaaatatggtaaactgttaagcgatttggtcagcgactgtttggttagtttcaaaacaagcaactacaaatcaaaatagcaacgtttctactggcattccgattacgagtgttacgagtttgtagttctggatcgatggatccattcagatccccaagaagtcggctggtggcaatttgatgtgtggttatcggtacgattagttaccatttgattggaattaaatgcttatgaagcgtaattacctgtaaaatgctgatatcttgcttcttaggagtaactcgctaaaaacggttcttactccacttagaatataacatagatctgtgtatactttgtaaactatgattctttagttactctgcttaaatttaggcttgctttactcagggttacactaactttgactaacaaacacagagtccaaaaatgttgctcaaagtttaacaataattattaattaatttagtaatacaatttttccactcttcgcgcggcacaaaagcaaatgcttttcct

SEQ ID NO: 18029 - DNA, 1484 bp, DROSOPHILA
tcatgttcaagttcgctttgaccctgacgctctgcttggcgggcagcctttcgctggcccagcacaatccccattggtggggcaatcgcaacaccatcgtccacttgttcgagtggaagtggtcggacattgcccaggagtgtgagagttttctcggacctcgaggattcgccggcgttcaagtgagccccgttaatgagaacatcttatcggcgggtcgtccgtggtgggagcgatatcaacccatctcgtacaagctgaccactcggtctggtaatgaggaggaatttggtgacatggtccgtcgttgcaacgatgtgggtgttcgtatctatgtggatgtgctgttgaaccacatgtccggagattttgacggtgtggctgtgggcactgctggaacagaggcggaacccagtaagaaatccttcccaggagttccatacaccgcacaggacttccatcccacctgcgagattaccgactggaacgatcgcttccaggtgcaacagtgcgaactggttggcctcaaggatcttgaccagagcagcgactgggtgaggagcaagctaattgagttcctggatcacctcatcgaactgggtgttgctggcttccgggtggatgccgccaagcatatggcatcggaagatctagagtacatctacagcagcctgagcaacctgaacatcgatcacggctttcctcacaactcccgtcccttcatcttccaggaggtaattgatcacggtcacgaaaccgtctcccgtgatgagtacaaggatctgggtgccgtcaccgagttccgattctccgaggagattggcaacgccttccgtggcaacaacgcactgaaatggctgcagagctggggaaccgattggggattcttgccctcgggtcaggccttgacctttgtggacaaccacgataaccagcgagacgcgggtgccgtgctgaactacaagtcccccaggcagtacaaaatggcaaccgccttccatttggcctatccctacggcatcagtcgggtgatgagctcattcgccttcgatgaccacgataccccgccgccgcaggatgcgcaggagagaataatttcacccgagttcgatgcggatggagcctgtgtgaatggctggatttgcgagcatcgttggcgtcagatctacgcgatggtgggcttcaagaacgccgttcgggatacggagatcaccggctggtgggacaatggagacaaccagatctccttctgtcgcggcaacaagggcttcctggctatcaacaacaacctgtacgatttgtcgcaggatctgaatacctgtctgcctgccggaacctactgcgatgtgatttccggcagcctgatcgacggatcctgcaccggcaaatcggtcactgtgaacgagaatggctatggctatatacacatcggatccgatgacttcgacggtgtactggccctgcatgtggatgccaaagtttaa

SEQ ID NO: 18030 - protein, 493 aa, DROSOPHILA
MFKFALTLTLCLAGSLSLAQHNPHWWGNRNTIVHLFEWKWSDIAQECESFLGPRGFAGVQVSPVNENILSAGRPWWERYQPISYKLTTRSGNEEEFGDMVRRCNDVGVRIYVDVLLNHMSGDFDGVAVGTAGTEAEPSKKSFPGVPYTAQDFHPTCEITDWNDRFQVQQCELVGLKDLDQSSDWVRSKLIEFLDHLIELGVAGFRVDAAKHMASEDLEYIYSSLSNLNIDHGFPHNSRPFIFQEVIDHGHETVSRDEYKDLGAVTEFRFSEEIGNAFRGNNALKWLQSWGTDWGFLPSGQALTFVDNHDNQRDAGAVLNYKSPRQYKMATAFHLAYPYGISRVMSSFAFDDHDTPPPQDAQERIISPEFDADGACVNGWICEHRWRQIYAMVGFKNAVRDTEITGWWDNGDNQISFCRGNKGFLAINNNLYDLSQDLNTCLPAGTYCDVISGSLIDGSCTGKSVTVNENGYGYIHIGSDDFDGVLALHVDAKV

SEQ ID NO: 18031 - DNA, 3733 bp, DROSOPHILA
tgcggggctgtagctccagcttatgaccctcctgcgtaatgtattcctgtagaattttcgagtcggtggtctgcgggtagccaaagtcgagcaattcatccagcagctcgtagatgatcacgaaattgtcccgaatggactcctcctccagctccttgaagtattccacaaagacctgcgcgatcttgtgcagaaagacgaagaccagagcgatattaacgttcttattgcgcggcgtcgtggatacgatataaagattgttcgttttgatgtaggcaaatgtagtctccgccgtctgaaggatcggagtgattaggccctcctcctcgcgctccatcagcaatggcatgaatttgtcgatcacggccatgtcgatgttgtcaccgcggtagttccgcgatatcagcaccttgcccttcacgtccagaacgaaaatggccgacgaagacatgtctcttggttcccagcagctgccacttgtcccaggtgtaaaattcccaattggatcgagtgggaggtcgcttcgatggttctactgctcgcggcaggcgttgcgcgtggaagttggcaactgtcgcgaggtggcgatgagtgggctaggtctatcaatgggctggatttacatattccgtttcgtagactggaaaatgcgaatgaaaactccggaatttcttacgtcgccttttctgctgcttctttttcttattagttggcccaccagtgctgtgaaatgttcacatcaggtgttgggcagtgtggccaggtgagattggtctactgctgattaactagcgaattaagcttaaaggaaatgaaaaatgtgcaaggtgtaacatcttaaggtttctgtttttaaataaataccttttaaattattttcattttcccattggtacctttaaattcaaatcataaatatattggagaatgtaatctagcatcactattgtgccatccggcatttgtggccatccgcagtacggccacactgctagcccagacgctgcttttgtggaattgttaattatttatttcggcgagcatgcaaatgaacccgagcgtcacaatcgagcgcaaacgcgtcgactgcagtgtcctgccaaagggatggcagcgcgacgaggtccgaaagtccggcagcagcgccaataacaacgccagcagcaacaacaacagcagtgccacagccagcagcaacaacaacaataacaaggtggatgttttctactacaggtaaagaagaagagcagaattactatatagactactatatacctaaaatcggaacactgcacgctgtttaatcggataaacgtttataatcactttcactacctttctgttattacatccgcataaccacacacacacacaccatatacaccacacacacgcatacgcctatgtatacacacgcacacgaactaccacctaacccaccaaaaatatccatccaccgccgtgtctgttcagcagtcccacaggaaaaagggcggagggaaagccacaggacattgcaatccctgatttccagcctggcaaaatgccgcactgcgccctgccctcgccctccatttcgctgtaccgctgcagcgccatgccgctgcctatagcaagcgggggcggtaatggggccaccagcggatcggcggccaatgccctcaagcgcaagttcgcccggagtcaaggaggcaatgctgcaggagcagcaggagctgctcctccggcagcgaccgcctcgtcagcagcaacagcgacagcagcatctgcttcaccatcaacggccaatcgccagcagcaacagatcgaactcaggtagagccaagtggatgagcacttgactcttgcatgtcagcgtgtcatgtcttgtttgccaggacgcaaggtctacagcctgcggcaattaaaaagcatcaaatgaaaaaatacccaaagaaacacacaattggcaaaacaattcgtagttgtcttcaaaaacgctgtagctctgtgccacctgagatttatgttccaccatctctgcatgctaaagctttactttacgctttgtctaatgtgctgttcggtgttttagctttttgaaggcgtttctctaatacatttccaatctttaatcccttacagccgagccctgcgcactgatgtctccctggtgcctcccattcgacagactgcctcgatcttcaagcaaccggtgacggtgattcgcaaccataaacaggatcccgccaaagcgaagaatgaacccaagcatggcactcgggagaagccgaaacagctgttctgggagaagcgactggaacgactacgcgcctgccacgacagtggcgaggagctagacgacatctcactgcccaagaccatacgcaccgttggccccaatgtcaacgaacagaccgtcctccagtcggtggccacggccctgcatatgctcaacgccggcgtacacggccagagttctacgaaggctgatttgaccaagaatgccatggcgtttatgaatcctgaacaaccgctaatgcacgcggtgatcatttcggaggacgacatacgcaaacaggaggatcgggtcggagttgcgcggcgaaagctgcaggatgcactcaagacatgagttcaatggttaacccccatgcatctaccaattccattgtaggctctaacatctctatcgtattgacccctattcgaaatctacatttaagactagtgtgtaataaaccaaatccaactccaatcgaggaattctggtttcttattggacatcgagaaagcttcgcttgtcttttccatgacaacagggctctgttatccaattttattacgctcagatgactttaaaatgctattttatacaagacagtttaaaaacgaattcgaactataatacataaaccgaattttcatacttagtcgatttgtttggcaaatccttggaacgaagcgttatctacgacgaggggatcattacctgacgaaattttcggtccaaagatttatggccaagtaaatcgatctccttcagtgtttaggtaaacctttaaagctggacagtttttgtgcttcatccccacattgtattttaaaatatatatactatacacatagatatcgttgcagagatgcgattagtctaggccctcctccatctcgtcatcctcgtaatctatgccatcgtagtccgtcgaagagcgtgtcgttagctgcaaggatgaatcaatcggaatttgcaattaactgagaattttgcacgtgctcaagctgaggctgtctacaagagtgtctggagccaacagaagacattgaaccagaactatcgaataagctccatcaagtcaagagtaaagaactacaaatttcagccaaaaatacccacctggttgtaaatcccacgccatgccgcaaacgctcccatggccaagacggctcccacgccggctactattttggtgttcagctcggagtctaggaacttgcgctccgaggccgtcagactggcctccgtgccactgggtgtctttgtgagcttgacggaactgtatccctcgatgcggaatatgtccttcgtgatgcggttgataaagttcactaggttttggcagcccttaatgtgattctgcagtggattgttaggcagtgcgatcttaaagatgatggcaagatagctgtagacaatggcatcaaactcgctgtaggtgtcgccaaagaaccacaccttgcgacccaatttccg

SEQ ID NO: 18032 - DNA, 842 bp, DROSOPHILA
acgctgcttttgtggaattgttaattatttatttcggcgagcatgcaaatgaacccgagcgtcacaatcgagcgcaaacgcgtcgactgcagtgtcctgccaaagggatggcagcgcgacgaggtccgaaagtccggcagcagcgccaataacaacgccagcagcaacaacaacagcagtgccacagccagcagcaacaacaacaataacaaggtggatgttttctactacagccgagccctgcgcactgatgtctccctggtgcctcccattcgacagactgcctcgatcttcaagcaaccggtgacggtgattcgcaaccataaacaggatcccgccaaagcgaagaatgaacccaagcatggcactcgggagaagccgaaacagctgttctgggagaagcgactggaacgactacgcgcctgccacgacagtggcgaggagctagacgacatctcactgcccaagaccatacgcaccgttggccccaatgtcaacgaacagaccgtcctccagtcggtggccacggccctgcatatgctcaacgccggcgtacacggccagagttctacgaaggctgatttgaccaagaatgccatggcgtttatgaatcctgaacaaccgctaatgcacgcggtgatcatttcggaggacgacatacgcaaacaggaggatcgggtcggagttgcgcggcgaaagctgcaggatgcactcaagacatgagttcaatggttaacccccatgcatctaccaattccattgtaggctctaacatctctatcgtattgacccctattcgaaatctacatttaagactagtgtgtaataaaccaaatccaact

SEQ ID NO: 18033 - protein, 226 aa, DROSOPHILA
MQMNPSVTIERKRVDCSVLPKGWQRDEVRKSGSSANNNASSNNNSSATASSNNNNNKVDVFYYSRALRTDVSLVPPIRQTASIFKQPVTVIRNHKQDPAKAKNEPKHGTREKPKQLFWEKRLERLRACHDSGEELDDISLPKTIRTVGPNVNEQTVLQSVATALHMLNAGVHGQSSTKADLTKNAMAFMNPEQPLMHAVIISEDDIRKQEDRVGVARRKLQDALKT

SEQ ID NO: 18034 - DNA, 5708 bp, DROSOPHILA
cgcaaagacgagagacaaaacaccatacaatttttggaaacgaattttaagatttgttgcagaaaagaaaaacactgttgccgcatccgcctagccatcccgctctggcgcacacactcccagcagcggggcatctcgctctctctgcgtgctcgctggctgcgtgtgtgtgcgtgggttctgtgtgtgtgaacaattacctgcagctgcgcacaaagaattcaagtttaatccgcctcggcgacactttttcttgaagcccgtgcttcttggcttttccagccagtcacttgacaaaatactaagcaattgtatttgttgtatttgctttaataattattttcccaccatggaactctcactcactcacacacacgcacacagcaggcgcacacactcaagacaagggagagcgggagagggagagcgagaggagagaggagcagcgcgtacacaacgtatacaaaggacaattacgaatcagcatcgtaaacgcacactgaaaaagcaggtcagatacgtcctgactcgattcaggaatcaaaacacaaaactcaatgccgaatgccagtcgattcgcatattacgcacgcacgaacgctactcacaattattgtaattcacatccgagctttaatttaacaacaacaaaaactagagctggaactaatgtcgatgcttgttagtttttatcgataacccgatacgcgtatgggtggcatggccgggaacgatagatatatctggtatgtgtactcgctaaccaaagtatattatcgataaaagtagattccgataacagctgcgtagttatatatttatttgaggcgccaaatttaaactcaattaattaattagttatatagaaatggtttttgcaataagtatttattctggtcaatgttgttataaattttacaagcactattataatcagccggggggcggagtggggaaaggttgcttacgactatgaaaaacaaggcgggatcgagtccaactaatacaggtccgattttttcatgaccgccgtgaccagtgccttaaacgcgtcctcgatcatgatgatgtgcagctgggcatcccgatacgtgcagagcttgtcgctatcggtgagtggcatttccattgtggtcatgcccagcgatgactgcgaatgcagaatgcgcccggtggtcatcaggatgttgacgcagtcgtcggccagaatgggaaacgtttccacgaaacgaaccatcgctggcatcacattgcgcaggaatctacacttggtcgatgcggtcagcatggacaacgtcgtctggattacattcaggcagaatttcgagacgcccagactcttgggtatcgaatagttgagcaccagatgggaggtcagatcgatggtaaagatctgtttttccatttccgtcacgttgaggaattcgtgaacaaaatcaatgcatatgtgcatcgatggcacactggccaccatcatgggaataaccgactttggatacgtttggaagtgcactagtttcgccagcgaaggctccgaaatgaatgcctgatgcacataggtgccaatgatgccctgtatctcacgcagctccagatgcgacacccgatccgttgccttgctggctatgtagtccagcacctccagcagaatgtgcacggcggcgctctcctgcgaggcaatcagcgtggtccttaggtcctcccaaatcgcatccgtctgcatcatgccattcttgtccagcacctgcttctgctgcatctgcatgtgcacgttgagataggtcttcgaggcggctaggctgcccttcagaatgcgcagcaggatcatcagcaaatagggcgaacagaatacgaagcgtggacaactgttgatcaaaaggaatgcgaaagaattttaggaaacaacacacgaaaatgacgaggcaacccaccttagcacctccatgggctccagaagactctcgttggcaaaggtacgtcgatccatcgtatccgagccgttggtaatcgctcgcagcgacatgatccacagggtggtgggcagcacggcattcaggcgcagccaaatatcgttgtacagatccttgacgtatcgcggcaccgacttggcaaacaccatcggcagatgcttcaccagctgttgtccatactgcgcctgcgtttctgggggcatctggagtagctgcttaaacacgcggatggctagatgcggtttcgtttggatggcggccagtgcacgatccagggtctccggcttgagctcatgcttgcttaccaccaccgtggaattgccctgggccagattgtgctcctccagccagtcatcgaccatgctgagatgcggatagttggagataatcaaacgcagcagcggatggaagagcgagagatagtcgttgtggtagtggtgcgccttctggagcagatacttcagtggcagtccgcccaggaagttgttggagtactccttctgcttgcgaccacccaaagcgctgaggttcatcagtcgcgtatcctcgtacaacatgaggtagtagatcatcagcagctgggcggttagtggacacgtcacctcgatctggttgagctcctgactttccgccatcggtggcagctcctcggcgaagaatgtgagcttggatgtgcggaacacgtgcagaatttccgcctcagtgaagggccggtgcatgtgatcaatattcacttttccggtgggattgggtattatcagcgtgttgacaaagacctccaccagggccggcatcacaggatgcactggcctcaccgaactgcatatttgcttgaagatccacgacttaatgggcactttgtgcttgagaaatgtcctcgatttcagcagttgctggatgcagtgcaccggcaggtagcacagtatggtgccatttaaattcggagtgacgggtacgcgaaccgcatgcagcgccaccacctgctccgtgaacaggtcctgtgtgaagagctgcttgattctgtttgtactgttcggccggatgggtatcttcatggccagcgtggagcagaccatctcgctgatggccgagatctgattgctgtgaaagtgaatggccagaagcaggagcatctcacccagcgaggtgctagtaccggggcgcttgcagaaaaaggcatcctcccgtatgagccactgcagccactccacagccttgttctccagtggaatggtggacaccagcgagggacaggcgatgagcatgcacagcgccagcgttacaaatctcacgcccgagggcgtcgcctgcggacaactcgtgaccagctgcgacagagcattgatctcgtcgtcgttgaacttcaggccaccgatgccgcgcagggcacagtacagacgcagcagcaccgcgccctgcagattgaagtcgcgcagctccgccgcattggtcgtcgtttgaatcaccttctgtagcagctccacgcgcaccagattcagtgcgtcccccttccgcttctggctggagcggatgtaagcggcgaaccaggagcgcagattctggtcattgcccagcagcaggcccgtgaggaaggctatctgtggggagtggttgaagtttgcattgttatctcattattcgtaaatattgtcatacgtccaaataagattcaatcgctctagcgaattagagcgagatagctaagcaacattttctcgcttttgcttttgcttaacacatgttacacaaaaataagcagaactccaaatgaatggtactccaaacaaaaaagatcaatcaacaaaatatgatcaaaaaacatttcttatgtacgttaaatttaaatgaaatgcaaagaatttcctaacgattatagtgttgtggtaaatctgcaccttactggtcaatattaccctactcaccagatcctcgggatgcttgagcgtgagcttaagcataaacgacggcaccttcagcatatccacgcacatggacctgttggccagcgcctgggagggattcatctcgctgagccccatgagcagcattaaccggtgcttgccatcgctgccatcctcgtcgcaattggcgatcacatgggacacaacgtcgcgatagcaatccggaaagttggcgaccagtgcgcagatgatgcgatgtccgttgggcacatggacaagggcgtccgttagctccagtatgttcagcagggagggcagctcggcgagagcaatgcacagaatgtcgaccacctcctccagatagatgccgtcgtccagcatctccgaatgggcggccggtttctgctcggagacctgctgctgcagattgaagatctcggagagcaccacgcgcaccttgcgcgccacatccgcccgctcaaagcccagtgcgatgcccgactggaggccgtactcgtgttgctgtccctcgaagaaggccgacttctggcgggcctgcagctccttcttcagctcattctccagctcatggtagttgacttgcaggtaggagacgatgctgttcaccacctcgatgccgatgagcacggccaggatctctttgcgcgactccatcgacgattcggtgttgtccagtggcgatagcaggctcatccgcaccagcgagggcagcacgggccgaatctccgcctccggatagctggccagcagggtgatgtccagattctgcatggcgcagaaaacgcgcggcgatacatcgtacatcctcaccggcattttgtcctcgtcgtcgttgtcgttgcgttccaacttgttgcacccggcaatgctcgtgtgctcggttgtcccgctctattggcctggccggcggggtgtccgtgctggagatgccggcgcgggtctgctttaatctcggcgatctgtagttggggcagggaatgccggagaatccgagaatccactgcgatccgcatccaaaaaatcaacacacgtcagtgtggccagttggagaggctgcaaatataccagcaattactacattttattattttattattataaaaatactatactgctctcataggtgaaggttaacaaagagatgcgcagctaaagaaaaatattaacaattattgcaagaggctaacaactattagtactattaagttagtaaaatctttactgttattattagcaataaggcttatattctcccaaaaagccaacatattaaaaaaagttaaatataaataagttatgtttgtatataagcatttctgtaacgaaaatcttaggaaaataagaacattttggttctgataaaaatttaattaatattatttaaatagctcgaagtaatagagtacatgtggcgtaaacaattgtttatgtaatattaggttatacaaatatgaaggaatatttaagttaaataatatataaaaatcttaagttccaccgttttggctaatttatagccagatcatgtggcacggccacactgcgcagtaggcgttttttagcgccttctcgcgctggttcacttcgttcactcgttcgcaacgcgatgttttgaatacatacattttttccattctcgccaagtgaagttcatccgccagaccgaagatttttagttgaacgtgctaaatctatgaaattaactgtgttttatgaatcaattagggcgagcggagctgcaaaattatcgagtaggtaagtgaaagtcgccgcagtgcagtaaaaacggcgcgaaattcgaaacgcaagcggtcga

SEQ ID NO: 18035 - DNA, 3229 bp, DROSOPHILA
atgccggtgaggatgtacgatgtatcgccgcgcgttttctgcgccatgcagaatctggacatcaccctgctggccagctatccggaggcggagattcggcccgtgctgccctcgctggtgcggatgagcctgctatcgccactggacaacaccgaatcgtcgatggagtcgcgcaaagagatcctggccgtgctcatcggcatcgaggtggtgaacagcatcgtctcctacctgcaagtcaactaccatgagctggagaatgagctgaagaaggagctgcaggcccgccagaagtcggccttcttcgagggacagcaacacgagtacggcctccagtcgggcatcgcactgggctttgagcgggcggatgtggcgcgcaaggtgcgcgtggtgctctccgagatcttcaatctgcagcagcaggtctccgagcagaaaccggccgcccattcggagatgctggacgacggcatctatctggaggaggtggtcgacattctgtgcattgctctcgccgagctgccctccctgctgaacatactggagctaacggacgcccttgtccatgtgcccaacggacatcgcatcatctgcgcactggtcgccaactttccggattgctatcgcgacgttgtgtcccatgtgatcgccaattgcgacgaggatggcagcgatggcaagcaccggttaatgctgctcatggggctcagcgagatgaatccctcccaggcgctggccaacaggtccatgtgcgtggatatgctgaaggtgccgtcgtttatgcttaagctcacgctcaagcatcccgaggatctgatagccttcctcacgggcctgctgctgggcaatgaccagaatctgcgctcctggttcgccgcttacatccgctccagccagaagcggaagggggacgcactgaatctggtgcgcgtggagctgctacagaaggtgattcaaacgacgaccaatgcggcggagctgcgcgacttcaatctgcagggcgcggtgctgctgcgtctgtactgtgccctgcgcggcatcggtggcctgaagttcaacgacgacgagatcaatgctctgtcgcagctggtcacgagttgtccgcaggcgacgccctcgggcgtgagatttgtaacgctggcgctgtgcatgctcatcgcctgtccctcgctggtgtccaccattccactggagaacaaggctgtggagtggctgcagtggctcatacgggaggatgcctttttctgcaagcgccccggtactagcacctcgctgggtgagatgctcctgcttctggccattcactttcacagcaatcagatctcggccatcagcgagatggtctgctccacgctggccatgaagatacccatccggccgaacagtacaaacagaatcaagcagctcttcacacaggacctgttcacggagcaggtggtggcgctgcatgcggttcgcgtacccgtcactccgaatttaaatggcaccatactgtgctacctgccgttcggtgaggccagtgcatcctgtgatgccggccctggtggaggtctttgtcaacacgctgataatacccaatcccaccggaaaagtgaatattgatcacatgcaccggcccttcactgaggcggaaattctgcacgtgttccgcacatccaagctcacattcttcgccgaggagctgccaccgatggcggaaagtcaggagctcaaccagatcgaggtgacgtgtccactaaccgcccagctgctgatgatctactacctcatgttgtacgaggatacgcgactgatgaacctcagcgctttgggtggtcgcaagcagaaggagtactccaacaacttcctgggcggactgccactgaagtatctgctccagaaggcgcaccactaccacaacgactatctctcgctcttccatccgctgctgcgtttgattatctccaactatccgcatctcagcatggtcgatgactggctggaggagcacaatctggcccagggcaattccacggtggtggtaagcaagcatgagctcaagccggagaccctggatcgtgcactggccgccatccaaacgaaaccgcatctagccatccgcgtgtttaagcagctactccagatgcccccagaaacgcaggcgcagtatggacaacagctggtgaagcatctgccgatggtgtttgccaagtcggtgccgcgatacgtcaaggatctgtacaacgatatttggctgcgcctgaatgccgtgctgcccaccaccctgtggatcatgtcgctgcgagcgattaccaacggctcggatacgatggatcgacgtacctttgccaacgagagtcttctggagcccatggaggtgctaagttgtccacgcttcgtattctgttcgccctatttgctgatgatcctgctgcgcattctgaagggcagcctagccgcctcgaagacctatctcaacgtgcacatgcagatgcagcagaagcaggtgctggacaagaatggcatgatgcagacggatgcgatttgggaggacctaaggaccacgctgattgcctcgcaggagagcgccgccgtgcacattctgctggaggtgctggactacatagccagcaaggcaacggatcgggtgtcgcatctggagctgcgtgagatacagggcatcattggcacctatgtgcatcaggcattcatttcggagccttcgctggcgaaactagtgcacttccaaacgtatccaaagtcggttattcccatgatggtggccagtgtgccatcgatgcacatatgcattgattttgttcacgaattcctcaacgtgacggaaatggaaaaacagatctttaccatcgatctgacctcccatctggtgctcaactattcgatacccaagagtctgggcgtctcgaaattctgcctgaatgtaatccagacgacgttgtccatgctgaccgcatcgaccaagtgtagattcctgcgcaatgtgatgccagcgatggttcgtttcgtggaaacgtttcccattctggccgacgactgcgtcaacatcctgatgaccaccgggcgcattctgcattcgcagtcatcgctgggcatgaccacaatggaaatgccactcaccgatagcgacaagctctgcacgtatcgggatgcccagctgcacatcatcatgatcgaggacgcgtttaaggcactggtcacggcggtcatgaaaaaatcggacctgtattag

SEQ ID NO: 18036 - protein, 533 aa, DROSOPHILA
MPVRMYDVSPRVFCAMQNLDITLLASYPEAEIRPVLPSLVRMSLLSPLDNTESSMESRKEILAVLIGIEVVNSIVSYLQVNYHELENELKKELQARQKSAFFEGQQHEYGLQSGIALGFERADVARKVRVVLSEIFNLQQQVSEQKPAAHSEMLDDGIYLEEVVDILCIALAELPSLLNILELTDALVHVPNGHRIICALVANFPDCYRDVVSHVIANCDEDGSDGKHRLMLLMGLSEMNPSQALANRSMCVDMLKVPSFMLKLTLKHPEDLIAFLTGLLLGNDQNLRSWFAAYIRSSQKRKGDALNLVRVELLQKVIQTTTNAAELRDFNLQGAVLLRLYCALRGIGGLKFNDDEINALSQLVTSCPQATPSGVRFVTLALCMLIACPSLVSTIPLENKAVEWLQWLIREDAFFCKRPGTSTSLGEMLLLLAIHFHSNQISAISEMVCSTLAMKIPIRPNSTNRIKQLFTQDLFTEQVVALHAVRVPVTPNLNGTILCYLPFGEASASCDAGPGGGLCQHADNTQSHRKSEY

SEQ ID NO: 18037 - DNA, 8305 bp, DROSOPHILA
ctccgtaattgtaaattatcgccactttttacagtcattactattagtaagtttataattatgtgggtaacaaagcggtaaaatatgccaaacgaaaaacaacaccagctattagcacagtttcgaaatacgataaagcttgaaaaccggttattgcaccaacgaaagctgacttttgttgttcttgttttgtttgttattgttatttttgctagagcagctgagatttcgcagctgcccgtgaagttgaaaacaaaataagagaaaaaaacaaacggcaggtgaatcaacagcggttcaagcgcccaacccacccacaagtttgttggaggggggacgacgacgtaaaaaacagaataataaagacgtaaacccagttaaatggaaaaatcaaggcgaacgaacacacacggaagcaaaagcacaaaacaaaaggcgacaaaaacacgtcgaaggcggcaaaaaaatttggagaacccaaaaatcaatagaacttcgaaatatccataaccatgtaacacagtgcacattcacttacaataagtgtgccttcctcttctgggttgttttcttatcgctactttacatatgttggcgccacttgcaatggggaaatatatgtaagtgcgtgcgttccgttggtggtgtgtataaatatttaacatttgccggagggtggttccatcgcccagaacttcggcttctgcatggaatactaacataaatcgcgctgcacagtccacttttgtgtgttgcacttcgagtcccaatggttaccaattaatgtcgctacgaaatggaactgctaacgactgtttccgccgcggaccgacgttcctgcttcgatttgaaattcgaagtgaattggccaagccaagcgatatttgtggtaatcgaatcgtcgatatgaaacacactattctatgtgcaaccaaccgagttggcagctcccagcgcgatttttcagtatattttgcagtattttaattgttgcagacggctttttaaagcgccaccagttcgttcacattgtcgctatttttcagcatttcgcgggatctgtattttttataggcgaatattgaaatttgcatggtctaacattgattatagtgttgtattcaccgaatatttattggttttactgtccattgctttgaaagcaatagaaataattgaggatcaagtaagtttaagataaattattacagttaaatgccgatgcaggcactcacgcacactaacgcacccaaaacagcgacacgcgaatttgcgaatttcgttttggcccgttgtttgtgtgttgttgctgttgttacaacgttgtttgtgctaaacattaattaattgtcgcaatgtctgtttcgctataaatatgcgaaacgtgccgttgttatttgcgcgaaactaaatggccaattgcgctttaccggtgttagtgtaggtgtatgtgttgtctgtgtgtgtttgtggttgctggcgcgggcgaatggcgggtaatccgcatacactcgcacttattttttgcaaagggtttatgcgacactcgctttgatcacgatattaaaagctcaaacaccactctaccattatacaaatatttatttatgtaaaataaatgcggttaaataatttaccttagaacttgccctaaaggatattaagtgcaattaaaagtagaacaaacattcattgctaagttactaaatgaatagcattttcttttgcaaacttgttcattataaactactccttcgaatatatatttacttagtatattttctgtttccacgactttgtctcacacataaacacgtaaaagcgcgaaacagacacaacgcacacaggtgaatgaacctttttacgttgttttgtaatctcaatttgttgctgggccgccgcgcagtgtgtgaattttgtaattgctttgagcgcgcgaaaagaaaacacacacatgttgtgttttcccctgaattttccttttgccagctgtttttcctatctctgctaattgtcctgcatcgttctcttttacgtggtgtctccgtttctcgcgcaaaagctcgcgaaatgtcaagttttcttgccaatttttttgcgagttcatttgcatgtttgcttaatttgtttccacagcagctccgcaaatgttaatgaaccttaccggccgacagaaattcgcaatacaatttttacagaattgactgctaaatggaatttcataaatgtgtgtcggttatttatagaccacattggttcataaacaaaggacgtttcaatttaatgtaaataaaacgtggtatacttagaacttgaagtatgtaatttacttagtattcgtacttattcttacttaacatacttaccgaatccctattgaaagatagaaacacatcttgtaaactttttaaaagaaattatctttctgtatttaaatatgttgttcttgtttgttttgttgttttaaggcaaagcgtttatgcataaaaatatatttttatacttttagcattttgtttggtttgtggtggcttctatacaagtacaattcgttttgtaaaccatttgtcctaaagcactaaatgatctcattactttatgcttcgcgtacaacagttcccccggagcactataagtactcgccaagtttcatgacaagccctagaattctacaaaaccaaccgtatgaagggcaatggatcggcatagctaagctttggttgaggcgtctcttgatttcatacggaccaagcgaactgttttatgaatatcgcaagcactattttaaattctacctgattttcccttcccagtcagtttttctaatttaagcaactgccgcacccaattaactttttttcggttgtgttaaagctatgcagacgaactgttactagaaagcactttaaagccaaagcgtcacctggaattcgaattcccatgcccatttcgctcgcctcgtgtaaataaatgtctcacattttagcaaggattagtggggtgtttaggggcgtgtagaattagagccaaatctatttacttgtaaatagagagtgtaaattgaatttacaattgggttaagttaagtacaccgtataataagaataagtataagattaagttgtaaaagttgtgtgtgtatatataaagaacaaggcaattgagtttttagtttggtacatttccaacatacatagctaaccaatctggggtttacataggaatgagtaggtgcacttccgaagaggttaacttatggtcttggtattgatttgccaaagtattataatatagcaaaaatgaacctaaggcgaatttagccaaaagttgtacaagtactgtatttgtaaaaccctcgaaagcctctatcccaaataagttgggtaagggtcaatatccggttctttgaacagtgagatcggggcagggcatcgcctaaagaatgtattttcctttgcctcgatgctctgcttgccgcgtcgacgagaccgccgccaggaggaaactggagctgccgccactactggtgccgctgtgggtgtgggtgctcccgtagctgccgtagctctcacagctgcccagactcccgtagctggctccgtagacgccgagcggcaaggcgtttagctaaatcatgagcgccgagaaggggttgtaccgcatgattttggagagcaggatccacagtaccgaggtgatggcgcagagcaccacaccgccccatcccaagtcgaggctccacgaggtgaggaagatgcgtgctcccagcagcggcttggccattatggccacgcctcctggtcgcgccactattccatccaccgtgccatcgtagtcgctgtccagcatgggacgtccctgctgccgcttgaagtgaatgatcatgagcgtgaagagggcaaagagcgctgttgggtagtaagttgttcattggttaagagtctaaagtagtagttcagtttaatcacacttacccgccagtaaatacatcactcctgtgattaaaatggcgctgatttggcgctggcagacgccaaaggcgcccacaagggcggcactacccagaatgatgaggcagaccaatgagcaggatatggagaggttttgcattcctatcgcagattaccatttcattagaaaaagtttttaaatgttcgaatatcttggaaacttggacttcttacagagtgtagggatgataagcgagagcatagcattgtgaaaatgtattagcagaggataaggattacaactagtgctacaaatgcatcttgcattgacaagatttaagttgttttctctggaaaaacaagattttcatgaatttgtcaaacctaattgcatttgcaaattcattgtggcccagctcagtactccaatttccgctcacaatctgggcaactgtaaaaccaattacccaatagcaccatggcaatcaaatcgcatgtgggtggatatgtttggttgcacaggaacaccaacacaactacagcaaaaagttccaaagtggcaattgcgatttgaagaacgcaggcgggaggggataaggcaaccaagccacacgttgacccatattggaagcccccccggacccccgcctttagctaaacaaccatcggcaaggatctctcgacacggacatgtttcatcttcggggagcgaaagaccgaccagtattgacaatatagaaaaacggatgcaagctcggttagttgctgtggtaattactttatatagacgctacaaggacactcattgttcctgtccatgttcccgttcccggccattgttggtccctggcttttgctattgtttttccatctgatgtgctccggggattggttggaacccacatctttgagctgctgcaaatgggatttgcggtaatgacttgtgaaatgtgcgctggcttgaagctaaaattttaagccaagtgaaatgaatctgggtgaatcaggtggcggctgggtgctcaaagctcgtgctggtgcgtattaatagaatttacatgaatttgtggaaaacaaaattaatatttgtggtcttctacatacatcgaaagtgacgtctagggctcaacctacgaggaatattggagtgtggaatgaggggataatacataaacttaaagcatttaggatggtgaagataaaattaattaaagcttgtaaacacaacagactacagacagaccctaggctataaactgttttcattacttaattaatcgttattttcaatacaatttttttcagctatttatttaacaactcaaaatgtctgctgaagccgaagcaatcgtcacaacggcaactgccgatgtatcatccccaagcaagacagtggctgtggagcccgttgctgctgatacaactccggacaatgctccggctgtgtccaccgagggaagcggaaaggcagagcaggaacgggcagagaaaatacttaaaggcaaggagctgttcagccagggatcgcgcaacttcctggtcaagagctacgacgaggcagctgacgagctgagccaggtgtgccaactgtacgaggaagtctacggggaactggccgatgagctgggtcagcccctattgctgtgagtatgatgcagcatgggcactaaaagacccctaattttataaattgtagaaatatgttgctttgcataagttttgtatgaaaccctccctaatcctttactttcaatgcagctatgcaaaggcattaattgcaatggccttggacgagaacaaagtgattgatgtgcctgacgaggctgccgatgatgatgacgaggatgtggacgacgacgaggaagaaagtgccgaagatggagcggctaagaaggaggaaaagaaagacaccaaggaggcagcaaatggtgcaagcagctctaacggcaaggaactggacaccatcaaggaagggtccgatgaggcagactctaccggggaagccgagcaagctcaaagtgatgaaaagccctctaagaaggtaccgaccggcgtggatgaggtcagcagcagcaatggcggtggcggagctgccgtcaacgatgacgagcgaccgagcacatcgaatggtgaggtcacagctagttgttccaatggtgcagcacctgctgtagaggaagaacccgaagaagaggaaggagttagcggaagtttgcagttggcctgggaaattctagaggcggctgctcagatcttctcgcgccaagggctcagtggactcccctacttggctgaggttcagactgagctggctaacattgagtttgagaatggaatactagaggcggcacgcgaagattatggtgagttcacaaatacatattgtgtaatcggtactgtaactaatgtacatcttacattttagagaaagcactgaagatccacggagagctgcccacaagaaaccgacgtgctttggccgagttgcattacaagatcgggctgacctatttgatgcagcaactcaacaaggaaggagcgacagcactgcgtcaatcaagcgtgttgatcgaggaggaaatcgccgagattaagggcaaggacgaacctagcgagcgcgacagaaacaatatgttggatttggaggaaactaagcaggagattttggccaagatccaggaaatcgaagagatgcaggcccaggtaaataaatattggtcaacttaatttttagattatctataaaaaatcggttattctcttagaccattgctgaagtgcgagctgccctggatagctacatcaagccaatgagcagtggtgatgcagctgctgcctcctcctcgtcgtcgtcgtcagccaatggagccgccagctcttcgtcgtcctcctccaaaggtgctgcggcggcctcctcatcgaccattagcagcagttcggccaagcccacagacatcacacatttgatcaagcgcaagaagccggaggatcccagctcggaggctgaggccctgtgctcgccggccaagcgtgccgccgtctaggggaatcattccagttgcccagtggcacaccagcacccactcacaaccaagcccttaaaatacaccacactcatcggctacttaaaccaacccacacgcattaaacaccattcaactgtcctatacctcgaacctacatatttatgctacttgtttgctgttttctaccaaaattctctgtaagtctgtaagtttacaatcacaattagtgctaagtgcgtacataaaataatgttttgtattaaaagaaaaactaagtaggaaggcaaaaagtgtacacaataaatacgggagatttcccccagaaagttagtagagcggatgtggatctgggactgggattaacaaaccggctgcccctgaatacgtactcagatgcggctgcagagtgacctgtgactcactgtgctgccagtcgttgcgctgctcctcgcctcgtgcgttttccattgagccggccaggtagtttacacacggaggagcaccgcgtgggaacttggggttgcgccgcagttcctgcagctgctgaatgggcagatcaatgcacagtgtccagatgccgccgtgcatgggcaccaggaaaacagagtcgcgccgaaagcgatgatcggctgcgagaggagaaacgcaccgcggggttcaatattcaatcggtatataattatttaatatagatatttggctcacccctcttgtccggcttgagcatagccacctggtcgtcgagaagccactccagatgcagtcccgatcgattggagtagcgatcaaggctgttgcggtcccatgtaacgtgctcccagtgatcagtcatgatggcagcgcacagcatggctgtggcgcttgtagtcatcagcagagtgacgaacaggaagagcaccggcggcgggcccatgcagcagctggagcaacaggtgctgccgcctcccctaccgcccatgcccattcccagaccctccatctgggagcccagtgagttgggtgaaccactaccgctgccccgacgctgaatgaccttggcgcagctgttctgtcgcaacaggatgctgttgctccgccttagactctcgactgccgccgccgctgctgctgtggtcgttggattatcaaactgcagggatcctccaaccaccgaggaggggtgctcataaatgctgttgtgccggctgggtgcaaagtagtagcacgtcgtctggcggttatcgacggaactcgaggctaccggctcgccgccgggcaactcctcattgctgctggagtagacgatggactgcttaaactgattcgagtagcagttttgcttgaagctct

SEQ ID NO: 18038 - DNA, 1997 bp, DROSOPHILA
ctttttaaagcgccaccagttcgttcacattgtcgctatttttcagcatttcgcgggatctgtattttttataggcgaatattgaaatttgcatggtctaacattgattatagtgttgtattcaccgaatatttattggttttactgtccattgctttgaaagcaatagaaataattgaggatcaactatttatttaacaactcaaaatgtctgctgaagccgaagcaatcgtcacaacggcaactgccgatgtatcatccccaagcaagacagtggctgtggagcccgttgctgctgatacaactccggacaatgctccggctgtgtccaccgagggaagcggaaaggcagagcaggaacgggcagagaaaatacttaaaggcaaggagctgttcagccagggatcgcgcaacttcctggtcaagagctacgacgaggcagctgacgagctgagccaggtgtgccaactgtacgaggaagtctacggggaactggccgatgagctgggtcagcccctattgctctatgcaaaggcattaattgcaatggccttggacgagaacaaagtgattgatgtgcctgacgaggctgccgatgatgatgacgaggatgtggacgacgacgaggaagaaagtgccgaagatggagcggctaagaaggaggaaaagaaagacaccaaggaggcagcaaatggtgcaagcagctctaacggcaaggaactggacaccatcaaggaagggtccgatgaggcagactctaccggggaagccgagcaagctcaaagtgatgaaaagccctctaagaaggtaccgaccggcgtggatgaggtcagcagcagcaatggcggtggcggagctgccgtcaacgatgacgagcgaccgagcacatcgaatggtgaggtcacagctagttgttccaatggtgcagcacctgctgtagaggaagaacccgaagaagaggaaggagttagcggaagtttgcagttggcctgggaaattctagaggcggctgctcagatcttctcgcgccaagggctcagtggactcccctacttggctgaggttcagactgagctggctaacattgagtttgagaatggaatactagaggcggcacgcgaagattatgagaaagcactgaagatccacggagagctgcccacaagaaaccgacgtgctttggccgagttgcattacaagatcgggctgacctatttgatgcagcaactcaacaaggaaggagcgacagcactgcgtcaatcaagcgtgttgatcgaggaggaaatcgccgagattaagggcaaggacgaacctagcgagcgcgacagaaacaatatgttggatttggaggaaactaagcaggagattttggccaagatccaggaaatcgaagagatgcaggcccagaccattgctgaagtgcgagctgccctggatagctacatcaagccaatgagcagtggtgatgcagctgctgcctcctcctcgtcgtcgtcgtcagccaatggagccgccagctcttcgtcgtcctcctccaaaggtgctgcggcggcctcctcatcgaccattagcagcagttcggccaagcccacagacatcacacatttgatcaagcgcaagaagccggaggatcccagctcggaggctgaggccctgtgctcgccggccaagcgtgccgccgtctaggggaatcattccagttgcccagtggcacaccagcacccactcacaaccaagcccttaaaatacaccacactcatcggctacttaaaccaacccacacgcattaaacaccattcaactgtcctatacctcgaacctacatatttatgctacttgtttgctgttttctaccaaaattctctgtaagtctgtaagtttacaatcacaattagtgctaagtgcgtacataaaataatgttttgtattaaaagaaaaactaagtaggaaggcaaaaagtgtacacaataaatacgggagatttcccccagaaagtt

SEQ ID NO: 18039 - protein, 492 aa, DROSOPHILA
MSAEAEAIVTTATADVSSPSKTVAVEPVAADTTPDNAPAVSTEGSGKAEQERAEKILKGKELFSQGSRNFLVKSYDEAADELSQVCQLYEEVYGELADELGQPLLLYAKALIAMALDENKVIDVPDEAADDDDEDVDDDEEESAEDGAAKKEEKKDTKEAANGASSSNGKELDTIKEGSDEADSTGEAEQAQSDEKPSKKVPTGVDEVSSSNGGGGAAVNDDERPSTSNGEVTASCSNGAAPAVEEEPEEEEGVSGSLQLAWEILEAAAQIFSRQGLSGLPYLAEVQTELANIEFENGILEAAREDYEKALKIHGELPTRNRRALAELHYKIGLTYLMQQLNKEGATALRQSSVLIEEEIAEIKGKDEPSERDRNNMLDLEETKQEILAKIQEIEEMQAQTIAEVRAALDSYIKPMSSGDAAAASSSSSSSANGAASSSSSSSKGAAAASSSTISSSSAKPTDITHLIKRKKPEDPSSEAEALCSPAKRAAV

SEQ ID NO: 18040 - DNA, 4319 bp, DROSOPHILA
ttcgccggcgaccacatcatcatcgctgcagggcagatcctggagctcttgtttgatgaccatttggggctccagcagcgctgtgtccgcgtccgttaagtcttcgatctcgtggaagttgggcagatccccattacgaccggacagggacatgggctcgccgagattgaaggggagacgggaggaggtattcgccacggactggtcgcccaggtgaactgtctgcatgtggccgatgaaggagtcgaagtagagaaacttctcgctgcagaagatgcaacgcagggcgaagtactggaagtcatctgtggccgtcaccatgccgcagtccttggtgcagtgacggaaaatctcctcgtcgttggtacgtggatacgccaggacactcatcgcgccgcctgcggatcctcgtcctgtccggttaacaatcagaattcaattaagtctcttggtactctacgctgcggtcggcgcactctagtattgtgccttattttgacttgattttatcccgatttggccaataaaaaaaaactttttagtgttggggtttgggcgcacggttgcatttcatttgctaatcgccatcggtggtcgcaggtgagccgattaaattgtgcggcttattttgcagtgatttagcgggaaatagccattactagcgggaaatatattaccacccttaagaccttctttaatactcataatcatataatctttgtaaataacttagatattaagaatcgcttaaattgataccgattaaattaagttgcccaagaagggtaatggtacgctagtcaataaaataatttcgtttaataaatttaaataaaaaaaaagatatatatatgaaacattttttaaatgtcattttgcatgtaagccaccacaacgaaaaatctaattagaaataaataaaagtgttacaaattggaagtgattacaatactatcgattgtactgctttgaagtctctagttgtctttcccccatctggtcacacttgccatctgatttcttcgattcgcctaactttaagcgtgcttggatttgtgccgattcctattgatttattttgccgagctaagaaaatctctgtttaattgcgacacgcgatggcttcgattagcttgctgaaccccaaggccgagtttgcccgcgccgcccaggctctggccatcaatatcagtgccgccaagggactgcaggatgtgatgcgcaccaatttgggacccaagggcaccgttaagatgtaagttactaaaaccggcctctaatatccctcactttgcgttccattagcaatttgagtgagaatgctagtttataggcgaaaaaacaaacgttttggtcacagctgcggcaactgcaagtttgaggttagactggaactagcggcatgcgtcatcgcaaaagaaagaaagagaatgttgcaactctggagcaaaaagcttagaatttaggtgtttttatttaatttcaaaaagaatcttaaatgaaagatgcccccagaggctttaatttattcataaatgtgtgtttacctgcatatccagcaccgggtgattcagaaagtggcatcgaaagaggcgtgacttgactcacgcgccgtgaaaagtgaaacaagcatactaattctagaaacttcgcaggttggtttctggcgccggcgacatcaagatcaccaaggatggcaatgtcctgctgcacgaaatgcagatccaacatccgactgcctctatgattgccagggccagcacggcccaggatgattccaccggcgatggaaccaccaccactgtgatgcttattggcgagctcctgaagcaggccgatatctatctgtccgagggactgcatcctcgcatcatgaccgatggattcgagaaggcacgcgacaaggcattggaggtgctcgaccaggtcaaggtgcccgtggagatcaacaagaagaacctggtggaggtggccaacacaagtctgaagaccaaggtgcatcccgcccttgccgatctgcttacggacgtctgcgtgaatgccgtgctgaccattgccagtgccgataagaccaagcccgtggacctccacatggtggagctgatggagatgcagcacaaatccgataccgatacacagctggtgcgtggactagtcatggaccatggtgctcgccacccggacatgccgaagcgtttggagaatgcctacatccttacggccaatgtctcgctggagtacgagaaggccgaggtcaactctggcttcttctacaagaccgccgaggagcgtgaggcctttgtgcgcgccgagcgcgaattcatcgaccagcgtgtgaagaaggtgatcgaattgaagcgctccgtgtgcgatggcaccgacaaaaccttcgtcctgatcaaccagaagggcatcgaccccatctcgctggacgccctggccaaggagggcatcctggccttgcgtcgcgccaagcgccgcaacatggagcgtctgtctttggcctgcggtggcactgcaatgaactcctttgacgatctgcaggaggagcacttgggatacgccggtgtggtgtacgagcatgttctgggcgagaacaagtacactttcgttgaggactgcaagaacccgctgtccgtcacgatcctgatcaagggtcccaacaagcacacgatcacccagatcaaggacgccatcagggacggtctgcgtgccatcaacaacaccattgccgataaggctctggtgcccggagctggagcattcgaggtgcgcgcgtacaacgagctggtcgccttcaaggacaccatcaagggcaagtcccgcctggcagtgcaggcctttgccgatgccctgctggtcattcccaagacgctggccgtgaacagcggctacgatgcccaggacacaatcgtcaagctgactgttgaggatcgcctgagtcccgaactggtcggcctggatctggccaccggggagcccatgaagcccgtggatctgggcgtctacgacaactacatcgttaagaagcagatcctcaactcctgttcgatcattgccagcaacctgcttctcgtcgacgaggtgatgcgtgcgggcatgacgagcctcaagggctagtccccatcatttcatccgacccattcaatttaaccaagttaatgcaccgcatgctactcaacccgcgtctctcaaagccacacacaaccaaaagaaaactaaacacgtaaataatttggaaacacatgaaatcggaatggttgcggctgcaagtattcacatttaaaatacaattctaataaatacaaaaaccaaacacagctctatgcttaacgctaatgtattttctatttttattaacactaatgtttactcactacaaactttcattggtttaaaaataaatggaaatagcgatttagccgtgactcaaacctcaatatgggcggtaattggggaatacccacaactacattttttggggccacatggtatatttgaagagtccactgggtggtcacaccgcagtcaacagttgtcgctttcgctggaaagcagctgaaaacaagtgaatttctgaattaaaaacattttcaaacatgttttcggttacttgtgtggcgcccgtaaacatagcgctcatcaaatattgtgggtaaattaatacatatattataagcacataaacttatgcacatgcattcctttaaagggggaaagcggcacgaagagctaattctgcccgtcaatgattccattagcatgactctgagcaccgatgaggtaaatatgaaagatatttaaatatttatttgcgttttaaaaccaacaaattgtaattaaaaaattaaaaaaccttagacgcttttaataatggtttaagtttaaagtgcgcgtagtcgaagttttcattttctcacaaatgtaaatattacgaaaactttctatttaatttgggaagatctcacggattttcacttttcaccgattctctctctttcgatttgtgtggacactgaatttgcttaagattaaaatgaaattactaacttaaaaaaaatgggtttttgaatatgggttgttcgaaatcctgtaatttctaacttattttttgaaatagcaatctatcgagacttttaaaatcttgaacaattacctttcttgatcccatctcccaagctctgcgccaagacaacagtgactgcatcggaatcctttgaaacgaatcgcatgtggctgaatggggaggaggtgccttttgaagagagttcccgcctgcagcgctgtttgaatgaaggcgagtttatagttatatatat

SEQ ID NO: 18041 - DNA, 1919 bp, DROSOPHILA
tcacacttgccatctgatttcttcgattcgcctaactttaagcgtgcttggatttgtgccgattcctattgatttattttgccgagctaagaaaatctctgtttaattgcgacacgcgatggcttcgattagcttgctgaaccccaaggccgagtttgcccgcgccgcccaggctctggccatcaatatcagtgccgccaagggactgcaggatgtgatgcgcaccaatttgggacccaagggcaccgttaagatgttggtttctggcgccggcgacatcaagatcaccaaggatggcaatgtcctgctgcacgaaatgcagatccaacatccgactgcctctatgattgccagggccagcacggcccaggatgattccaccggcgatggaaccaccaccactgtgatgcttattggcgagctcctgaagcaggccgatatctatctgtccgagggactgcatcctcgcatcatgaccgatggattcgagaaggcacgcgacaaggcattggaggtgctcgaccaggtcaaggtgcccgtggagatcaacaagaagaacctggtggaggtggccaacacaagtctgaagaccaaggtgcatcccgcccttgccgatctgcttacggacgtctgcgtgaatgccgtgctgaccattgccagtgccgataagaccaagcccgtggacctccacatggtggagctgatggagatgcagcacaaatccgataccgatacacagctggtgcgtggactagtcatggaccatggtgctcgccacccggacatgccgaagcgtttggagaatgcctacatccttacggccaatgtctcgctggagtacgagaaggccgaggtcaactctggcttcttctacaagaccgccgaggagcgtgaggcctttgtgcgcgccgagcgcgaattcatcgaccagcgtgtgaagaaggtgatcgaattgaagcgctccgtgtgcgatggcaccgacaaaaccttcgtcctgatcaaccagaagggcatcgaccccatctcgctggacgccctggccaaggagggcatcctggccttgcgtcgcgccaagcgccgcaacatggagcgtctgtctttggcctgcggtggcactgcaatgaactcctttgacgatctgcaggaggagcacttgggatacgccggtgtggtgtacgagcatgttctgggcgagaacaagtacactttcgttgaggactgcaagaacccgctgtccgtcacgatcctgatcaagggtcccaacaagcacacgatcacccagatcaaggacgccatcagggacggtctgcgtgccatcaacaacaccattgccgataaggctctggtgcccggagctggagcattcgaggtgcgcgcgtacaacgagctggtcgccttcaaggacaccatcaagggcaagtcccgcctggcagtgcaggcctttgccgatgccctgctggtcattcccaagacgctggccgtgaacagcggctacgatgcccaggacacaatcgtcaagctgactgttgaggatcgcctgagtcccgaactggtcggcctggatctggccaccggggagcccatgaagcccgtggatctgggcgtctacgacaactacatcgttaagaagcagatcctcaactcctgttcgatcattgccagcaacctgcttctcgtcgacgaggtgatgcgtgcgggcatgacgagcctcaagggctagtccccatcatttcatccgacccattcaatttaaccaagttaatgcaccgcatgctactcaacccgcgtctctcaaagccacacacaaccaaaagaaaactaaacacgtaaataatttggaaacacatgaaatcggaatggttgcggctgcaagtattcacatttaaaatacaattctaataaatacaaaaaccaaacac

SEQ ID NO: 18042 - protein, 533 aa, DROSOPHILA
MASISLLNPKAEFARAAQALAINISAAKGLQDVMRTNLGPKGTVKMLVSGAGDIKITKDGNVLLHEMQIQHPTASMIARASTAQDDSTGDGTTTTVMLIGELLKQADIYLSEGLHPRIMTDGFEKARDKALEVLDQVKVPVEINKKNLVEVANTSLKTKVHPALADLLTDVCVNAVLTIASADKTKPVDLHMVELMEMQHKSDTDTQLVRGLVMDHGARHPDMPKRLENAYILTANVSLEYEKAEVNSGFFYKTAEEREAFVRAEREFIDQRVKKVIELKRSVCDGTDKTFVLINQKGIDPISLDALAKEGILALRRAKRRNMERLSLACGGTAMNSFDDLQEEHLGYAGVVYEHVLGENKYTFVEDCKNPLSVTILIKGPNKHTITQIKDAIRDGLRAINNTIADKALVPGAGAFEVRAYNELVAFKDTIKGKSRLAVQAFADALLVIPKTLAVNSGYDAQDTIVKLTVEDRLSPELVGLDLATGEPMKPVDLGVYDNYIVKKQILNSCSIIASNLLLVDEVMRAGMTSLKG

SEQ ID NO: 18043 - DNA, 3728 bp, DROSOPHILA
gggatacgccggtgtggtgtacgagcatgttctgggcgagaacaagtacactttcgttgaggactgcaagaacccgctgtccgtcacgatcctgatcaagggtcccaacaagcacacgatcacccagatcaaggacgccatcagggacggtctgcgtgccatcaacaacaccattgccgataaggctctggtgcccggagctggagcattcgaggtgcgcgcgtacaacgagctggtcgccttcaaggacaccatcaagggcaagtcccgcctggcagtgcaggcctttgccgatgccctgctggtcattcccaagacgctggccgtgaacagcggctacgatgcccaggacacaatcgtcaagctgactgttgaggatcgcctgagtcccgaactggtcggcctggatctggccaccggggagcccatgaagcccgtggatctgggcgtctacgacaactacatcgttaagaagcagatcctcaactcctgttcgatcattgccagcaacctgcttctcgtcgacgaggtgatgcgtgcgggcatgacgagcctcaagggctagtccccatcatttcatccgacccattcaatttaaccaagttaatgcaccgcatgctactcaacccgcgtctctcaaagccacacacaaccaaaagaaaactaaacacgtaaataatttggaaacacatgaaatcggaatggttgcggctgcaagtattcacatttaaaatacaattctaataaatacaaaaaccaaacacagctctatgcttaacgctaatgtattttctatttttattaacactaatgtttactcactacaaactttcattggtttaaaaataaatggaaatagcgatttagccgtgactcaaacctcaatatgggcggtaattggggaatacccacaactacattttttggggccacatggtatatttgaagagtccactgggtggtcacaccgcagtcaacagttgtcgctttcgctggaaagcagctgaaaacaagtgaatttctgaattaaaaacattttcaaacatgttttcggttacttgtgtggcgcccgtaaacatagcgctcatcaaatattgtgggtaaattaatacatatattataagcacataaacttatgcacatgcattcctttaaagggggaaagcggcacgaagagctaattctgcccgtcaatgattccattagcatgactctgagcaccgatgaggtaaatatgaaagatatttaaatatttatttgcgttttaaaaccaacaaattgtaattaaaaaattaaaaaaccttagacgcttttaataatggtttaagtttaaagtgcgcgtagtcgaagttttcattttctcacaaatgtaaatattacgaaaactttctatttaatttgggaagatctcacggattttcacttttcaccgattctctctctttcgatttgtgtggacactgaatttgcttaagattaaaatgaaattactaacttaaaaaaaatgggtttttgaatatgggttgttcgaaatcctgtaatttctaacttattttttgaaatagcaatctatcgagacttttaaaatcttgaacaattacctttcttgatcccatctcccaagctctgcgccaagacaacagtgactgcatcggaatcctttgaaacgaatcgcatgtggctgaatggggaggaggtgccttttgaagagagttcccgcctgcagcgctgtttgaatgaaggcgagtttatagttatatatataaaagtatagaactttaatgtaaaaaatgcacttgcagttcatcgattggctgtggcgagtggctcccagaaggttccgccaacctggaagctgcacatcgcatcggtaaacaatttccccaccgccgccggactggcatccagtgcagctggctacgcctgcctggtgtactccctgtcccgactctacgatataccgctgaatgaggagctgacgacggtggcgcggcaaggaagtggatcggcatgtcgcagtctgtatggcggttttgtgcagtggcatcgcggagctctggatgatggcagcgattcggtggcgaggcaaatagctccatccgaccactggcccaacatgcatgtgctcatcctggtcgttaacgatgcacgcaagaagactgcctcgacaaggggcatgcaacaggcggtgaagacgtctcagttgatcaaacatcgcgtggatcaagtggttcccgaccggattatccgattgagggaggccatcgcaagccatgactttcaggcattcgccgagataacgatgaaggactcgaatcagttccatgccatcgccctggacacctatccgccgtgtgtctacatgaacgatgtgtcgcacagtatcgtgtccttcgttcacgattataacgaacgaatgggtagctatcatgccgcgtacaccttcgatgctggtccaaatgcatgcctctatgtcctggcggagcacgttccgcatctcttgagcgctatccaaaaggtgttccccaatgatttagcggatggtggcacctacttgcgaggccttcccattccaaaagtgcaagatgctgagagcagcaagttggattcactagatgttcatgctaaaaatgctttcagatatataatccacacgaaagtcggtgaaggaccaaaagaattaagcgctgataatagtttattgataaatggacttccgctgaagtgatgagagtgattttgagagtgaattgcatagggaaaggcacagaaattctataaaggaaatattttttagaatatatttatgcgaaaatacatttatcaaaatgtacaatggggcacaatgtataaacatttaaaatgcgcacgattattcattattacgtgactaaatttgaatatctcaattgcaacaacttaatttattctctttatttatttttaccttatttatttatgaattccggtgaacaaatgattggctatttttaaataaaattatgaaaaacggaaatcaattctaattgcaattttagctaaccttggtttatacatttattttgcatttgtatttatgctatttatagaaaatcaacaaaatacgctttgtaaacacgaacttctttcatttcgattttgaatgctttttgtggggtcgcagtgcaaacatttgtttgaatagaataatttatcgttttgaaatatgtttatttatgcacatacatttaattgctttgtgcaaagtaaacagcggcggctttagaaaattctgaactgaaaattttttgtattgctttagcatattgatgttattttagctaaatttttacaaaaaaattgacaaaaaatgaatccttaaaaaatggttcgcatttgtaatattctgtgcaaacagtcattattttaggtttgcgaccaacttgtgataaaaaaaaaccgcccaaaagagtatagtaaaacaaccatttcaacattctacgttttctttgccttgctaagaaaatatttattattattattatattattatttttttttttttgatatggtatatggcagacttcagtttaaagtttacattttaaaagtgagcgaagcactgctatttatttttatacatttgtatatgtagtagatattagatacgttgtaatccatttttgcacaaattacgtgaattatgtataaataagcaacaaatgaagagcgtaacaattagtaaataa

SEQ ID NO: 18044 - DNA, 1211 bp, DROSOPHILA
cagctgaaaacaagtgaatttctgaattaaaaacattttcaaacatgttttcggttacttgtgtggcgcccgtaaacatagcgctcatcaaatattggggaaagcggcacgaagagctaattctgcccgtcaatgattccattagcatgactctgagcaccgatgagctctgcgccaagacaacagtgactgcatcggaatcctttgaaacgaatcgcatgtggctgaatggggaggaggtgccttttgaagagagttcccgcctgcagcgctgtttgaatgaagttcatcgattggctgtggcgagtggctcccagaaggttccgccaacctggaagctgcacatcgcatcggtaaacaatttccccaccgccgccggactggcatccagtgcagctggctacgcctgcctggtgtactccctgtcccgactctacgatataccgctgaatgaggagctgacgacggtggcgcggcaaggaagtggatcggcatgtcgcagtctgtatggcggttttgtgcagtggcatcgcggagctctggatgatggcagcgattcggtggcgaggcaaatagctccatccgaccactggcccaacatgcatgtgctcatcctggtcgttaacgatgcacgcaagaagactgcctcgacaaggggcatgcaacaggcggtgaagacgtctcagttgatcaaacatcgcgtggatcaagtggttcccgaccggattatccgattgagggaggccatcgcaagccatgactttcaggcattcgccgagataacgatgaaggactcgaatcagttccatgccatcgccctggacacctatccgccgtgtgtctacatgaacgatgtgtcgcacagtatcgtgtccttcgttcacgattataacgaacgaatgggtagctatcatgccgcgtacaccttcgatgctggtccaaatgcatgcctctatgtcctggcggagcacgttccgcatctcttgagcgctatccaaaaggtgttccccaatgatttagcggatggtggcacctacttgcgaggccttcccattccaaaagtgcaagatgctgagagcagcaagttggattcactagatgttcatgctaaaaatgctttcagatatataatccacacgaaagtcggtgaaggaccaaaagaattaagcgctgataatagtttattgataaatggacttccgctgaagtga

SEQ ID NO: 18045 - protein, 388 aa, DROSOPHILA
MFSVTCVAPVNIALIKYWGKRHEELILPVNDSISMTLSTDELCAKTTVTASESFETNRMWLNGEEVPFEESSRLQRCLNEVHRLAVASGSQKVPPTWKLHIASVNNFPTAAGLASSAAGYACLVYSLSRLYDIPLNEELTTVARQGSGSACRSLYGGFVQWHRGALDDGSDSVARQIAPSDHWPNMHVLILVVNDARKKTASTRGMQQAVKTSQLIKHRVDQVVPDRIIRLREAIASHDFQAFAEITMKDSNQFHAIALDTYPPCVYMNDVSHSIVSFVHDYNERMGSYHAAYTFDAGPNACLYVLAEHVPHLLSAIQKVFPNDLADGGTYLRGLPIPKVQDAESSKLDSLDVHAKNAFRYIIHTKVGEGPKELSADNSLLINGLPLK

SEQ ID NO: 18046 - DNA, 3839 bp, DROSOPHILA
acacccagttggcgtaggcggtggacaaatgcttttgtttagtgcttaaatgcgcatctatcgggtaaccctgaaagaatacgtcgaattaagcccataaaaaaacacatatctataaatagagcctgcagtttgttcaccccggcattgttttgctcactcacctcgagatccagcacgcgcttaatttgcctatagcccgcgaacttctggttgccgatctgcagatacggcagcttcccggctcccgaacgcagcggattggagctggtctgcacgtccatggggcagcgggtgaatcgcaggaggcactgtttccggcaaagaggcgctttcatcagtttctttcatcatctgcgataatgggcaaaacaggcgtgctggccgccgtgtgatgcaacggaacttaccagagcacgtaaacattcaaaatctatggacggcagtccgtactcccccttgtacacatacagcatggctcccagttgcatctccattgtgtcctagtctatgctttgctcgtactcttgtatttagccggttttcaacagtccacctgcatatcagccatccgaatttgaatccaaaaatatatgccagaatttctggccgactgctgcgagtgcttcagactgataactactgggcactcgatatatcgctcgagcatatcggcgctttatcgattgccggccagggatgttgctactcgaagtttattttggctaatgaaaagatacggaattatgtttgagcttaattgctatttatgtttatctttattgctatttttattatactaccaaaaaattgtaagtttttatctatatgcatttttacatattcacattattttacattagctagatctagcgaatgttacccaaatgtttggtcaccgctgttatcacggagctatcgcaattggggcatctccaacccatctgtttgcgaaaaaaaacattaatttctgattttcgcagtaaattagttagcagtcatgaatctgataagcggcattaagttgtacatcgagaaaatgtgctccgagtcgggaccgggcatgaaaatcattctgctggacaaggagacggtaagtgcaaggactgacaatcaaatcccctgccatatgatcaaaaattcacatcattcgcagaccagtataatttcgatggcctttagccaatcggacatgctgcaacgggaggtgtacctatttgagcgcctggactcgggaagatccaacgagcggttaaagtatctaaaatgcatcgtctttatacgccccaccaagcagaacatccagctactggccaacgagttgcggaaccccaaatacagcgcctactacatttgtaagtgggtcagtagaagcaccttcggaatagtactaaactcataaatagatttcagcaacatcattccccggacggacattaaatacttggcagagtgcgacgaatccgaatcggtgcgagaagtgaaggaactgtatgcagactacctgtgcgtcaaccccaatctgttctcattaggcattcccaattgcatggcgaatcttaattggctgccggacgctctcaaccgcagcatgcagggcatcacagccgtgctgttgtcccttaagctgaacccagtgatccggtaccgagccggttctcaggcagcgcagcttctggccaagctcatatacgagcaaatcacaaaagagtcctcgctattcgactttcgctccaacatggatggcgctgcgccaccgctgctgcttgtgctggaccgcagggacgatcctgtgacgccgcttttgcatcagtggacataccaggccatggtgcatgagttgctgcacataaaaaacaatcgattggacctgtccaattgccccaatgtgccgaaagacttcaaggagctggtcttatccggtgatcaggatgacttctatggcaacaacatgtacgccaactacggcgaaatcggatctaccatcaaacaactgatggaggagttccagcgcaaggcgaacgaccacaagaaagtggagagcatagcagacatgaagaactttattgagtcatatccgcagtttaaaaaaatgtctggcactgtgcaaaagcatttgtgtgtgattggagaactgtcggcgctgagcaacaagaggaatctcttcgaggtttccgaacttgaacaggagatcgcttgcaaggcggagcactcggcccagctgcagagaatcaaaaaactaattgccgacgaacgggtttccatcgatgatgctcttaagttggtggcactttatgcattgcgatacgagcgacacgccaactgcgacacatctggactgctgcaaataatcaaaacgcgcggtggacgagcggctatagtgccatcgttgattgagtatgctggaacccatgtacgacaaggagatctcttcaatatggtgcggataacggacgccgtaaagctgacacggaatttgattaagggccttaagggtgtggaaaatgtcttcacacagcacactcctctcctgaaggaaactttggaggacgtgtttaagggccgcgagctggatcccctcttcccggccatcaattcagagcttgtgccatttcgacgaccaccgcaggaggttgtcgtgttcattattggcggtgccacgtacgaggaagccttagcggtgcaccagttaaacaacgccggctataaagtcattcttggcggcaccaccatccataactcgcagagttttatccaagaggtcgtggccgccactagtggcattcagtttaagcacaccaaatccatgatcaagtactgttccacggataacatttaaagtctattttgactagatagccccaattatattgttaactatttattaactaaatatgaatgtgcattatgtattaaggtattccatgcattgtaccaattcaaatccattggactatttaaccttttaagcgtaaccatgtaaacatatttattgttattctcgagggtaacaccaggcaacgccttggacaaaatgtattatatacaactatgtgtgtacaaaattactaaactctcgttgtccttgcaataattccaccccgtttcggcaaaaagttccttggcaactcccaggcaacgtttcgtttggctcaaacaagaatctgatttttcattggaggagtatcattgaccatcatgtccagcacatatttcaatgatatctggcaccaatcccagcatgaatgcgagcttctatccacgattgactatgagaggcagcaccaggatgtggagacgacggtggccaccatgaatgcagcggtcggatccgtcgccgccgatgcggatgccaaggccttgctgcagtccagtctgtacgagttctatctgcgctacatatgtctgagcaatcgtttggaggatgtctatgataatgtgggtatacgactttcttaaacaaaagtgggatatatataaggagatgatatatcctttgactctggtttacttctcatctttcatcatagatgattcagcctcagaagcgccagttggtgcgtaaattactagacgcctgtctgggtcgagtggtggagctgaagcacgatctcgtaaatatcgacttgatggaatttagctacaacgacgaggtggtggaacgcctgcgcctgacgcccatggaaacggagctgaggataccacgctactttctgcgcgagcgtcagcaggagctagagtttcgaaagaagaccatgcatgagatcctaacgaagctgggttggcttgaggagcacgagctggaggagacggttaccaccgagatcgaagccattagg

SEQ ID NO: 18047 - DNA, 1725 bp, DROSOPHILA
atgaatctgataagcggcattaagttgtacatcgagaaaatgtgctccgagtcgggaccgggcatgaaaatcattctgctggacaaggagacgaccagtataatttcgatggcctttagccaatcggacatgctgcaacgggaggtgtacctatttgagcgcctggactcgggaagatccaacgagcggttaaagtatctaaaatgcatcgtctttatacgccccaccaagcagaacatccagctactggccaacgagttgcggaaccccaaatacagcgcctactacatttatttcagcaacatcattccccggacggacattaaatacttggcagagtgcgacgaatccgaatcggtgcgagaagtgaaggaactgtatgcagactacctgtgcgtcaaccccaatctgttctcattaggcattcccaattgcatggcgaatcttaattggctgccggacgctctcaaccgcagcatgcagggcatcacagccgtgctgttgtcccttaagctgaacccagtgatccggtaccgagccggttctcaggcagcgcagcttctggccaagctcatatacgagcaaatcacaaaagagtcctcgctattcgactttcgctccaacatggatggcgctgcgccaccgctgctgcttgtgctggaccgcagggacgatcctgtgacgccgcttttgcatcagtggacataccaggccatggtgcatgagttgctgcacataaaaaacaatcgattggacctgtccaattgccccaatgtgccgaaagacttcaaggagctggtcttatccggtgatcaggatgacttctatggcaacaacatgtacgccaactacggcgaaatcggatctaccatcaaacaactgatggaggagttccagcgcaaggcgaacgaccacaagaaagtggagagcatagcagacatgaagaactttattgagtcatatccgcagtttaaaaaaatgtctggcactgtgcaaaagcatttgtgtgtgattggagaactgtcggcgctgagcaacaagaggaatctcttcgaggtttccgaacttgaacaggagatcgcttgcaaggcggagcactcggcccagctgcagagaatcaaaaaactaattgccgacgaacgggtttccatcgatgatgctcttaagttggtggcactttatgcattgcgatacgagcgacacgccaactgcgacacatctggactgctgcaaataatcaaaacgcgcggtggacgagcggctatagtgccatcgttgattgagtatgctggaacccatgtacgacaaggagatctcttcaatatggtgcggataacggacgccgtaaagctgacacggaatttgattaagggccttaagggtgtggaaaatgtcttcacacagcacactcctctcctgaaggaaactttggaggacgtgtttaagggccgcgagctggatcccctcttcccggccatcaattcagagcttgtgccatttcgacgaccaccgcaggaggttgtcgtgttcattattggcggtgccacgtacgaggaagccttagcggtgcaccagttaaacaacgccggctataaagtcattcttggcggcaccaccatccataactcgcagagttttatccaagaggtcgtggccgccactagtggcattcagtttaagcacaccaaatccatgatcaagtactgttccacggataacatttaa

SEQ ID NO: 18048 - protein, 574 aa, DROSOPHILA
MNLISGIKLYIEKMCSESGPGMKIILLDKETTSIISMAFSQSDMLQREVYLFERLDSGRSNERLKYLKCIVFIRPTKQNIQLLANELRNPKYSAYYIYFSNIIPRTDIKYLAECDESESVREVKELYADYLCVNPNLFSLGIPNCMANLNWLPDALNRSMQGITAVLLSLKLNPVIRYRAGSQAAQLLAKLIYEQITKESSLFDFRSNMDGAAPPLLLVLDRRDDPVTPLLHQWTYQAMVHELLHIKNNRLDLSNCPNVPKDFKELVLSGDQDDFYGNNMYANYGEIGSTIKQLMEEFQRKANDHKKVESIADMKNFIESYPQFKKMSGTVQKHLCVIGELSALSNKRNLFEVSELEQEIACKAEHSAQLQRIKKLIADERVSIDDALKLVALYALRYERHANCDTSGLLQIIKTRGGRAAIVPSLIEYAGTHVRQGDLFNMVRITDAVKLTRNLIKGLKGVENVFTQHTPLLKETLEDVFKGRELDPLFPAINSELVPFRRPPQEVVVFIIGGATYEEALAVHQLNNAGYKVILGGTTIHNSQSFIQEVVAATSGIQFKHTKSMIKYCSTDNI

SEQ ID NO: 18049 - DNA, 6683 bp, DROSOPHILA
tgccggaatagatcttgcccgcctccggatcatcggtcatggcggcagatggtgggggcatcttttcactgcagtccctcgaacgatctctcctatctctccgttctgtggaacgagatcggcttcgtcttcggcgttcgtggtgatctcttgagctggaactcttgtggcgtcgatctctgtcacgatcgcgatcctcgcgagacctgcttctgcggcgattgtctcgggatctgctgcgacgacggcgttccttgtcacgcgatctgcttctgcggcgatcagagtgcctatcctcccgcgacctacttcttctttttgtgtctcgatccctacttcggcgcttgtggcggtccctggaactgacttctttgtgtggtcttaccaatgtggcaccctcgccaggggccagcgcttccagctccatcatagctgcatccacatcgctcatatcggtttttttgtgcgtttcggaatgcttctccggtttcgccttcaccttctcatcgtcatcgctctcctcctttttgctgtaggtgtcattgggcaaagcgaggccgggaaacattttcaaaagttgcgatttcttgtcttccttcttgtcgccgacagttttctcctggctagcgccgccaggtctgctggggcgcataagattaatgatgcgctgcaggttctggaccagggagtctgggaattcggcgccattatccagcaaagccttgcgaaatgtgtcatatgtgcgatttttgttttctaaatcgatgataaactcggccaggtccttgtcgttgatgcccaagtggttgtctagctcagtgcaaatcttcgagaccagcgaaaggtactccaacttctgcagctcgtccatgcctacggagagtactagttcagctaaaatttacaaaatttgtggaaattttagaaaatttcccgctgaaactaaacgtgatcagctgtttctgcacgcaatggtgttgccaggcgcgtaaaaacaacggaacgaggtggcagcactagccccaatcactcggtttctgacgctacgcttaatttcgtcgcgtttttgttgtcaaaactaaaaacaatctctattttaattaaagatacatcgaaatatgtcttcgttcttcgattgcttcaatgattttctgcagagcggcggcaacttagtgcagaatgtgtcccaggagcaggaacagaaaatcgcggaccaggaactggacggcgtcatagagctaatgccgccaaccacccccacgcccagcgagagtgtaagtaacatcctgaataaaggagtaattgctccacttgccccacatcaaatatattcgtttcgttggcgttttgttgtgaaatagaataattatcagcgcggggcgtgaggttcggggtagccgcggtgttgccggactaaagttctactgttagatgtggcaaggccacgtttggcacgccatattttgctagaaagaaaattcgcagttgtgtactaggaaataccagaaaatcaataagaattgctggtaaaattggttaatatcagtgcgaatcgcgagtgacctttgattgggccgtaggctagcgccttgtggcattcccagctgtttcttaccatcgcaagcgcgacaacgacgtagaaaagaagaagaacatcaatttgggggtacccagttaacgcattattaattattaaaaattaactatgaaggaatcgggaagtgtcagcaaaaatcagccgcagacctcagaggccagaggctcgattataacctacagtcccagcaaatttctgactagcgttggaacaggcagaacgacatacagcacacatacacacacaacaacagcaacgtcggcggcgacaaccgcaacaaaaacaaacaatttaccaatgggcggatccagtgccgcttattatgtggtaaaggctggctccctgggcagcgctgcctccatgtcgggttgcatcaaagtcagttctccgccaaaggggccgccgatggctaagtcgcccgccctggtcgttacatcgccctgcacgccaacagagagtgtaatgtttaaactaaaggcatcatatcacccactaaccagcactgcatgcgccctaagatccccaaccgaatcactcacctcactaatgtaccttcttgtcggtattaaacactaattaatgcttttatcctttagtccagtaccatttcggcccctagtgaatcctcctttagcgagaaaatggagcacagctatatgcgagatacgccagtgcgcagcgatgttcacaacggcctaacgcccgctaggaacattctggtccgccatccgccacagtgtcccagttgccacacatatccgccgcagcacgaggagctgtcagagattcagcaggcccatgtgccgccctatgatgaggtagtcgccaaggaggcaatgaatgaatgcgctcgtattgcaaaatacgtaaagaacaacaattcggatgagcaagattgggtggcgcgcgttaataagtaagttctcgaccttagtcaatagaaaagctttaccattcaacatctcccaccacacagatttaattggacgcccatgcaggagatggttttcgagaaggtctgctcaattctggaccaggatcagttggcacgcttggccaacgacaaacgtcagcacgagcctatccatcgtcgcataagctcggacaaatccgcgtccaggtttcgcaaacttctagccagcgtggcttgggagtcacgcattacgcagtggatccatgctctgctcatggagcacttgtcgccttcgtatatggcctcttatctggaaattcttcagactctgaagaccaagttgcccactttagtggacaagatgctgtttggtaggcccttaaataatagtcaggaactgctggcaccggtgatgaaaaaacgatgggaaccaaatatcatgcccaagtcccgtcagctaacgcataacgccatcatggtggtgctgcccaacatgccgacaactggaacagtttcggaccgcatgcagaagtggtaccaggcattatctactatcactcaggtggttcagatttcgctgccgaatacaagtaggtttactagcagagctatctagattatcttatttaaccatttcacttttatagacaacagaattgggaatcagaatctggaccatgtggccgaaaccattgtgtctatcacacgcgtcaaaatcaacgaattgcgcacagaaaaccccagtcgtggcatcatactcgttggatttaatgctggagctgccttggctctacaggttgctctatcggagagcgttgcctgtgtggtttgcatgggatttgcttacaacacaatacgtgggccacgcggaacccccgatgaccgcatgttggacataaaagcgccgatactctttgtcatcggacaaaattccgcacgcacaagtcaggaggaaatggaagggttacgcgaacgaatgcagtccgaatcttcgttggtcgtagtgggtagtgcagatgatgcactgcgtgtgcctaagagcaagcggcgaatagaaggcgttacacagtcgatggttgattacatggttgtcgtaagttcaaaatagaatatttgtaatgaaaatactgtatttacttatgatataaattgcaggaggaaatctttgagtttgtgaacagaacgctaagcaatccacctggaccgcgtatgcccacatgtttaatgcatcagcagggctaccagcgactgccaaagcagtcacctcacatcctggccgatggaaacgcaaacaaggctgttcagcagatgcgtaagcgaaagatggacggtggtttagacgactcaatgggtcagccttccaaaacaaagtttgttcctcacagtaagtatcagttttccaaaattagaccattaaatcgccataaccttatcatcctaccatccatcccgcatgtttaatcactaaccacttaaccataacgttcccaatcaaaattgttccttcgacgaagatcgcgtccacaagccgaagccaccgcgcctcattgatccgtttgctgtgaagcgaaagggtaaattcatctcgggtcttcctctactgccacttgttgtttggctcgcccgattcataaactaacattcttaccccctcagttggaagaccccgaacacgcccccttcccaatgtcggtggctcggcacgctctgttagccaaaaaggtgcacctcatcccgaccaaccaaaactgagcggcgaagaacctaaccaatccattgaattcatactagatgatgcccaggactatggagatgcccaaaccactgcaggtggttcagcgagcctgccaaaggtgataactcccggtgttttgggaaaacaactgccgcccgtcaatctcgcagctggcaccaagattaagatgatcccatccagccagttcgttcaaatcaaatcgctaccgtcacagagcaaactcattaactacacgctaaacaaaccgagtgtcgggacaagcagcaccgccaacattggcagcgtggtgaagaccctaccatgctcatccgttagtggccagcagatcatcaccttaaaaacgccctcgggacaaacgcagcagtttgcaacagcagccacatcaacaggtgccgctggttcatcgacatcaacaggaacgggacagaaaaagtacacagtttttaagaacgccaacggcatgaccatgctgcatctcaccaagagcgtacccactacaggttctagcagcggctctgcgaatatggatttgtccaacattatcgatatgcccattgtttttgccgataacgaaggcaatattcccgagcaccaacaggcggataaggatattaaaccaggtgcgttaagtgttatggtttatatactagattttaattaaacatttttcgcagcccccattcgaagtgcgaataagagcccgttgatcatcagtcagaaaatcattaaggaggcaaataagccctcgggcatggttaccagtggcagcattactgccgtcagcaagccggggaatattgtgcttaacaaaggccttcagcaattgctaaattcatcgcccggtggaacacttgccactcagaataaagttgtgtacctcaaccggagtacaattaagccaatgggaaatgtggcgcctggtactcatcgtgtccctataaggattgtgagcaccccaaacaccggaggtgcagtgacgaccacagcttccagtagtcccattatggttgatccagccacaggatccaaggttgccaagaccgtcaatgtgcagacaatcaagcctactggttccgttctggctcaaggcaccatccgtcaagcgggcaacgtgggcaccaagagctacctccagatgatcaataccgcacctggtgcatccaaaactgttgctggcgacggcaaaggttctgtacgaaatatctactttaaatcggcaaccggactcaagcagttgccagtgcagatgctaggcaatcgaataccgggtggcgccgtcatttcgtcaaccgcatcggcatcttctggatctcctggcttgcggcgagtggtaaacattgggcccgtttccaaggtgacggccacgtcgacaacatcatcgtcgatagctgctactttaacccataataaaatgtagaattggacaatgttttaattgcgtgcctgatacattttcgtacttagccgatatctgtgtaaatatgttaagccattaattaattagtgattaaggggtcttgaattaccctctttcctcaatgtcaaggattataatttcgttcatataaagaacaaataaaaaaaagtcgacaaaaagtttatttttatttaagttctgggaattcggagaacgcttcgcttgcaaacctgtgcaaattccatgtctgggatttgggttaccatataatggttccccggtcctatgtacaaaccttatgcatacatgggtgcaattgctgaaaagcgacggagcagtacaggaagcagcagcggcgtgggaaatgtattcaaatgcttcggctcgaagtgcgttagtccaagatttctctgccatttatgaaaccacaagtgtgttcacacggctgctctgcgaccagtgctggtaaaactgtattctgatgaccgatattttgcttagaattgcaattcgcagctcactgccggcagcttggaaaaaagtctagagtttcattgaagtttcgcgggcaagtgtatggatggtcctacacatacttgtatatatatatatatctaaatatatatatgtgggtttcttgttaaatgcctctttagtttgtgcagtacactttaacccatttgaggtatattctaatatatgatgtatatttatgcagaaaactaatttaaaatctcatatctcctattattgtttttgtcggtattttaacaatatttaatattttggtattaaagtgctcttaaaaaattgctattatttgaacgatacataatcacgatacaataataatcataaaagaatttaatttaatatttacatttaataaaccgttttttttttttggacctaaagggttaagtgcactttttgactagtcagcaaattgcaaagtgaagctctctcaaaagccaaagaacattttcgcggatcccgaatg

SEQ ID NO: 18050 - DNA, 3124 bp, DROSOPHILA
gaacgaggtggcagcactagccccaatcactcggtttctgacgctacgcttaatttcgtcgcgtttttgttgtcaaaactaaaaacaatctctattttaattaaagatacatcgaaatatgtcttcgttcttcgattgcttcaatgattttctgcagagcggcggcaacttagtgcagaatgtgtcccaggagcaggaacagaaaatcgcggaccaggaactggacggcgtcatagagctaatgccgccaaccacccccacgcccagcgagagttccagtaccatttcggcccctagtgaatcctcctttagcgagaaaatggagcacagctatatgcgagatacgccagtgcgcagcgatgttcacaacggcctaacgcccgctaggaacattctggtccgccatccgccacagtgtcccagttgccacacatatccgccgcagcacgaggagctgtcagagattcagcaggcccatgtgccgccctatgatgaggtagtcgccaaggaggcaatgaatgaatgcgctcgtattgcaaaatacgtaaagaacaacaattcggatgagcaagattgggtggcgcgcgttaataaatttaattggacgcccatgcaggagatggttttcgagaaggtctgctcaattctggaccaggatcagttggcacgcttggccaacgacaaacgtcagcacgagcctatccatcgtcgcataagctcggacaaatccgcgtccaggtttcgcaaacttctagccagcgtggcttgggagtcacgcattacgcagtggatccatgctctgctcatggagcacttgtcgccttcgtatatggcctcttatctggaaattcttcagactctgaagaccaagttgcccactttagtggacaagatgctgtttggtaggcccttaaataatagtcaggaactgctggcaccggtgatgaaaaaacgatgggaaccaaatatcatgcccaagtcccgtcagctaacgcataacgccatcatggtggtgctgcccaacatgccgacaactggaacagtttcggaccgcatgcagaagtggtaccaggcattatctactatcactcaggtggttcagatttcgctgccgaatacaaacaacagaattgggaatcagaatctggaccatgtggccgaaaccattgtgtctatcacacgcgtcaaaatcaacgaattgcgcacagaaaaccccagtcgtggcatcatactcgttggatttaatgctggagctgccttggctctacaggttgctctatcggagagcgttgcctgtgtggtttgcatgggatttgcttacaacacaatacgtgggccacgcggaacccccgatgaccgcatgttggacataaaagcgccgatactctttgtcatcggacaaaattccgcacgcacaagtcaggaggaaatggaagggttacgcgaacgaatgcagtccgaatcttcgttggtcgtagtgggtagtgcagatgatgcactgcgtgtgcctaagagcaagcggcgaatagaaggcgttacacagtcgatggttgattacatggttgtcgaggaaatctttgagtttgtgaacagaacgctaagcaatccacctggaccgcgtatgcccacatgtttaatgcatcagcagggctaccagcgactgccaaagcagtcacctcacatcctggccgatggaaacgcaaacaaggctgttcagcagatgcgtaagcgaaagatggacggtggtttagacgactcaatgggtcagccttccaaaacaaagtttgttcctcacaatgatgcccaggactatggagatgcccaaaccactgcaggtggttcagcgagcctgccaaaggtgataactcccggtgttttgggaaaacaactgccgcccgtcaatctcgcagctggcaccaagattaagatgatcccatccagccagttcgttcaaatcaaatcgctaccgtcacagagcaaactcattaactacacgctaaacaaaccgagtgtcgggacaagcagcaccgccaacattggcagcgtggtgaagaccctaccatgctcatccgttagtggccagcagatcatcaccttaaaaacgccctcgggacaaacgcagcagtttgcaacagcagccacatcaacaggtgccgctggttcatcgacatcaacaggaacgggacagaaaaagtacacagtttttaagaacgccaacggcatgaccatgctgcatctcaccaagagcgtacccactacaggttctagcagcggctctgcgaatatggatttgtccaacattatcgatatgcccattgtttttgccgataacgaaggcaatattcccgagcaccaacaggcggataaggatattaaaccagcccccattcgaagtgcgaataagagcccgttgatcatcagtcagaaaatcattaaggaggcaaataagccctcgggcatggttaccagtggcagcattactgccgtcagcaagccggggaatattgtgcttaacaaaggccttcagcaattgctaaattcatcgcccggtggaacacttgccactcagaataaagttgtgtacctcaaccggagtacaattaagccaatgggaaatgtggcgcctggtactcatcgtgtccctataaggattgtgagcaccccaaacaccggaggtgcagtgacgaccacagcttccagtagtcccattatggttgatccagccacaggatccaaggttgccaagaccgtcaatgtgcagacaatcaagcctactggttccgttctggctcaaggcaccatccgtcaagcgggcaacgtgggcaccaagagctacctccagatgatcaataccgcacctggtgcatccaaaactgttgctggcgacggcaaaggttctgtacgaaatatctactttaaatcggcaaccggactcaagcagttgccagtgcagatgctaggcaatcgaataccgggtggcgccgtcatttcgtcaaccgcatcggcatcttctggatctcctggcttgcggcgagtggtaaacattgggcccgtttccaaggtgacggccacgtcgacaacatcatcgtcgatagctgctactttaacccataataaaatgtag

SEQ ID NO: 18051 - protein, 1001 aa, DROSOPHILA
MSSFFDCFNDFLQSGGNLVQNVSQEQEQKIADQELDGVIELMPPTTPTPSESSSTISAPSESSFSEKMEHSYMRDTPVRSDVHNGLTPARNILVRHPPQCPSCHTYPPQHEELSEIQQAHVPPYDEVVAKEAMNECARIAKYVKNNNSDEQDWVARVNKFNWTPMQEMVFEKVCSILDQDQLARLANDKRQHEPIHRRISSDKSASRFRKLLASVAWESRITQWIHALLMEHLSPSYMASYLEILQTLKTKLPTLVDKMLFGRPLNNSQELLAPVMKKRWEPNIMPKSRQLTHNAIMVVLPNMPTTGTVSDRMQKWYQALSTITQVVQISLPNTNNRIGNQNLDHVAETIVSITRVKINELRTENPSRGIILVGFNAGAALALQVALSESVACVVCMGFAYNTIRGPRGTPDDRMLDIKAPILFVIGQNSARTSQEEMEGLRERMQSESSLVVVGSADDALRVPKSKRRIEGVTQSMVDYMVVEEIFEFVNRTLSNPPGPRMPTCLMHQQGYQRLPKQSPHILADGNANKAVQQMRKRKMDGGLDDSMGQPSKTKFVPHNDAQDYGDAQTTAGGSASLPKVITPGVLGKQLPPVNLAAGTKIKMIPSSQFVQIKSLPSQSKLINYTLNKPSVGTSSTANIGSVVKTLPCSSVSGQQIITLKTPSGQTQQFATAATSTGAAGSSTSTGTGQKKYTVFKNANGMTMLHLTKSVPTTGSSSGSANMDLSNIIDMPIVFADNEGNIPEHQQADKDIKPAPIRSANKSPLIISQKIIKEANKPSGMVTSGSITAVSKPGNIVLNKGLQQLLNSSPGGTLATQNKVVYLNRSTIKPMGNVAPGTHRVPIRIVSTPNTGGAVTTTASSSPIMVDPATGSKVAKTVNVQTIKPTGSVLAQGTIRQAGNVGTKSYLQMINTAPGASKTVAGDGKGSVRNIYFKSATGLKQLPVQMLGNRIPGGAVISSTASASSGSPGLRRVVNIGPVSKVTATSTTSSSIAATLTHNKM

SEQ ID NO: 18052 - DNA, 5484 bp, DROSOPHILA
aatgagtttggtttctttttgttattgttattgggtttggtttagctttaggtggggtcttttggcttggtcgtgtgggattagtggccagcatggaacttactttgatgcaggtgcttcggcttttcgttgtcatcgtagatttcatctaatgatatatctctttcttctgcaaatcgaatgatgagcggttaggagggctgccgacaacattggctcgatggaatgactcaccatttaatgagttgagagatcgggttggagccatttcgtaattctcactgccggaaccgtcggttcccagcgtattggacagcatgtagctctcgtggcgcggcggcgggcgtggcatctgattaaccgagttctccagcgtgccctcgcccgaatccaaagtaattgactcctccacatgcaggttctccacctcgtacttgttgtcccaggctgtcttcaggaatggattatagaacgcaactgtaaaacgagaaacaatgttagattcgaagcctctaattcgttccatagttccattcacttacacttgacatattgatccgccgagaaggtcataaagctgcccttgaagcgatcggccaccgcattgccctcggtgatcagaaactggcaaatatcgctgttgaagaacgcattaacgcccccgctctcggtcaccgcgataatctgcaatggaatattggcattctgggctgccaggatgctaaacacatggaatgaaaagaaaaaaaattctttaatgcttgaaattgccttagatcgtattagataagttaactcaccttagatttgccaacgaagatcgacgcttggtcgagtaaaagtaaatatagccatggattagttcatcgcggtactggctagtgccatgatatgaggaaagtataaactcgacccgtcgcttggcatcgccaataaagacgtcgacaatgatggagtgctcgttggccttgaccagcgtcgattcctccaccagcggctggacaatgttctcgatgtcatactgatcgccacaaaagatgcagcacaggatgcgcaggtcggtgtgattggagggatacggctcgtagctcttcatctcagtcagctttagcgacaggatgactatgttaagtatatcatagacatacttctgatgattttgcgtatgatcgatgaagtcgcagtgcagcatctccgacaggcgcatgccctcgttgcgcaagtattccacctcgttctccttgagatcctgtggctggtaaaccagcacgatcggcagattctcgaacttgtcctccagctccaggttgcagagcaacgtgcgctccaagttatccttgagcgtctcaaaagattgctgattggagtacacgcaaataagacctgcaaagaatcgaaatttcttagtttcagtacttgggacgattaacacatttctttgtgtcatatggcaggtatgtcaatctttttccattaagcaaaaacaatcatcagtaagcaataagtaattcaaaatctaaaggctgtgagtaagcaatatgatatcatatgccagcaatagaaattcgttagtccgttaattagctaactactatatcttgggagcatattgagcagcaggccaattaagtgcaattacttgagtgagctttacttattaaaaggtgccagcccctatttgagattctatgaaacccaaaacctaccactcgagtagacatctatggccttgaaggcctccatgtcgccgttggcgattcggtaattgagataatacgtctggttctcgtagatgtactcgcccttgctaccggtacatatgcggatgtcgttgagcagatcgctggccaggtgctcggagcccacgatcagaagattgagcgtgcggtcactgccgctgccggaactcttccagccaccgccgctgggcgtcttgtggttgctggccgacttgtcggacaacacctcctcaatcaggctatccacacagttgtaaaagaatgggcagtgatcgcggatggggcagtggatgaagcgcaggtgctggacaagcatcaaccgccgctcctggtccaagcgatcgagcatcttgtagcgtgaatcctcctgtatgacatcggttatctggcgcacatcttcctgagtgatgttgtcaacgttcttgaactgtagaaaatattgagcatgttccagcagcagctccacaaaattctgtttgctcttttcaatgatgtcgtcctggtgaatgtcgtagatctgctggcagtcgtgctccgaaagcgcctcaaagcattcgcgtcccatgaagaggacgcgcacctccgacagctgcttgccgggcgtcacaaagcccgactcctcaagtagcattttgaattgctgcttccatctatggatgattatataatggtatagaaaggttttatatataactgagagttcaatgaatcaatgaatacagtaattacagtaaaatacattacatttgtaaaatgccttaatgaaattacacgtttggtctgaactcacccaatttttttcttgtcctgctgcaccgagttcaagtagttacggaagacagtctctgcctcggaagtctctagcacatcaaagggaatgcgggcctcatcctccgcctcgtccatgtccaccagctccgtccacgaggcctgcgggcactcgaagaagtactgctcgaactcgatgtgattctgcagatagttcctggcgcactcccaagcatcgtcatcgctgatattcaaagccccgatgtccggcagcaggtactccagggccagggcaaacttatccaagtactgatgcagttttttgttcagatgatcgtcgcgcagcttcttcatgtgccgccggaatagcttttggccggcctcgtggccgaatatgttgaggaactcgttccactcgcgatactgtgacagcatcttggagccctgcgaccacaggacgtgatagtcggtgatctggttgcgtattagtcgcgtcaccgcctcggatcgtgtgtccagcagttctttgcgtgacttggccgactcctggtaggagatgatcttgacacggttcttaaccttgtcgatcatctgggcgagcaggaggaatgccaaatcgatgttgatgctctcgtgggccgacgtctcgattagctgcacagtgctcttgtagtcctttcgctggctaattttctccgcctctcgaacatacaactcataagcgtcgtcgttctttgtggtcaccagcaccagtggcttcttgttctttagtatggttgcgatgacattctgcacgaactccacctgcttctccacactgcgattgggcactggactaacgtcgaagacgacaacaaagccatcgatactgagccggccatcgggcatgactttctgttcgtactccttctcgatgcccaactgattcttgcatatgtacattagcttctccgcggagaagaccttggtggccgtgcaccgctttgagtatggatccatctttcccaccttaaaggcttggaacgtggagtcgtccatgaactccgtctgctcgatgatattaaactggtactcgacgccctcctccgtcgtcttgcgcacatcgccccagtaaaggaagtggtcgttgttcacgatccggccactaaagtcgctttggctaagcactgatatgtgatcgatgaagtagtcgtcggccatcgggcgcatgaatctgttgcacaggcatgacttgcccactcccacctgcccgcggtccttttcggtcccggatagtccaatgaccgagatgttaaactgacgcatcttgacgttcctgcaaggattcaaaagtcgaaggagagaattagatacctggcttatagactcgcagataaatgctaaaagtgttatggaataggtaattccggatttggtattctgcaggtgttttcgttcaaatgtatgattgtgccttatcatatcgataaggtgttatctactggcgcttttcctcacatgcctatcaacatgacacaatgttgtaacattgtatccatcgcaaattgattcattcaatcggttgttaaggtaatattttaaaatatcacaggagataacctgttaacgttgtatgaaaaggataatatgcatatggataatatgcttttcaggatttcacataaagatatattccttattatagggatatacgaaagaaaaatagcgtagaatagaccttggctcggctcgatatatacaaatgtgttttcgtgaaaacgtcagcttatggatatctttggatattcagggataacctctcagtttctccggacacacacggaatggaaaaccgtcgatttctggtcactttttcacggcaaatggctggcttgcgatgccagccgatgactattatccaagataaccttcgagttggagaatcgccccgtgtcctccgcgccgtctgctccaattggccgcaggaccttcacatttccgcacacttttcgccagtctaggactttgtcatgagttccttttggctacaactacgcagttacggatacatccacggattgggggtccaaaaacacgagagagcgagagcgagagattggctgctgcgatgtgacaaaaaaaaaaaaagaaacggagaagaaaaacgcgcaagcgattttcttatgccggcgctgcccgaaaattcattccatgtgatttttggccagcgaataatatacgcgaatcgcgatttcacaaaaaatgcacagggctcttttttacctgctttcttttgggttgctagtttgatctttgtatttatttatatggctagtttttatacaacattttcggcaagtagggaaagtcagtctgcaacaaatcctttttccgtcctgactgcggcggttgttctgtcgcagcgcttcttttggtgctgcaaacgacacggcgcaactctctaaagagagagaatcagagtcagagtgagcgagcacgagcgactgagagtggaaagtagagagagcgcgtgggtggattcggatgtgaatgtgtttgttgttgctgttgctagtgcactccaatttgttgctgttatcctcgagtgggagtgcaacaatgtgggtgtgtgtggttgtgcgtttcaatgagagtggaaataataaattccccactggcctttaattgagtttttccggcgtacaaaccaccgcaaacacacacacacacatgctgggcaagtgcagcgcagaagcgaaattggatctgcaacagatttcctgtacattctccgcgctgcacaacaacaactaacaactaacaacaacaacagccacagcgcaagaaacggagagcaacgatccagtgataacaacaacgacaaaggcaaaaagaaaggaggaaggggaggagaagagagagtactgcaagtgcatgtgcaacggtacaattacaaaaacacaaacgggcgcggcgggagcggcagagcgcaaagacg

SEQ ID NO: 18053 - DNA, 3251 bp, DROSOPHILA
aaatgtgaaggtcctgcggccaattggagcagacggcgcggaggacacggggcgattctccaactcgaaggttatcttggataatagtcatcggctggcatcgcaagccagccatttgccgtgaaaaagtgaccagaaatcgacggttttccattccgtgtgtgtccggagaaactgagaggaacgtcaagatgcgtcagtttaacatctcggtcattggactatccgggaccgaaaaggaccgcgggcaggtgggagtgggcaagtcatgcctgtgcaacagattcatgcgcccgatggccgacgactacttcatcgatcacatatcagtgcttagccaaagcgactttagtggccggatcgtgaacaacgaccacttcctttactggggcgatgtgcgcaagacgacggaggagggcgtcgagtaccagtttaatatcatcgagcagacggagttcatggacgactccacgttccaagcctttaaggtgggaaagatggatccatactcaaagcggtgcacggccaccaaggtcttctccgcggagaagctaatgtacatatgcaagaatcagttgggcatcgagaaggagtacgaacagaaagtcatgcccgatggccggctcagtatcgatggctttgttgtcgtcttcgacgttagtccagtgcccaatcgcagtgtggagaagcaggtggagttcgtgcagaatgtcatcgcaaccatactaaagaacaagaagccactggtgctggtgaccacaaagaacgacgacgcttatgagttgtatgttcgagaggcggagaaaattagccagcgaaaggactacaagagcactgtgcagctaatcgagacgtcggcccacgagagcatcaacatcgatttggcattcctcctgctcgcccagatgatcgacaaggttaagaaccgtgtcaagatcatctcctaccaggagtcggccaagtcacgcaaagaactgctggacacacgatccgaggcggtgacgcgactaatacgcaaccagatcaccgactatcacgtcctgtggtcgcagggctccaagatgctgtcacagtatcgcgagtggaacgagttcctcaacatattcggccacgaggccggccaaaagctattccggcggcacatgaagaagctgcgcgacgatcatctgaacaaaaaactgcatcagtacttggataagtttgccctggccctggagtacctgctgccggacatcggggctttgaatatcagcgatgacgatgcttgggagtgcgccaggaactatctgcagaatcacatcgagttcgagcagtacttcttcgagtgcccgcaggcctcgtggacggagctggtggacatggacgaggcggaggatgaggcccgcattccctttgatgtgctagagacttccgaggcagagactgtcttccgtaactacttgaactcggtgcagcaggacaagaaaaaaattggatggaagcagcaattcaaaatgctacttgaggagtcgggctttgtgacgcccggcaagcagctgtcggaggtgcgcgtcctcttcatgggacgcgaatgctttgaggcgctttcggagcacgactgccagcagatctacgacattcaccaggacgacatcattgaaaagagcaaacagaattttgtggagctgctgctggaacatgctcaatattttctacagttcaagaacgttgacaacatcactcaggaagatgtgcgccagataaccgatgtcatacaggaggattcacgctacaagatgctcgatcgcttggaccaggagcggcggttgatgcttgtccagcacctgcgcttcatccactgccccatccgcgatcactgcccattcttttacaactgtgtggatagcctgattgaggaggtgttgtccgacaagtcggccagcaaccacaagacgcccagcggcggtggctggaagagttccggcagcggcagtgaccgcacgctcaatcttctgatcgtgggctccgagcacctggccagcgatctgctcaacgacatccgcatatgtaccggtagcaagggcgagtacatctacgagaaccagacgtattatctcaattaccgaatcgccaacggcgacatggaggccttcaaggccatagatgtctactcgagtggtcttatttgcgtgtactccaatcagcaatcttttgagacgctcaaggataacttggagcgcacgttgctctgcaacctggagctggaggacaagttcgagaatctgccgatcgtgctggtttaccagccacaggatctcaaggagaacgaggtggaatacttgcgcaacgagggcatgcgcctgtcggagatgctgcactgcgacttcatcgatcatacgcaaaatcatcagaagtatgtctatgatatacttaacatagtcatcctgtcgctaaagctgactgagatgaagagctacgagccgtatccctccaatcacaccgacctgcgcatcctgtgctgcatcttttgtggcgatcagtatgacatcgagaacattgtccagccgctggtggaggaatcgacgctggtcaaggccaacgagcactccatcattgtcgacgtctttattggcgatgccaagcgacgggtcgagtttatactttcctcatatcatggcactagccagtaccgcgatgaactaatccatggctatatttacttttactcgaccaagcgtcgatcttcgttggcaaatctaagcatcctggcagcccagaatgccaatattccattgcagattatcgcggtgaccgagagcgggggcgttaatgcgttcttcaacagcgatatttgccagtttctgatcaccgagggcaatgcggtggccgatcgcttcaagggcagctttatgaccttctcggcggatcaatatgtcaagtttgcgttctataatccattcctgaagacagcctgggacaacaagtacgaggtggagaacctgcatgtggaggagtcaattactttggattcgggcgagggcacgctggagaactcggttaatcagatgccacgcccgccgccgcgccacgagagctacatgctgtccaatacgctgggaaccgacggttccggcagtgagaattacgaaatggctccaacccgatctctcaactcattaaatgaagaaagagatatatcattagatgaaatctacgatgacaacgaaaagccgaagcacctgcatcaaagtaagttccatgctggccactaa

SEQ ID NO: 18054 - protein, 1019 aa, DROSOPHILA
MRQFNISVIGLSGTEKDRGQVGVGKSCLCNRFMRPMADDYFIDHISVLSQSDFSGRIVNNDHFLYWGDVRKTTEEGVEYQFNIIEQTEFMDDSTFQAFKVGKMDPYSKRCTATKVFSAEKLMYICKNQLGIEKEYEQKVMPDGRLSIDGFVVVFDVSPVPNRSVEKQVEFVQNVIATILKNKKPLVLVTTKNDDAYELYVREAEKISQRKDYKSTVQLIETSAHESINIDLAFLLLAQMIDKVKNRVKIISYQESAKSRKELLDTRSEAVTRLIRNQITDYHVLWSQGSKMLSQYREWNEFLNIFGHEAGQKLFRRHMKKLRDDHLNKKLHQYLDKFALALEYLLPDIGALNISDDDAWECARNYLQNHIEFEQYFFECPQASWTELVDMDEAEDEARIPFDVLETSEAETVFRNYLNSVQQDKKKIGWKQQFKMLLEESGFVTPGKQLSEVRVLFMGRECFEALSEHDCQQIYDIHQDDIIEKSKQNFVELLLEHAQYFLQFKNVDNITQEDVRQITDVIQEDSRYKMLDRLDQERRLMLVQHLRFIHCPIRDHCPFFYNCVDSLIEEVLSDKSASNHKTPSGGGWKSSGSGSDRTLNLLIVGSEHLASDLLNDIRICTGSKGEYIYENQTYYLNYRIANGDMEAFKAIDVYSSGLICVYSNQQSFETLKDNLERTLLCNLELEDKFENLPIVLVYQPQDLKENEVEYLRNEGMRLSEMLHCDFIDHTQNHQKYVYDILNIVILSLKLTEMKSYEPYPSNHTDLRILCCIFCGDQYDIENIVQPLVEESTLVKANEHSIIVDVFIGDAKRRVEFILSSYHGTSQYRDELIHGYIYFYSTKRRSSLANLSILAAQNANIPLQIIAVTESGGVNAFFNSDICQFLITEGNAVADRFKGSFMTFSADQYVKFAFYNPFLKTAWDNKYEVENLHVEESITLDSGEGTLENSVNQMPRPPPRHESYMLSNTLGTDGSGSENYEMAPTRSLNSLNEERDISLDEIYDDNEKPKHLHQSKFHAGH

SEQ ID NO: 18055 - DNA, 14788 bp, DROSOPHILA
acccccttccacctgaatctgcttttgcaacattcaattctatcatattgctaggaaaaatgtttgcttaaactcagcacatttcgccggaagcgccagcatccgacatatgctaaaatgttaaaaatcatctgcagaacggggagggcggcagagaaaaatgcaatataatgcaaaaagtttttgccagcaaagaagttcaagcatctcgtgcaattttatcaagaaacgcttcttgtttactgttttctttggctgccgctccgcacttttccacttttctacttttcctgcccacaaagcgatgaaatgaaaacgcaaaagttgtatgcatttgctggcagagagcaaaactatgtgtagttattttggtaaattattttaaaacatcaaaagcataatttgcacatgccttatcaactgttgttctcaagtattgatcaaatggttaattcatttaaattgatttgacacgttgtttatctgtgtgttgtttgcctgtgtttccatttagtttctctgtatttttgcgtgagtcctctgcttgccttgcatggattttgtgtttatgtttgttggatcgacctacggctgattgggtgagcagatcaagggcttggggatgggtgtgttttcattgagagattgaagacttcccccttggcacggacgggcgaatcaatccgatcgacatggtcagattgattgcgcggcggtataaatagcgtacggctgtagagactattttactatttatctgtttttgccgcggccagcgcatttcgcgaaaatgtgcaatggctgctagatgctaaatatatatgccaagcgctgctttttactcattcgttcgcggctatttattttattttttgccttttggccatctataaaaaacacacagctgcagcgcgttggcagctttttggccgccgtggccgcagtttctttgcgccctgtgctcagtgtgcatctcgttcccagcaacggagtctgtgtgcgtgtccgtgtccgcgaagtgtccgtaactgtgtccgcagcgagcgggcaacggagaagggatcgcggtgcccacgaaaagtgtccagaaatcggtttgcgtacagcactccaacgatcgacgattagcgaatcaagtgatacgactctgtttcagtgacttcagcagaagaaaactcttctagcgaatcggattgcatcgaaaggttgcataatcacccgagtggattacccaaggaatatggctctttattttcagcactcccctatgggagtgatgcttttatttagcccgccaattgaccttgacctattagccatttttagaacaccaccaaaaacacacacacataataaagtatacgcactggggttttagttcatcagccgtaggttgtgctccacttgcaacgctcgcgcattttaattaaccgcctttgttaatcccccgcctgcccgcattaacccatttagcctgagtctgagagcagccaggagttgcccctgccaccgcccccctcgcccacccagctgctgcagtacgaggcggagcagcaagtcctcccggagccacacatgtccaccatccagcagccgcagcagcagcagaagctggagcacactcgcacccacagcagcctgtcatccatttccagtggctcctcctcctccggagttggcggcagcggcagtgggagtggcagcggtagcggcgttggccagagccagcagagttactcctccactctgtccctagatcgctttggttcgcccctgcactcgcgccagacatccggctcctccacgtcactggaggtggcattggctgctcctggcgctggccagggtgataattacaccatgacgccgccctccccgccgccaccgcctcctccgcaggctcagtccgtgacgaattacaggctgcaggctgcgcagaacgagaacgacatgaatacgcagaacaagagccccaatgcgtacaaccagctgctgaaagagtactccaacaagctgcagcagcaacaccaccacaacaccacacagcacacgacagcgacaacagcaccctcactgaaacacaacaacacggctaagccatttgcagtggcggcaacaagcacaccccaacaacacctgccacaccaacaacaccagcaacagccgcttgtggcagcgctaacggcgacacttgctaatcaattgaaatttaacccacatcaggttgcaagctctcaagcaacagcaacagtagcaacggtagcaccatccgctgcaacagcagcaactgcagcagcaacaccccaagcagcaactgcaacagatagcccagctgcaacagcatcatcatcagacaatatgtcggcctacgtggcagatgagccctcttcgatttatggccaaattagcgctgaatcggtggcattggccccaccaccaccacagccacccactgccggcgggggcgatcagccctttgagtacgtcacgctcaccggcaacgtcatccgcagcgtgcaggctcccggaaagggggcgtgccccagctacaaggtaaaccatcccactccgccccccaatgggcccaaggtcgaggtcagtgagcaacaggaaggagtttgatttaagtggccagttggaacgagataacttcgttaacctaaatcaatgcagcgtttaaatttaaataactaaatctcgaattttaggcatcaatttataaatgtaaaaattggctcaaaaatatgtaatggctaagacattttgcatattcttttcacacaatcctgctgctcactgaccttgccccattcgaatgaccatcgtctagttcaaaacgtaagtacttcgcactctgctccgctcagctcgcgccgcagctcgctcagatcaggcccgaaaactaattgacctgtgttaagtgttgtaatgtgttagccccgaatgaaatcgaagttacagccgttcaaaaggagccccactaatagcccacttccaatttttcccgtccaaaggtgaaccagggctatgctcgtccgttcggtgccgccgctcccaagtcgccggtgtcgtatccgccgcagcagcaacagcagtcgccgcgtcccgctcccggtggccaaaacccgtacgccaccctgccccgcagcaatgtgggccaacaaggtaaggatgatgatgacgacggctgtctgtcagaaggtgaatgggtctagtcgcttaagccaattgagattttgtaccatatctttgtaccatataccgaccacctgatatagcccgcaatttagttccttttgttgttagcctgagaatatgacaaactatgagtgatagatgaggcagtcgatcgattgttgtatagtattaaccggatttctgttttgtaaccaaaatgagtttaatatatatatatatatctaaatacgtttatttatcgaaataaattgcacatgacttaaaacgaaaagaactaaccaacaacagtcctcagatgatcgaaattatcgagatgcttgtggcaaaatttactaaaaccattttctgctcgttatacccctcccacgtgagcaactaaatgaaaactatttggcaaatgtggctgcataaaacatttagcatagcttaggttactctacacattgctctaagcatatatatataaatatgtatattgtctgctgcccgtgtatatataccgatttctctgtgctgtgtacatatgtaggtcgtaatgtaaggtaccaacaacagcaacaacagcagcagcaatacaacaatcagcagaagcagcagtataggaactcttaccccatgggatctaattatagcaccccgagtcagtccccctacatcacctccaacaccaacaactatagcagcagcaacagctacaataacaacaactatagcaactacaacaataataatgtgtaccgaggtaaaatgcagccgaaatgcaacaagcaaatcgcattgcctcgcagccaaaagttctagtttgaaattcactgccgtagattaactcacttgttgagtactcgtactcgtacgatatcatcagaaagttgctgctttaaagagttctgccatatcacatgcccgcataaagcccatataagcccattcaggttgaagcacacaaatgaatttcattagcaggtccgattatacgccatctcaacccttgcccgaatgcattaataatggcaacattttgttgacaaactcaatcaataggtgtgggggcaggtggtggggaagcattttaaaatgtgtttatcattattatggggcccagacgggaaattaaaactgacaatggccgatgtaaccgcgggtcggaaaatgtcgtgggggtgggtgcggtgctatcggcggtttcaatgccaatgcgattgccatcttccacttccgtgtgccagtcgaaagtgctgaaaggcgaactgcgaatgcagatgcgaaatcgaagggaaagggggtaaacgggtgtgcaactgggtggagaaacccaacccaacaaaatccaaccaaaccaaaccgatccgaaaaaccaaaccgaatgaaagcaaaccaaagcgatacgctgcgtatacgtaacgcgttgccattgcaacgaaacgggactcattcatgttcacagaaataaatgatataaaatgtatttggttgccgctgcaattcctgcctcagcctgcgtggctgttgccattgtggtcgcctcctccgctccttttcaccaggatagggctttaaatgcagcgcaaatatcccagcgaaatgaagaaggtcgcacacagtgggtggtaaaagtaaatggccaaaaagtcaagctaaggctgggagatcattgaaatcaatgccaaatattggatagaagtaccatatagattctaaatatcaaaaaatcagttttggtatattcatttttactgtacaatttgaattccctactattatattgtgcgtttgattttcttgctcactgtcattctgcggctttaacaagaacactttgggatctctcgtggcaatttctgttattttttcttcgccaactgcacatatatccttgcagctcggtgtttgtctgtttgtttgtttatcaattaccgcgctgccatgctggctgtcataacggaaatgaattaacaacaaatatggccgcgccagcaatcgcactaccaatttatgggccaatttttgccagtgccgcattcgttaagcaattaaaaatgcaattagcaagagacgcgaatagcgaacgctccctctgctcacataaatcttcatttggtcaggaatcaatctcctaatcaaggcgaaaatcacgcacaaccgcagaaatcatttggggttttcggtttagggtttcgttgcctccctcaccccaaacaaaaatcgagtggcggcatatgagcaaatccagttcccaatttgctggaaagggaatcaaaggaaaaaaaaaaaccagaaatgtgctggcaaacaaatgtttgccttgcacaaatgccagcacgcagcacaggcagcttttcccacacggagcgggaaatgtaaacgaaagcagataaattaccagccattattatacgaacaagcatccgcctcagtttcacccaggaattttccgcacttttcttgccgagagcgggcgcatattgaagcgtgccaaggggccatacatcaaatggttggcattcgtcagtacgaggatttatcgagggtactttcaccatctaatttctgtgatcgggcggaactattgtcccgggccgagcccattagccattatcccacgaataacttttgttttggtttctgattcttttaggttacggttacccctacacgtattagaaaatcccccaatgccaaacccacagacacacacagccgcaaatgaaagggcgtgcaaagttggcgaaattatggaaattctacgaaatacctaaatattaaaaccttcttaaatggattgaaatactatgagttttaagcaataaactgcgaatataaacttcaaagaacaaccctcatgaagatctttataagaaccatagtataaatgcttcgtgcctaaccgcataccgcttaaagcgctctaagatatatgatatattcacagatacacatctgtgtctatataaatacataagtactaatcgaattgtgtccctgctattctaagaaatttcctttcttgcacaactttgcatgccttttgtctaaaaaacaaaaaaaaaaaaaagaaacaatagaatgtgggtgaaaacagggccaaaaataataaacataaagaagaacttttgcctcttattatggccgaaaaactttctgttgctgctgccaacatttttgatatgacaaaatatttgcggcaataatttcgtttcgttggcctgtttgttttccgtttgtttctgccacagaaacggtcctttgtcctcgtgttggtcgtgtgtttctgccattttcaatttctgcgaaattacagccaataccgaattatgcataataaaatccaatgactacctgtcgacgccattttcccaattctgagctggggcgccaccatttgttgttgtatatttttgttttttttttctttctttttttgaggggggagtcagacgtggtcccataaaaaatggaagtaaatatgcgtgcctagcgccgagaatttccccgccccctgtgtgtgtgtgtgtgtgtgtacgcgtgtgtttattgttgctcgccatgaaaatggcactgaaaataagaaataaaaaatttatttgccccggcatggggggcataaagcgactattgttgaatcgcatttaatattttccctctttatacggccagcgatacaccgttgtttgtttgtctgtcaacaaattgcaatggggtgtgtggggttgggcgtgaaacttttccgatccactcattgcttcgcttcgattgagttgcctgacttaaccgtcttcctgctcgattctgtgtgccctcaacttgaccatccatacaccacttgagacactcgaaccactccagggcccattacccacactaaacaccacaagctgaacgaattcaccactgagttgctttagttttttgccgccaattgccttgtagtttttagaacaagttgtgtgcatagttttaaatcgccttcgaatccgctgccgctgtcaacgttgcaccaccactactgatccgaaccaccgaaccactgaccactgatccaagaccaacgctctgccgctttctcagtgccaaggactaacaagcgcttgtcttttgtttctttctgctcttatatttgccctgtccgccaaataaaaataaacaaaccaaactaaccatgctccctgaaacacacaaatgaaacctgcccccaaaaacacttgacctgctgtctgacccttccatcggaaaggtggagaggctgtggaggaactgcagccggaattcgaggaggaggattgctatgagatggacatcgaggtggccctggccgcaagtcgccaatcgcagcgtggctctagtttcacttggccaccgccgcaggatgatagccacttggcacccaccgcggcgcctctttatatccctccaccggagacgcaacatgtggtggtttcgaatccggtgcagcaagtgcctccattgccacctggaggagcaactgctcgactagatccgcaacctgtagttggaacctcggccaacggagctccgcagtggcagagttactccgcaccacaactaacaactgcgagtgcccgccaattggcggaacaggagtctagctcggatagctatacatccacctcgaccaccacgaccactacttcggaggagtatcagcgaatgtacgcagcccaggtgcaggcctatcaaatgcaggagcaatctggctcagagttcgattatcaggtggattacgccagtacccaggattctgtacaggactatccgtccggcaggagaagtgcccaagagtgcgtggactccctagctgtgcccctaagcacctacaagctggtcgatatggtaagggaggttacacccagtcccgtgaccactccaactcaaactcctgctcctgctgctcctacgacccgtcgcgttgtgttcaacgatgagcctgagattaaggagttaccccaactacccgcggaactagagaccataccggaagcctccgaagctgtagaagatcgcgaaggtcttgtaatcgaacagcgatgtcagattctggagagtgaacgcaagttccagcccacacccgagatcaagattgagattgccccagtgcgccaaatacctccgaccaagattcccaacccaatgcccaaggagtggattaatcccatgattcgagtcttgaccacagccccggaagttcccttccatctggtggagtgtccttttccccggccctgtggtgatgattttgaagcggaggcagccgccgccgaagcggccaaaactcaagaggttccggaacctcttcctccacaagtttctgctgctccaccggcaacagtttccgttgagccatcacctgctcccttgcgggaatctcctccccgcggatcccgactcagccaagccatggttactgctcccgagttcgagctcaagttcgcccctcccgctgaccagggcatcccacttccagaggagaccgagccctatatgccaccacccattgacacgaaaccctatttgagggaggattaccgacccaaatcaccatttgtgagtgctctaaccaccgctcccgatcgtccctttgaaggtcactttgataaagatgtgcccatccacatgattgacctgcccacccccaaagagcacctgagcatgtgtgatgccctttgcaccgccccagaacgtggttacactcccctgaatcccgagaatgctatgcatcgcgtagacgaggagcaaaagcaacaggaactcaagaagcgtgaatttcaggtgctggatcacgaggaagagctgggaatccgtccggagcctccacagtctgtcgagtactacgaaacgcggagagatcagccacggaaatcctccgcctttgcagccatgcaagcattccagccatcccgtgaacctttgtcgtcgaacacggtttcgaatgctggaagtgtggccgataccccaagagcctcgattgtgtctgccttgaaggaggaaaccgatctggagtaccagaagtatctcaaggcccagcagcgcaaccagaaaagattggactacttccaccagaaagaggaggagctctcgggtctgcagggccaacagctaacccaacttcagagggagctctcgaaccagcaacagaatcttctgagccaacagcaactgcagcaatccaagttgttgcaactgcagcagtgcgtccagagccaagagttgcagcaacaggtgcagcatctcacccagaaatcacaacagcaacctcctcaagctaaccaacagcagcaacaacagcaacagcaacggggtacccaacagcagcaacactcccaagtaacccaaagaacccaacagcaacagcaacaagtgccccaacaagtaacccaacagcaacaacaagaacactctctgctatcgcaaaccacactcgctgagacccaaacccttcaggccaatgcccagtctcagagttccgcttcctacagctccaaagcgactgcttgctctaactcctcttccacagtcccacctgccaacacctctaccgctttcgcacctgctccagctccagcacccaccagcatacctgtccgcccatcagctatcgctgtacaaagtagctactgcagcagccagttcgatgtccacgaactgatcgaggagaccgccgaggagctcgagcactcggaggtcctgttcccgccgccctccccgctgagccacctgaccaaacagggcaaagccgtacagtccggcctccacaaggcggacagcatccccaaataccagcgcaactggacggtgctacctacccagagtcccattcgcactccggaaccgcaggagctgcgcgagaacgtaccgctggcattcgtggatgctccgaaagcaccagttaccagtgactcttccactgtacatagacccattgcccaggttgctgcgccgacaactgtggttgctccttcccgggaacgggagaaggagcggcggccccagctgtcggtgcccattattgttgaggatcgatcgggtccagtaacgatggctttccaaccgttagacgaactggtgcgaccggatcaggccctgacgcccaccaggccgtacaccccgtcgctgaccaacaagccggctccaattgtgcccttctaccagacggaggagaagcttgtcttcgaggagtgctcggctacccatgccaggaactacaacgaattgaacgcctcgccttttccagacagaacacgttctccggctccgggaccaccgccaaatcccctgaatgccattcgagcaccgagaatgaaggaaccggaaaccaagtcgaatattctgtcagtttctggaggtcctcgcttgcagacgggctcaataaccactggacagagttaccagggacaacttttggctcactccgagcagagttcccagtcggccagtcagagctataaccagcaaccggagagaattacggaacaaagggtgggcaacctgaacatccaacagagggagcagtcatctcagctgcagcagcaagctcaatcgcagactcagagtcagacacgcagccaggtgggaaatactcaaatcgaaagacgtcgcaaggtcaccgaggaattcgaacgtacccagagtgctaaaactattgagatccgaactggctcccagtctgtgagtcaatcaaaggcccagtcgcagtccatcagccaggcacagacgcaggctcaatcccagtcccagaatcagtcggacacagaacgtcgctcttcgtacggtaagacaggattcgtggccagtcaggcaaagcgtctgtcctgcatggaggaagagattagcagtctgaccagccaatcgcaggctattagtgcccgggcctctgctctcggagagggctgctttcccaacctgagatcgcccacctttgactcgaagtttccacttaagccggctcccgcggagtctatagttccggggtatgcaactgttccggccgccacaaagatgctaacggcaccaccaccgggtttcctgcagcagcagcagcaacagcagcaaaggtctgccttctcgggctaccaagccacaacttcatcggtgcagcagagctcttttgcgagcagctcaaaagccacaacctcatcgctctcatcctcatcagcatctgcttcagcatcagcatccgtcgcgagatcgtcgcaaagtctaacccaagcttctgctattactaccaccactaataaccaggccaccacggcctacaggagcagcaatggcagcattaccaagcctaatctggcctcgcggccatccatcgcttccatcacagctccaggatcagcaagtgctcccgctcctgttccatcggcagctccaaccaaagctactgctccattcaaagctccgattgttccaaaatcggtgatagcgaacgccgttaacgccgctgctccgcctgcgcccgctgtctttccgccagacctgagcgatttgaacttgaactctaatgtggataattccccaggtgccggaggaaagagcgctggcgcctttggagccacctcggcgcccaagaggggcaggggtatcctgaataaggcagccggacccggagtgcgcatcccactgtgcaacagctgcaatgtgcagatcaggtgaacagagcatcccagagtttgttgtgtttaaagtttgattcatatgttaactatgatggttgttatttatttttgcccttgaatgattctaatccgcttcccaacaccttgagattgatctttgatatgccatagatcacatatcttatgatcttatgttattataatataatttgggatcagcttcctactgataagcttgataccagccagccctactaattgcctgccaccaatctaacatttacgctttttgtgttctgtttacccccattttgttacagtgcccacaggagctcaaagcgctgccaaatccactaatctgcatgctagtcctcaaaccttcgccaccttgccacgcccccatccccaggcaactgacatacccgcccaggagcttcagaaggataatcaactggagtcggatgccacttccatgctggctgaatcagttggaaaaataaatatgggtgacaaaacccaagcatttatgcaggaagccggcaaaatcatcaccaatatgctggaggcacgattggccaacaatggtggacaaaatggtccactttcccatgcgggtagctctttaagtcttcgcagcaatagcagctcaaatctctcaaagagtccaatgatcgttcgcaagcgcttagatctcgatgactttaagaacctggatcccacccagccagttgcactgcaacctgttatagccgtacattcccagaaggatctgcccactgaggtgggaaatcagaaggcacaaccgcaagctcctcgtttggaacaaaccttacagatggaactcgctgcccagcatcctatgggcaagatacttgatctctgcgatggtggcaaggccatcgacacacccgaaccggttgcatttaggaacaatttgaaacgcactggtgctacccatgcggctgatcgaagatcctacatagaacctaagcagggtgctatcaatgccacctctgtagccactcaaaatggtaatcagaatggagggcaagcgggaaatcaaaatgccacccagggcagcgcacccacatacagtgtttccgttaaagccttgggacctcacagcgaagatcaaaccaccatgtcggaggagaacgaaagggccgtaagtcagttgctcaaggagggtaagcgtcccgtgtgttgtcagtgcaacaaggagatcacctcgtaagtacagcttgccatttgttcgttcattttgttattgtttttatgtactatcttaaatttccaaactaatttcttgttgtctcacaatcacagaggaccctttatcacggcattgggccgcatctggtgcccggatcatttcatctgcgtgaacggcaactgccgtcgtccgctgcaggacattggattcgttgaggagaagggcgatctgtactgcgagtactgtttcgagaagtacctggcgcccacttgcagcaagtgcgctggcaagatcaaggtgagagttaaagctaaactctaatggttcatccaactaataatggtatgacgtagggtgactgtttgaatgccattggcaaacacttccatccggagtgcttcacctgcggccagtgcggcaagatctttggcaacaggcccttcttcctggaggatggaaacgcgtactgcgaggccgattggaacgagttgttcaccaccaagtgcttcgcctgcggcttccccgtggaagctggcgacagatgggtggaggccttgaaccacaactaccatagccaatgcttcaactgcacggtaagtagtagttaaaattaattcctatttataacgattattttatttatttatttatattatttttattgtttaacagttctgcaaacagaacctggagggtcagagcttctacaacaagggcggacgtcccttctgcaagaatcacgcgcgctaagccgcaactcagatgattttgttcgacttcagggatcacgcacagttggttaaacaccaactatctatcagaatcttcggattacttggatacgggagcttgctcccaactcgtatctaatgcttattattgcaattgtcagagtgaataatgcgtaactattattatttctatttgtttttgaattgtgcacacaaatgttatcctaattttaactgatgcgatcatcatcgattcgctcaaaatcaaaacagtagctgcaaacgaaacgaaatcgaattagctagcaaattatatgtcccacacaactattatttattcaaacatcgtatcataaccgaactaccgaaccccagataactatgtatgtactgtggccagagttaatttacttagttgagcctgaaaactgttgatcaacccgtaaccaaaagctaacaaatcgcgcgagaggatttcccaaaaccgattggcggcctagaatcgggctaatcagagatgtcaaacgaggttgtcagcaggcagttgcttacttaatttctaaatttatgttgtaaattatccataattcgattgtaaattgtaaatgatcagcaagtgaataaatttcgaaatctttttcgcgtttaaaaaaatgagttcttttctcttgtgatggccgtaaacagcaatcataatgtactccccgtgtaatgtcattatcgttggcaacttccggtttgctgcgcacacgaattccacaggctgcctgaaagtatgcaacagtttttgttttccgcccgtacgacaatagcacacacacacacacacacatccatacttaccgaccacccacaaatgggcacgcacttctacatcaatttcatgctcaaccaatttttgttggtttcatttgagcctggtattttattttttcggctctcgtcctaaggtgtgagtgagtgggtgatgggctgtgctgtgctgggtgttaatcgctgggactccgaataccccactc

SEQ ID NO: 18056 - DNA, 1609 bp, DROSOPHILA
cgtgtccgtgtccgcgaagtgtccgtaactgtgtccgcagcgagcgggcaacggagaagggatcgcggtgcccacgaaaagtgtccagaaatcggtttgcgtacagcactccaacgatcgacgattagcgaatcaagtgatacgactctgtttcagtgacttcagcagaagaaaactcttctagcgaatcggattgcatcgaaaggttgcaagctctcaagcaacagcaacagtagcaacggtagcaccatccgctgcaacagcagcaactgcagcagcaacaccccaagcagcaactgcaacagatagcccagctgcaacagcatcatcatcagacaatatgtcggcctacgtggcagatgagccctcttcgatttatggccaaattagcgctgaatcggtggcattggccccaccaccaccacagccacccactgccggcgggggcgatcagccctttgagtacgtcacgctcaccggcaacgtcatccgcagcgtgcaggctcccggaaagggggcgtgccccagctacaaggtaaaccatcccactccgccccccaatgggcccaaggtcgaggtgaaccagggctatgctcgtccgttcggtgccgccgctcccaagtcgccggtgtcgtatccgccgcagcagcaacagcagtcgccgcgtcccgctcccggtggccaaaacccgtacgccaccctgccccgcagcaatgtgggccaacaaggtaaggatgatgatgacgacggctgtctgtcagaaggtcgtaatgtaaggtaccaacaacagcaacaacagcagcagcaatacaacaatcagcagaagcagcagtataggaactcttaccccatgggatctaattatagcaccccgagtcagtccccctacatcacctccaacaccaacaactatagcagcagcaacagctacaataacaacaactatagcaactacaacaataataatgtgtaccgaggtgccggaggaaagagcgctggcgcctttggagccacctcggcgcccaagaggggcaggggtatcctgaataaggcagccggacccggagtgcgcatcccactgtgcaacagctgcaatgtgcagatcagaggaccctttatcacggcattgggccgcatctggtgcccggatcatttcatctgcgtgaacggcaactgccgtcgtccgctgcaggacattggattcgttgaggagaagggcgatctgtactgcgagtactgtttcgagaagtacctggcgcccacttgcagcaagtgcgctggcaagatcaagggtgactgtttgaatgccattggcaaacacttccatccggagtgcttcacctgcggccagtgcggcaagatctttggcaacaggcccttcttcctggaggatggaaacgcgtactgcgaggccgattggaacgagttgttcaccaccaagtgcttcgcctgcggcttccccgtggaagctggcgacagatgggtggaggccttgaaccacaactaccatagccaatgcttcaactgcacgttctgcaaacagaacctggagggtcagagcttctacaacaagggcggacgtcccttctgcaagaatcacgcgcgctaa

SEQ ID NO: 18057 - protein, 422 aa, DROSOPHILA
MSAYVADEPSSIYGQISAESVALAPPPPQPPTAGGGDQPFEYVTLTGNVIRSVQAPGKGACPSYKVNHPTPPPNGPKVEVNQGYARPFGAAAPKSPVSYPPQQQQQSPRPAPGGQNPYATLPRSNVGQQGKDDDDDGCLSEGRNVRYQQQQQQQQQYNNQQKQQYRNSYPMGSNYSTPSQSPYITSNTNNYSSSNSYNNNNYSNYNNNNVYRGAGGKSAGAFGATSAPKRGRGILNKAAGPGVRIPLCNSCNVQIRGPFITALGRIWCPDHFICVNGNCRRPLQDIGFVEEKGDLYCEYCFEKYLAPTCSKCAGKIKGDCLNAIGKHFHPECFTCGQCGKIFGNRPFFLEDGNAYCEADWNELFTTKCFACGFPVEAGDRWVEALNHNYHSQCFNCTFCKQNLEGQSFYNKGGRPFCKNHAR

SEQ ID NO: 18058 - DNA, 3596 bp, DROSOPHILA
gtgattcatttccggtttgcaacggaagggacttgaggtgagtcggatgccacattaaatcattggaattgccgcagacaaattttataaatgcaaattagattttaaaatttttctaaaatatcttataagttaccacattttcttaacaaataattattgttacctaaatataatagaacgtaaaattattgaaagctgatatttaaaaaataccaatcaatatatgatgtacgccttaaatcacataactgaaccttttccttttgtgcaggcacagtctttattaaattgtaccgaatttcataaaatttgcatgccaatttcacgccgtgaataagggaaattggaggggttattcggggggattaaccccttgggcattggctgcaaatgagtggcttgtttatgagtgggacgcagctaagtgagcatcaaatggccagaggtgtctgcctttgggattgtgtgtgcgtgtggtgtctgtctgcccatccatgagtttgcacacactgaaagcaaagtaaaacagatggctcgggcaacctgttggcttttgggtataaattttagcccgactccgcttgctttacctatgctttcgtttgtgtgtgccactctgattttttgccacccgtcggacattctttgtgttcgcagcgcaccaacgggtcgtatacgcaattattgccataatggtttcacttaaatcgttgccccagcagacccggccgtctttaagcgggtcacttaaagtgactctctatgcaagtaaaatcactaagatcagcagaccttcacctttctaataaactctgatgggttatatttaataaatacctttaagcaaataagtatgtaagtactatggagaacatcctcaagctaatgtgcacaatttagaatcagctgcctaaggttatacgatatagatttcagcagatggtgtgttacactcgcctacaagctctggttgtcatagaacgaaactcgaatgtgtattgaacaaacaaactgaacgaaaattccgatactccaccggcggcagtttcgttatatattctttctagtcgcagacatgtcaattaggagggagcaccagtatgggtcgactgtgcgaaacacgattgtggcgcggtccaatcggccaattatcaaccgaatgttgcgatccgcccgactggactccacgattggtcagactacggccaagccagttaaggccaaacggatggagacgaaggcgcagctcatgcagaaggagcgatcctccagcactgggatgagcggattctccaaactgacaagtcgtgagggactggtgggcaaggattactggaacgcggccattgaggatgtggagttcagtgccgcctgccgcttccagccgcgcattcccgtcattgactattcccttgtgctgccgccacgattgcgcgagagggtcaagcgcatccagaactatgactattccaagtcggacgaggacatctacatcagagacgaaatgcaggaggtgcgacccgaggactacatgagcgccgagagcagcgaaaaaagtgaggaggaagaggaccacgtggtagatatggagtagttttgagccttttccacaataccttatataaatcctctgataatttagctccttgaaattggccgcaagaaggtggaggagtacttcaacgagagtgaccactcggatattgtgcgcatggagcacgagttcgagaagtttgatctgaagttggatgagccggtgggacacacccatcgattcgtggacaagtccagttggtacgccaagtttctgtgcgcgccgcgcgataagagagtcagctggcagagtcgcgttgagcatccgggccagaacttctccatggtcacgctggacgagcaggctgagaacctcatggatgcggttagtatggttacccttttctattacattatatccttaaaattcccatctccacagtcggcagaacgttttgtcgagtggctgaactcctttggcaccttggaaagcaatttgaccccggaaaaggtcaagaaccttttttccatcaagggcgatcgcaccctgttggcctccgtgaagacagatcccaaggaggtcaacgccattgctcagacagtggccgataaatggaacaagccacatgtaggtaacgatagagaaatccccttataatcaatatacaagttatccagattattaattatattacatttctagatggccattgagcttaagtacgagaagcacattaatgaccacgctacccgagtgaaccagaaacccctgctaagtgcatttggacgcactgttccactgaaggatcgtccgtggttaaaacgatccggggacaccgtcattaagacagtctatccggatgatctgctgacccgcgagaagatctttaagggcatcacccacctgcggagcaccactgccctgatcgatttctatctggcccatccggaactggagcggccacagtatctcctgcagagcggtgactttgaggagtccagcgccagtgaatctgtggctgaggtgccgctctacgaacttctgggattgcgttattaagccattgattgccattacgttgattagttaaattccctgttgtctgaatatgaatggttgcagtcaaatataaataaattgtccaatatgtttagagaaatataaacaaatatacataacataaaatgaaataaattttagtcttattaaatgaatgtaatgaaaatcgttttaaaattttaaatgttatattaaaatgttttcactaagaaaagaatattaagcaagcagtaaagtttattgtttaaaattggtttctataacgtcagcgttgtttggatccagggcagataggtgcccacattgacatagacacccggaactcctgcctgggcgcatccaatgccccaggccaccaaacccaccacgtaccatacaccattgctggtgcagacaagcggagatcccccatccccggtgcaggcatccttgccagcttctccgccggcacaaatgaagctggtgggactgaggacgaaggaggagcccagtcgggttgcctgcagcgccgcctggcaattggcattgggaatcaggggcacatccacttgcctctcaatggcctggtacgctccggtggcaccgaagtcattcttgccccacccagctacccagcatctctgacccacgaaactggtggtgggcagacagacagtgcccacagtggatttgctggtcagcgaaacgggtgtggacaacttcaggatggccacatcgttctgcagattgttgggattgaaggacggattgacgtacacattcgagatgtacacatcctgggcgggaatcggttcgctcgtactggcagcatcccattcccccagacgaaccttaaagtaagtgagcctaacacgatgaagttaaagaattggacagggatctgggaaaaacagaaacgaacctaccccagattgtaaactttgtgggcggcggtcagaacatgttgtgcggtgatcagtgctccgccacccagataaacatccgcggtggtaagcagtgc

SEQ ID NO: 18059 - DNA, 1458 bp, DROSOPHILA
attgaacaaacaaactgaacgaaaattccgatactccaccggcggcagtttcgttatatattctttctagtcgcagacatgtcaattaggagggagcaccagtatgggtcgactgtgcgaaacacgattgtggcgcggtccaatcggccaattatcaaccgaatgttgcgatccgcccgactggactccacgattggtcagactacggccaagccagttaaggccaaacggatggagacgaaggcgcagctcatgcagaaggagcgatcctccagcactgggatgagcggattctccaaactgacaagtcgtgagggactggtgggcaaggattactggaacgcggccattgaggatgtggagttcagtgccgcctgccgcttccagccgcgcattcccgtcattgactattcccttgtgctgccgccacgattgcgcgagagggtcaagcgcatccagaactatgactattccaagtcggacgaggacatctacatcagagacgaaatgcaggaggtgcgacccgaggactacatgagcgccgagagcagcgaaaaaagtgaggaggaagaggaccacgtgctccttgaaattggccgcaagaaggtggaggagtacttcaacgagagtgaccactcggatattgtgcgcatggagcacgagttcgagaagtttgatctgaagttggatgagccggtgggacacacccatcgattcgtggacaagtccagttggtacgccaagtttctgtgcgcgccgcgcgataagagagtcagctggcagagtcgcgttgagcatccgggccagaacttctccatggtcacgctggacgagcaggctgagaacctcatggatgcggttagtatggttacccttttctattacattatatccttaaaattcccatctccacagtcggcagaacgttttgtcgagtggctgaactcctttggcaccttggaaagcaatttgaccccggaaaaggtcaagaaccttttttccatcaagggcgatcgcaccctgttggcctccgtgaagacagatcccaaggaggtcaacgccattgctcagacagtggccgataaatggaacaagccacatatggccattgagcttaagtacgagaagcacattaatgaccacgctacccgagtgaaccagaaacccctgctaagtgcatttggacgcactgttccactgaaggatcgtccgtggttaaaacgatccggggacaccgtcattaagacagtctatccggatgatctgctgacccgcgagaagatctttaagggcatcacccacctgcggagcaccactgccctgatcgatttctatctggcccatccggaactggagcggccacagtatctcctgcagagcggtgactttgaggagtccagcgccagtgaatctgtggctgaggtgccgctctacgaacttctgggattgcgttattaa

SEQ ID NO: 18060 - protein, 459 aa, DROSOPHILA
MSIRREHQYGSTVRNTIVARSNRPIINRMLRSARLDSTIGQTTAKPVKAKRMETKAQLMQKERSSSTGMSGFSKLTSREGLVGKDYWNAAIEDVEFSAACRFQPRIPVIDYSLVLPPRLRERVKRIQNYDYSKSDEDIYIRDEMQEVRPEDYMSAESSEKSEEEEDHVLLEIGRKKVEEYFNESDHSDIVRMEHEFEKFDLKLDEPVGHTHRFVDKSSWYAKFLCAPRDKRVSWQSRVEHPGQNFSMVTLDEQAENLMDAVSMVTLFYYIISLKFPSPQSAERFVEWLNSFGTLESNLTPEKVKNLFSIKGDRTLLASVKTDPKEVNAIAQTVADKWNKPHMAIELKYEKHINDHATRVNQKPLLSAFGRTVPLKDRPWLKRSGDTVIKTVYPDDLLTREKIFKGITHLRSTTALIDFYLAHPELERPQYLLQSGDFEESSASESVAEVPLYELLGLRY

SEQ ID NO: 18061 - DNA, 7581 bp, DROSOPHILA
atatgtatgtgtatgtatgtatatggatgtagagaaattcacaaaagcaatctgtaaagcaattatttcgtacaaaaaaatcaacgaactaaaaaaaaattttttacaaaacccaaacaataagccacttaatacaaaaatcgaatacttttccattaaaatattagtgaaatgaatattatctgtaacataagaaaatattatactttggctaagtactacgccaattccgcgaatccattaaaacgaatttccaagcactttggcaatatcaagcagcgcacaatacacgcaaaatgtactagaaagccaagtagagcaaagttaattgaataccgcaatcggcatgtgcacttgtgccaacagattgcatatacttcaaattttgccaggtaatcagagggcctgccatcgattggtcccttttagccagagggaaaattcgtttttccacgaaaaacacattttcacatggaggcttccctattggattttagggccttgggcttcaattgtcaaaatgtttgcctgcagggggcagcacagcagatccgtcgccagggcgaggggttcgtgtgctggtcctttgaaaaggcacgcatgtggatgtgtgggttggctaaatcctaaaaccccgtgcattatgaaatgtcattacgtgggctgctttatctctgcttaaaagtcaaaagtcaattagggttgattaattgtacattttagttaacaaatttcacattttatctacagaatcacgacagaggaggcaattaattaggaagagaggaaatacccacctttgggtgaagggtttttagcaatgagctgtctgcacttgaagaacttcaaatgcgccaagtggtcgcaatctttatcgaggagttaagcagcggaatatcatcacaccataaaaacaaatcatacatttaaaggaatttctggcaaagaattcttgaccctacttctagtgaaaagtcgtttaaaaggagtggcttcaaatatgccacagctcaggcagctggtggtggtgctggccatcctatccctccttgtggatccctcgttcgcccagcgaccgctgatcatgaaccacaccttcagctccctgccgatgtcccagcatcccagttttaacagctggccaagtgcatccgggggaaagcaactgcgcaatggcaggctccatgagcagcctttgcccctgccacaacccactttgccggtggccacacaatacgaggactacgaggcggcaccgccagggtcgcgaagggataacaagcggcgactggctcagatggcccaacgcccaggcagtgggaacggcgggcggcgaggcatggaatcccttcgaaaggagcttatgaatccatcggttggtggtccgggcggaggtatttccggcggaggatccggctatccttcgtactccgccacctcttccattggacgtatagatggcctgggtcagggcctaggatctgcggatcggtacggagcgttatacgaccagctgaggcagcccagtggaatggcagccatgacagccggtccccttggcggaccctactcgacaaggttccctcctctgtacgccggtgtagacgaccagcccaagcgctcaaatcgaaagaactccatcagcgagctctataagctgaagaaggccctcaaccaggcagatgaacctgctggcggggtgacgcacggaaactttgaaggagatccacagccctcgtcggcagatccactgcaagaaatcaaggatcgtatacgagatacatcaccaaatgcggtgagttatttttaagggctttagattagatttagataaaatttatgaatcgtactgatctatgcattctgtttcgatttttagaacacctatgctcctcacacggatgccacaccatcatcagagtacgagtacgaacttggcgtgaagtgcaacttcgagaccccgtgcagctggacctggggcaactattcggatggttttcaagttataactggaacggaattgtcgaaaaggaatctcacaggactactgccaggtcctgcagccgatagtatcgacgatgcgaacggtcacttcctgtacgcccgcgtgaacccctcttcaagacccttgaatctcacctcaccggaatttagcaccacgatggagaagtgctttttagaggtctacatgcaccagagcgacatgagtcacggactttcgcgggtggtggttgaactacttcacacggctgagagcagttgggttccggccgaaattctgggcgataatgtgcgccaatggaccaggaaggtatatcgcctgggtcgcgtttcccgcgatttccgcatcgttttcgaggtggttcccgatctgagagtgggccagaagggtcatgtggcgttggacaacctgcgcatggttaactgttttcccgagggtacaaagtcggagaagtgcagcacctcgcaggtgaagtgcacctccagcaaggtgcccgtgtgtatccatctaccacgaatctgcgacattaccagggactgcgatgaggcggaggacgagcagcagtcatgtggttagtaaaacttagggcttaggaccgcataaaaatgtatattcaaatctatgattttaatctgtttcagataaaataccctatggcggtcgttgtgacttcgaggaggactggtgcggttggcgggactcgggaaagacgacgctcacctggtcacggcacacgggatcatctcccacccacgatacgggaccggatggggatcacacaatgcagcacctgcagaacaacaccagtggatactatatgctggtcaatatgaatcagcatatgaacaactcggaaaagaattcgattattggatttgccagcaatgcgattatggttagcaagaccttcaatccgccgccatcggtacatggaaacccggactctccctatcgtaactcgtgtgttgtgaggtttttcattcatcaattcggcaagaatccgggcagtatcaatctctccgtggtggagatgaaggaaaaggagaacatcaccactacactgtggtggagcaccaaaaaccagggcagcgattggatgagagcggaatatgtactgcctaacataacgtccaagtaagtgttataattaaaatcactttttagaactgaactaatcaatttaattgtcaaacttctttagatactatcttcagtttgaagctcgcatgggcatgagaatctactcagatgtggctgtggatgacttctcactgagtcccgaatgttttggcctcaatataccagaagatcatctaggtggctacaactactgggatgtccgacagaatctaaagagtccaacctataaagactttgaatataccaactgtaagttgagagtttagaaaccaattgatgagaagttctaaatgaaatgtacacccctctttttagatcttgagttaaccacctgtgacactcgtggcatgataggaccttcccaggcgcaatgtgaagctgcctacagggagcaaaataagacacatgtcctgcgggaagtccatgtggtggaagatcagagcagctacaagggcatgcagaagtggaaggtaccccacgaaggacactacacgtatgcataactcattgttaaatcttcaccattatgctaaatttaatgtatcgcattcattcgcagaatcattgccaaaggcgccagtggaggactgggttcgggtggcgtaggcagctctcgaggatccgtggctgtggccattctggaacttcacaaaaatgaggaactgtatttcctcgtgggacagcagggcgagaacgcctgcatcaagtccatgggagttctgaaggaagctggttgcggaaccgatcacgacttggacttagcccaatatagcttccgttccaaacaggatatggtcaagaatatctatatcgaaaatggtgccggcggcggtggtggtggctcctacgtgttccttctcaatcaggccaaaaatgaggcagtccctcttttggtagctggcggtggaggaggtctgggaattggccaatacattgatgaggacttccagcatggtcaaaaggcgaagccccttcaggctccagaaagtggacagatcaatggagagcccttgaataagaagacagctggtccaggtggtggatggagagccaaagaggaccaggccctgagtcccacctatggagctgcccttctccagggcggtcgaggtggacactcctgttatgtggaacttgcggacaatggaacttctgttcacagacatggccaaggtggatttggtggtggcggtggtggctgcaatactggaggaggcggtggcggctacgctggcggagatgtctacctaaccgagtcgaatggcgagggcggaagttcgtacatcagccccagtcgaagtcttcgggaaattagtgaaatacatgccggcgctagcagtggaccaggtgccatcatcattattccggcaatcgagggctgtggatgcgactataggtgcgtggccttggatgagttccgatcgaaggtgcggtgcatctgcccagatggctggagcttaaaacgggacaatcacaccgcctgtgagatccgcgaggaggcgggcaagtcctccttccagtatctggtttccatcctaatgatctcgcttgccgtgctcttcatctgcatagctgcgctcatctttatgctatgtaagtattcaagaaattctgtttgtatgaatggaaatgatattctctttttacattagataatcgctatcaacggaagaaacaatcgaagaagcgccacaagatgctcgtggagcaggatcttcaacttacccgtttgcgcaacaatatcgacgactccaatctgaataactttaaccccaactatggatgtgatggtattctcaatggtcacattgatgtcaatagcttgccccaggtggcacgcgatagtctgcaattggtcaagtgagtaacttaatctaatatataaccttatgtgatctacaaatgtgattcaatcgttttcagtgctctgggcaaaggtgcttttggagaggtatatatggcattatatcgccatcgagacggagatgctgtggaaatgggcgtggcagtgaaaaccttgcgggaagatcccaagcgggaaaaggaggaggatttcctgaaggaggcggccataatggccaagttcaatcacccgaatatggtccatttaataggagtctgctttgaccgtcagccgtattatattgtcctggaacttcttgctggcggggatctacagaagtttttgcgcgaaaacaggaatactccagagcgtccctccctcttaaccatgaaggatctgcttttctgcgccctcgacgtggccaaaggatgtcgctacatggagagtaaacgcttcatccatcgggatatcgccgccaggaactgtctgctgagcagtaagggtcctggtcgcgttgtgaaaatcgccgattttggcatgtcccgggatatctaccgatcggactactatcgcaagggaggcaaggcgatgctacccatcaaatggatgccgccggaagccttcctcgatggcatattcacctcgaaaacagatgtctggtcctttggcattctcctgtgggaagtcttcagtctgggccgttcaccatatcccggccagcataacacccaggtaatggagctggttgtgcgtggcggtcgactgggatcgcccaccgagtgtcccgtctccatatacaaggtgatggccgactgctggaatcccacgcccgaggatcggcccacatttattacgttgctggagcatttgaccgcctgcacccaggatgccagcataatgaacgctcctctgcccaatattctgggacccacagcctccgaacgggacgacacagtcatccggccgcccaatggcgaggagttctgtttggcggtgccggattatctggtacctttgccacccggcggcagcaacaatccatcgatggccagtggttcgggctacgtgccagaattgcaacgccagcagatgagctcctgcactccgccggcggtcacatcgcccgccgcaccacatccaaggccggtggagaatatcgcaccgaccagcggagattgctgggagacgtcatttatactacctaactcgaaggtggaaccaccagtggttggaagtggccacgatgttccattggccggcggtgaggaggccaaactgatcagtttggacacaccacagcccacaccaacgaccatccaaccaccgctgtccttcgcctcgcagcttgatggcatcacattggatccctcggcactgaccaagagtttgcccaacggaaatgccaagcagtcgtatgccaatgttcaggtgaaaaacgaagccgaggccaaggtcatcaatggtgtggttggcaatggaacggtgatgaacggggacgtctcgacgggatcgggtggtgccgattcacctttcaccattcagggttacgcggagcgatacaaggacaacaacaatcattccgaaatcagttgttaaaaacactcgaaagtttgatacattaagatcaggattatacatcacagatgaagaacataaatttccaaatcatttggatttcgaaagagaagagagccgaatcgtatattttataaagatttttaaaatctttataaaaagcaaaacggtgtaagtcaaatctgaactttcgagtaagattactgattttagaagacttcgcggcccctaaaaattcgtcttgtgttggagcaatcacaatttgctggcgcctcactggcgcattaaataaatttactctcgaatcacaaagagaaaaaaagaaaattgagataacaaaaaaagagtgagaacttctcaaaaaaattttattgtattttaatcttaaatttgtattgcgtagaatgaaaaaaccaacgtcggactacaaaaaacaaaaactgcaactaacacgtaaacttagttggaatatgtgtatagtttagttttttaccaaatattagttttgcaagaaaagaaaaaaatttaacggaggttacacaacattttgtgagaggttgtatatattaattgtatctaagttttacaattacccataatttaaattaactattttttttgtacctttagttaccatacccttcgttaacgttttaagctgatgactgaaatgccaaacaatattcctaaagtaaaaaagaaagtgcgaaacgttagcttatttttaataatacgcagtccagaatcgggaaccaagatgccaactcaaagtagttcaaagtgtcaaagctgctcatttaaagttcgcaataataccacaaatgtagtcaaacagatatgccaacacatacaatatgtttttaacataggatatttttttaatttaggattctcgattcctgtattgtttactccgaacaaattacatttagtgtaaataacaagcttccgtcgtagcgaattacgtatattgtatgtatttgattagacctaaggcaaataaatgaaaaaaaaaaccaaa

SEQ ID NO: 18062 - DNA, 5106 bp, DROSOPHILA
atgccacagctcaggcagctggtggtggtgctggccatcctatccctccttgtggatccctcgttcgcccagcgaccgctgatcatgaaccacaccttcagctccctgccgatgtcccagcatcccagttttaacagctggccaagtgcatccgggggaaagcaactgcgcaatggcaggctccatgagcagcctttgcccctgccacaacccactttgccggtggccacacaatacgaggactacgaggcggcaccgccagggtcgcgaagggataacaagcggcgactggctcagatggcccaacgcccaggcagtgggaacggcgggcggcgaggcatggaatcccttcgaaaggagcttatgaatccatcggttggtggtccgggcggaggtatttccggcggaggatccggctatccttcgtactccgccacctcttccattggacgtatagatggcctgggtcagggcctaggatctgcggatcggtacggagcgttatacgaccagctgaggcagcccagtggaatggcagccatgacagccggtccccttggcggaccctactcgacaaggttccctcctctgtacgccggtgtagacgaccagcccaagcgctcaaatcgaaagaactccatcagcgagctctataagctgaagaaggccctcaaccaggcagatgaacctgctggcggggtgacgcacggaaactttgaaggagatccacagccctcgtcggcagatccactgcaagaaatcaaggatcgtatacgagatacatcaccaaatgcgaacacctatgctcctcacacggatgccacaccatcatcagagtacgagtacgaacttggcgtgaagtgcaacttcgagaccccgtgcagctggacctggggcaactattcggatggttttcaagttataactggaacggaattgtcgaaaaggaatctcacaggactactgccaggtcctgcagccgatagtatcgacgatgcgaacggtcacttcctgtacgcccgcgtgaacccctcttcaagacccttgaatctcacctcaccggaatttagcaccacgatggagaagtgctttttagaggtctacatgcaccagagcgacatgagtcacggactttcgcgggtggtggttgaactacttcacacggctgagagcagttgggttccggccgaaattctgggcgataatgtgcgccaatggaccaggaaggtatatcgcctgggtcgcgtttcccgcgatttccgcatcgttttcgaggtggttcccgatctgagagtgggccagaagggtcatgtggcgttggacaacctgcgcatggttaactgttttcccgagggtacaaagtcggagaagtgcagcacctcgcaggtgaagtgcacctccagcaaggtgcccgtgtgtatccatctaccacgaatctgcgacattaccagggactgcgatgaggcggaggacgagcagcagtcatgtgataaaataccctatggcggtcgttgtgacttcgaggaggactggtgcggttggcgggactcgggaaagacgacgctcacctggtcacggcacacgggatcatctcccacccacgatacgggaccggatggggatcacacaatgcagcacctgcagaacaacaccagtggatactatatgctggtcaatatgaatcagcatatgaacaactcggaaaagaattcgattattggatttgccagcaatgcgattatggttagcaagaccttcaatccgccgccatcggtacatggaaacccggactctccctatcgtaactcgtgtgttgtgaggtttttcattcatcaattcggcaagaatccgggcagtatcaatctctccgtggtggagatgaaggaaaaggagaacatcaccactacactgtggtggagcaccaaaaaccagggcagcgattggatgagagcggaatatgtactgcctaacataacgtccaaatactatcttcagtttgaagctcgcatgggcatgagaatctactcagatgtggctgtggatgacttctcactgagtcccgaatgttttggcctcaatataccagaagatcatctaggtggctacaactactgggatgtccgacagaatctaaagagtccaacctataaagactttgaatataccaactatcttgagttaaccacctgtgacactcgtggcatgataggaccttcccaggcgcaatgtgaagctgcctacagggagcaaaataagacacatgtcctgcgggaagtccatgtggtggaagatcagagcagctacaagggcatgcagaagtggaaggtaccccacgaaggacactacacaatcattgccaaaggcgccagtggaggactgggttcgggtggcgtaggcagctctcgaggatccgtggctgtggccattctggaacttcacaaaaatgaggaactgtatttcctcgtgggacagcagggcgagaacgcctgcatcaagtccatgggagttctgaaggaagctggttgcggaaccgatcacgacttggacttagcccaatatagcttccgttccaaacaggatatggtcaagaatatctatatcgaaaatggtgccggcggcggtggtggtggctcctacgtgttccttctcaatcaggccaaaaatgaggcagtccctcttttggtagctggcggtggaggaggtctgggaattggccaatacattgatgaggacttccagcatggtcaaaaggcgaagccccttcaggctccagaaagtggacagatcaatggagagcccttgaataagaagacagctggtccaggtggtggatggagagccaaagaggaccaggccctgagtcccacctatggagctgcccttctccagggcggtcgaggtggacactcctgttatgtggaacttgcggacaatggaacttctgttcacagacatggccaaggtggatttggtggtggcggtggtggctgcaatactggaggaggcggtggcggctacgctggcggagatgtctacctaaccgagtcgaatggcgagggcggaagttcgtacatcagccccagtcgaagtcttcgggaaattagtgaaatacatgccggcgctagcagtggaccaggtgccatcatcattattccggcaatcgagggctgtggatgcgactataggtgcgtggccttggatgagttccgatcgaaggtgcggtgcatctgcccagatggctggagcttaaaacgggacaatcacaccgcctgtgagatccgcgaggaggcgggcaagtcctccttccagtatctggtttccatcctaatgatctcgcttgccgtgctcttcatctgcatagctgcgctcatctttatgctatataatcgctatcaacggaagaaacaatcgaagaagcgccacaagatgctcgtggagcaggatcttcaacttacccgtttgcgcaacaatatcgacgactccaatctgaataactttaaccccaactatggatgtgatggtattctcaatggtcacattgatgtcaatagcttgccccaggtggcacgcgatagtctgcaattggtcaatgctctgggcaaaggtgcttttggagaggtatatatggcattatatcgccatcgagacggagatgctgtggaaatgggcgtggcagtgaaaaccttgcgggaagatcccaagcgggaaaaggaggaggatttcctgaaggaggcggccataatggccaagttcaatcacccgaatatggtccatttaataggagtctgctttgaccgtcagccgtattatattgtcctggaacttcttgctggcggggatctacagaagtttttgcgcgaaaacaggaatactccagagcgtccctccctcttaaccatgaaggatctgcttttctgcgccctcgacgtggccaaaggatgtcgctacatggagagtaaacgcttcatccatcgggatatcgccgccaggaactgtctgctgagcagtaagggtcctggtcgcgttgtgaaaatcgccgattttggcatgtcccgggatatctaccgatcggactactatcgcaagggaggcaaggcgatgctacccatcaaatggatgccgccggaagccttcctcgatggcatattcacctcgaaaacagatgtctggtcctttggcattctcctgtgggaagtcttcagtctgggccgttcaccatatcccggccagcataacacccaggtaatggagctggttgtgcgtggcggtcgactgggatcgcccaccgagtgtcccgtctccatatacaaggtgatggccgactgctggaatcccacgcccgaggatcggcccacatttattacgttgctggagcatttgaccgcctgcacccaggatgccagcataatgaacgctcctctgcccaatattctgggacccacagcctccgaacgggacgacacagtcatccggccgcccaatggcgaggagttctgtttggcggtgccggattatctggtacctttgccacccggcggcagcaacaatccatcgatggccagtggttcgggctacgtgccagaattgcaacgccagcagatgagctcctgcactccgccggcggtcacatcgcccgccgcaccacatccaaggccggtggagaatatcgcaccgaccagcggagattgctgggagacgtcatttatactacctaactcgaaggtggaaccaccagtggttggaagtggccacgatgttccattggccggcggtgaggaggccaaactgatcagtttggacacaccacagcccacaccaacgaccatccaaccaccgctgtccttcgcctcgcagcttgatggcatcacattggatccctcggcactgaccaagagtttgcccaacggaaatgccaagcagtcgtatgccaatgttcaggtgaaaaacgaagccgaggccaaggtcatcaatggtgtggttggcaatggaacggtgatgaacggggacgtctcgacgggatcgggtggtgccgattcacctttcaccattcagggttacgcggagcgatacaaggacaacaacaatcattccgaaatcagttgttaa

SEQ ID NO: 18063 - protein, 1701 aa, DROSOPHILA
MPQLRQLVVVLAILSLLVDPSFAQRPLIMNHTFSSLPMSQHPSFNSWPSASGGKQLRNGRLHEQPLPLPQPTLPVATQYEDYEAAPPGSRRDNKRRLAQMAQRPGSGNGGRRGMESLRKELMNPSVGGPGGGISGGGSGYPSYSATSSIGRIDGLGQGLGSADRYGALYDQLRQPSGMAAMTAGPLGGPYSTRFPPLYAGVDDQPKRSNRKNSISELYKLKKALNQADEPAGGVTHGNFEGDPQPSSADPLQEIKDRIRDTSPNANTYAPHTDATPSSEYEYELGVKCNFETPCSWTWGNYSDGFQVITGTELSKRNLTGLLPGPAADSIDDANGHFLYARVNPSSRPLNLTSPEFSTTMEKCFLEVYMHQSDMSHGLSRVVVELLHTAESSWVPAEILGDNVRQWTRKVYRLGRVSRDFRIVFEVVPDLRVGQKGHVALDNLRMVNCFPEGTKSEKCSTSQVKCTSSKVPVCIHLPRICDITRDCDEAEDEQQSCDKIPYGGRCDFEEDWCGWRDSGKTTLTWSRHTGSSPTHDTGPDGDHTMQHLQNNTSGYYMLVNMNQHMNNSEKNSIIGFASNAIMVSKTFNPPPSVHGNPDSPYRNSCVVRFFIHQFGKNPGSINLSVVEMKEKENITTTLWWSTKNQGSDWMRAEYVLPNITSKYYLQFEARMGMRIYSDVAVDDFSLSPECFGLNIPEDHLGGYNYWDVRQNLKSPTYKDFEYTNYLELTTCDTRGMIGPSQAQCEAAYREQNKTHVLREVHVVEDQSSYKGMQKWKVPHEGHYTIIAKGASGGLGSGGVGSSRGSVAVAILELHKNEELYFLVGQQGENACIKSMGVLKEAGCGTDHDLDLAQYSFRSKQDMVKNIYIENGAGGGGGGSYVFLLNQAKNEAVPLLVAGGGGGLGIGQYIDEDFQHGQKAKPLQAPESGQINGEPLNKKTAGPGGGWRAKEDQALSPTYGAALLQGGRGGHSCYVELADNGTSVHRHGQGGFGGGGGGCNTGGGGGGYAGGDVYLTESNGEGGSSYISPSRSLREISEIHAGASSGPGAIIIIPAIEGCGCDYRCVALDEFRSKVRCICPDGWSLKRDNHTACEIREEAGKSSFQYLVSILMISLAVLFICIAALIFMLYNRYQRKKQSKKRHKMLVEQDLQLTRLRNNIDDSNLNNFNPNYGCDGILNGHIDVNSLPQVARDSLQLVNALGKGAFGEVYMALYRHRDGDAVEMGVAVKTLREDPKREKEEDFLKEAAIMAKFNHPNMVHLIGVCFDRQPYYIVLELLAGGDLQKFLRENRNTPERPSLLTMKDLLFCALDVAKGCRYMESKRFIHRDIAARNCLLSSKGPGRVVKIADFGMSRDIYRSDYYRKGGKAMLPIKWMPPEAFLDGIFTSKTDVWSFGILLWEVFSLGRSPYPGQHNTQVMELVVRGGRLGSPTECPVSIYKVMADCWNPTPEDRPTFITLLEHLTACTQDASIMNAPLPNILGPTASERDDTVIRPPNGEEFCLAVPDYLVPLPPGGSNNPSMASGSGYVPELQRQQMSSCTPPAVTSPAAPHPRPVENIAPTSGDCWETSFILPNSKVEPPVVGSGHDVPLAGGEEAKLISLDTPQPTPTTIQPPLSFASQLDGITLDPSALTKSLPNGNAKQSYANVQVKNEAEAKVINGVVGNGTVMNGDVSTGSGGADSPFTIQGYAERYKDNNNHSEISC

SEQ ID NO: 18064 - DNA, 3716 bp, DROSOPHILA
cgtagaattatcgccaccagttggaaggaagcaacacctgttgatcatttttgaacttttctacttgtagctctcctacgcctattaagcatatttttcgagtaatattcctaatatttgtataattaccttatttaaaatcctaaacctgagttacgtactgatgtccggacctggttagaccactttgccatttgctaataatcaataactaagataggtccggtttagagtttctaataccctataaattaacagttagaaaaatatttaaaaacggggtcgaataaaacttaaaattgtttaccaaataaaaataaaaacataaaacattaaagggaaattaaaaataaaagaaccttaaaaaattaatatattgtattgtaaaattaaaaaacatttttaaaccgctatttgtaatactaattaaaatctcccatacaggaggatatacacaagaaacaaaaaaaaaatattaaaaaaccgaatctcattagcccagtggattggtcagtttcccagacttttttgacatggctgatgatccagaaaactcagtggataggcccacagacgacggagatgccggcaaaccggaaaaaatgtttacgctgaagaaatggaacgcagttgcaatgtggagttgggatgtggaatgcgatatctgtgccatttgccgtgttcaagttatgggtgagcaataccactgatttcaaaactctaatcttgagtattaataataataaaaggtcctacatatgtaacaatatgtaactagaatattattatactggtgtctttgttaacactatcttgtgcatatcgcaagcgaaaatgttttttactcacatatacataagtgcctaaaaactttcaattggtgtatttttcaacggtaattttgatttattgcgcttgcctaaaaattcacaatttaagcacgaagacaccaccctactatttggtttgaacgcatctcagatccttagcaacacgccatttacatgttgaaaggaaatggcttgatgttgaccaccgaggacatgggcacacggcccatcatctttcgctcaatttcctccaacgacttgccccgcgtttcgggcacaaaaataatcacaaagaacagacccacgatgcagatggcgccgaatagccagaaggctccatgcgcgcccatagcaactacacacaaaaatattaaatattattacaccacttattttagttagttgcactacgcacccgtgaggtcctggaaggtcttggttaccacaaacgtgcagaaccagttgaaagccgtgaccaccgatgcagccggtcctcgaatcttggctggcagaatctcacccatcatcagccagggaatgggtccgaagcccagggagaatcccagaatgtagataacgaagcaagtgagtggcaaccaacccaaatgggacacatccggaccatgcgccttgcagtagaagaagccgcccagaatggacagggtcacgatcatggcgatgtcggatacatacagaagaatctaaaaattacgattagtaaacaatgattttcatttatatgcatctttaaacccacctttctgcccaaccgatcaatcagaatgatgcccataaacgtagcaaaaaagttaactacacccacgatgatcgtggaaagattgctatcaattgtggatcccgcatccttgaagatctggaccgtgtagaaaataaccgcgttgataccgctgaactgttgaaagaacatcagacccaaggaaatggaaagtggcttcagattgtttcgcttaaacagctccaaacaggtgttctgagtggcctgacgatcggcatcggcctgagattgcatcaactcctttagttcgggctccacatccgcctccttgccacgcagccatttcaaagccttcctggcgcgctcttcctgaccacggttcacaaaccagcgcggagtttcggggataatgatcatcaaaatcaggaagggaacgggcagagcagctcccaagaaggccagcatcgaccaattcataaaggatcccgccacatagcaaaccaggatgcctatgttaccaagagcggtgggcagcaaacccaaagtgccccgcacttccggctgcaaagtctcacccaggtagacgggcagggataaagaggcaatgccaacgcagaatccagttaggaatcgtccgcacagaatcatgatcacattcacagcacacgcaatcagcagtgatgatacgatgaagggcaccgcagtggccaggatggtgctgcgcctgcccagatattcgatcaagggtcctcctgttatgccacctgctaatgcagccagtggcatgatgccaccaacccaggaaccctgcaatagtatagatttcaagtgattggataggggtttagcttcgtttgggaatagaaatccgattttcgctggaaaagtgtgcctttgaaacgctctgttgaaattatctgaattattcaacatatcactgggacttattagcttcgaattagcttatctgcgaacaaagagttaacaaaacttacagcatcttttgtgacctcaaaggaggtgatggtccgatcggtcatcgacacaagtgcaggcgacgtgtaagcgctgacaaatccgaccaccaaggagcacagcgagacactcagagcagccaaaacctggaaataggaaggaaaacgattttaatttgtaaggctcgcagttctccaaagtatttttcactaatgtaaaggaggcacctgggaaaaggtaaaattggccttgagcccatcggcgggcacggagaaggacacatgggtgtccgctcgcatcaggatcttcattgcggcactgtatctttaaactgaatcacgaactgaaatcgttttttgctggcaacgaggcggtgaatgtagctaatacagctttagctcgtcaaaactcaactgaatattgttgttattccctgtcactaatttttaatattcgagaatggttttttgacgtgatttgtaaggaatcgtcacattgtgcataatccttaggcgagacgtaatagtgctcgtcggctatgggggtgatgatcttgctcgaattcactgatgacttttaataatgataataagatatagcgcgggcgaacccaagtgacaggaaaacctctatagtatagtttatatatatactacaagaacactacatttcgatcgaaccgtctccaagattgacgatcgacggaaattctgtttccaagtgtgtttgatcaagaccgagcttatcagtttattttgaaaagcagtttcaggctgttttcagcgaagccgcagcgaagctcaaatgcaaactgcaactgcaactgccaaatatcagaagttgaacagaagttgcagggtcaattgtcagagtttacctctgctaaacacacaatatattcggatccgatccatcattattaacattttgatagatactaagaaatgtaatgaatctttattcgttatcatcatctattatgcactttctttgcgtcactacgagtgacctattattagctgacatttctattatatgaagatctgattgcattaccggttgcaactgattcaataaatgacaagactcagcattaataagtacgaataccaaaaatatcacccacaagtaaacaataaataaattagattaacacataatcgcccagccatcgc

SEQ ID NO: 18065 - DNA, 1412 bp, DROSOPHILA
attaaaatcgttttccttcctatttccaggttttggctgctctgagtgtctcgctgtgctccttggtggtcggatttgtcagcgcttacacgtcgcctgcacttgtgtcgatgaccgatcggaccatcacctcctttgaggtcacaaaagatgctggttcctgggttggtggcatcatgccactggctgcattagcaggtggcataacaggaggacccttgatcgaatatctgggcaggcgcagcaccatcctggccactgcggtgcccttcatcgtatcatcactgctgattgcgtgtgctgtgaatgtgatcatgattctgtgcggacgattcctaactggattctgcgttggcattgcctctttatccctgcccgtctacctgggtgagactttgcagccggaagtgcggggcactttgggtttgctgcccaccgctcttggtaacataggcatcctggtttgctatgtggcgggatcctttatgaattggtcgatgctggccttcttgggagctgctctgcccgttcccttcctgattttgatgatcattatccccgaaactccgcgctggtttgtgaaccgtggtcaggaagagcgcgccaggaaggctttgaaatggctgcgtggcaaggaggcggatgtggagcccgaactaaaggagttgatgcaatctcaggccgatgccgatcgtcaggccactcagaacacctgtttggagctgtttaagcgaaacaatctgaagccactttccatttccttgggtctgatgttctttcaacagttcagcggtatcaacgcggttattttctacacggtccagatcttcaaggatgcgggatccacaattgatagcaatctttccacgatcatcgtgggtgtagttaacttttttgctacgtttatgggcatcattctgattgatcggttgggcagaaagattcttctgtatgtatccgacatcgccatgatcgtgaccctgtccattctgggcggcttcttctactgcaaggcgcatggtccggatgtgtcccatttgggttggttgccactcacttgcttcgttatctacattctgggattctccctgggcttcggacccattccctggctgatgatgggtgagattctgccagccaagattcgaggaccggctgcatcggtggtcacggctttcaactggttctgcacgtttgtggtaaccaagaccttccaggacctcacggttgctatgggcgcgcatggagccttctggctattcggcgccatctgcatcgtgggtctgttctttgtgattatttttgtgcccgaaacgcggggcaagtcgttggaggaaattgagcgaaagatgatgggccgtgtgcccatgtcctcggtggtcaacatcaagccatttcctttcaacatgtaa

SEQ ID NO: 18066 - protein, 433 aa, DROSOPHILA
MTDRTITSFEVTKDAGSWVGGIMPLAALAGGITGGPLIEYLGRRSTILATAVPFIVSSLLIACAVNVIMILCGRFLTGFCVGIASLSLPVYLGETLQPEVRGTLGLLPTALGNIGILVCYVAGSFMNWSMLAFLGAALPVPFLILMIIIPETPRWFVNRGQEERARKALKWLRGKEADVEPELKELMQSQADADRQATQNTCLELFKRNNLKPLSISLGLMFFQQFSGINAVIFYTVQIFKDAGSTIDSNLSTIIVGVVNFFATFMGIILIDRLGRKILLYVSDIAMIVTLSILGGFFYCKAHGPDVSHLGWLPLTCFVIYILGFSLGFGPIPWLMMGEILPAKIRGPAASVVTAFNWFCTFVVTKTFQDLTVAMGAHGAFWLFGAICIVGLFFVIIFVPETRGKSLEEIERKMMGRVPMSSVVNIKPFPFNM

SEQ ID NO: 18067 - DNA, 5866 bp, DROSOPHILA
tcgctgagccactcggatgtggtggcgtgctccgggaagggaatgtgtttgggcatcgctgtggccggtgtctgggattggccctgcttggttgccagcaggtgggcgaaggaatcatgtgtttcgctagagctgctgccatcactactgcgctcgtcgtaggtcatatcgattggttcaattgcttgtaccgggagctacatttaaataaattcaagccacaatgtttttgtgcggttggaggaccaaactttgcatcatttacagcactttttctggctcaaaagcagtgttgagcaccgtagaatgttttgagttcataaaaaatgggcgactcctcaacatattaaacggggaataaagatacttcattttatatattttattaattttcagataaatgtgtatataacatattgtttaatatgtgggcggtgttcataaaacagtaaacaaagctgccataaccccttctgatttagcactacacccatgacggcagctgactacgctttgaacgttaatcaacattaaaccggctgtttgtttatcagctgtccagtggttttataactggtccacaaaataatcaaaaatataaattaatatatcgctgtatacatacgaaaatgatgcgctacgagggcaacgagaggctggccgatgagacagcgtgcgcgggagtacgtgcggatctcaagatgtgcctcctggagagcgactgctgcaaaatgggcaaaacgccgcgccagtgcctccaggacaacaacgttccagctgagtgccaggtgctccgcaataccttctacgagtgcaagcgctccctggtgggtctctataaaatatccattattcctaagctaaacatatacccacccatctttcagttggacaaccgacagcgctttcgaggtcgcaagggctactgagttttaaacttaaattatatttttaagcgcttaaaatacaaaaaattacagacataaacgggcttagtccattaattgcgacgtcgacgaacgcgtgagatacgccaggcattgggctcctcgtacttattgtacagtggctccaggcgctgattcttcttgaatttgcttagcttcgtggggtccgagaagcggaagaaggacggagcaaattccaccaaccatttgggatcgatcgttgttacttcacgcatatactccttggtggtctgcaccagctcgtgatagatgacccactctggctggcgattgaagagagcactcgacggatgaatgtaaacgacctgggagtcgaccagggtacgatatccctcctgcggatccttttttgctgcattgcggaagaatccggagcagattgccttctgaatgcgcacagagttttttccagcggatacgacatccaatttgtgcctgtccatgattcccagcagctgcttcctcacatcctggctgcgttttagagttcgtatctgtacgaagttttcgtagcaccaggcatttgagaatttgttgttcttccaactgttgtaaacggccagcagcgtcagatggtcacctgtgcagaaacgatcgttaggaaatgtttcattaatatgataaggattgacttaccttccgcttgattgaatttggcctttttctgatccgccagtgcctgcttgtcctttggcctgtaaaacacgttctgcacactgagcatcgaaacaatagtcaaaatctcatcggaacactgcagagcgacggacattataagcatcttggatagattcggctcgaggggaaactccgccatgcgtctgcccagtcgagtaagcaggccttcgtcatccaatgctgatagggaatgtagttgctcgagcgccatcaccagcgattccacaggcggggcgtccatgaaatcaaagtgcagcagatcgttaattcccattgtctttagttggagtactgttgtggccaaattggttcgctggatttctggcaccggcgtgggcagcatttcatctcgatacgcacgttccgtatagagacggtacgtttttcctgggcctgtacgtccggctcttcccgctctttgctttgctgccgcttgtgaaatgggagtgaccaccagcgagtccatgcccgttttcgagttgtacaccttctgtttcacgaaaccaggatctaccacatagaatatgccatcgattgtaagtgaagtttcagcaatattggtggctataacaacctttcggctgccagcgggcgcaggatcaaatatacgggtctgcatttcggatggcaacgcggagtacaccggcaggataatcagctcggggacatccggtcccaaactcttcattcgctcgtacaaaatttcacaagccgtgtcgatttcttcctgacccgtaaggaagagcagaatgtcaccaggaggttctcgcaaatggatttgcatcactgtaatcagagaagcatccaaatagtccgtctctggttccttggtatataaaacctccacggggaaggttcttccgggaattgtgaagattggcgccttgaagaagtactgcgagaacttcaccgcgtccaaggtggctgatgtgacaattagcttcagttctggtcgcttttgcacggctgtcttcagcaggccgaagagaacatcagtatggattgtccgttcgtgagcctcatccaacataatgaccgaataactttttagctccgcctccattaggcactcacggagcaacataccgtcagtcatgtacttaattatggtttccggactggtgcaatcctcgaaacgaatggtgtagccaacctcctggcctaacctgcaaccgtactcctccgccacacgcttggccaccgacatggcagccactcttctgggttgggtgcagccaatctttcctctagcagtaaatccacattcgcctaaatactgagtgatctgtgtggtttttcccgaaccagtttctccaatcacaataaggatctggttgtccgtgaccgctttgatcagatcatctcgcagtttgtatatgggcaacgactgtcgctgctccactagcgtcagatcagtcttcttaccgaaggaggatttcttgccgccaatgacatgctttttccattctggaacttcaggaggagcagcagccattcctcgcatgttggccgccaggctgcggctctcatcctccggcagtgggtctatccagttcttattgaggctcgttggcatagcttctatctcttgttcacgctgcaacatcttctgctcgcgacgctccttagacaaagccgactgcatcatggcagcttgagccagtgagccatcgggattctttacaattctcactggagacagatcatgtaaggctctaccatgcccggagaggaagggtggctcctcttccacaatctcaatctcgatatcagcttcgtcgtcttcgtctttcggcaataagcctgtttcctcgtcgaaatcaggcatctcacttctgtccaacacaccggaactaatcatttgcttgatttcccagcgctcagggctggagatcctagtcacacgtttcctggactcgtgctcgtcaccttccattccattgccttgcaaattcagcatcgatgtgctgctgctaaaggggccatctggatttcgatctcgtagagactcatcgtcttctggcgcgtgtgacagtggattaagatcctttccagagtcctgatccacctctttcatcgacaaggacactttttgaccagttattgacattactttcactttaacagtctgattccgagtgactacctccgttacatctgtcacgcgtccttctgctcttagttgtgagatgtgtactaagccttcccagcgtttccgcagtccaaaaagctgtacgaagcaaccaaagggtacaatattagctatcttgccggaatagatcttgcccgcctccggatcatcggtcatggcggcagatggtgggggcatcttttcactgcagtccctcgaacgatctctcctatctctccgttctgtggaacgagatcggcttcgtcttcggcgttcgtggtgatctcttgagctggaactcttgtggcgtcgatctctgtcacgatcgcgatcctcgcgagacctgcttctgcggcgattgtctcgggatctgctgcgacgacggcgttccttgtcacgcgatctgcttctgcggcgatcagagtgcctatcctcccgcgacctacttcttctttttgtgtctcgatccctacttcggcgcttgtggcggtccctggaactgacttctttgtgtggtcttaccaatgtggcaccctcgccaggggccagcgcttccagctccatcatagctgcatccacatcgctcatatcggtttttttgtgcgtttcggaatgcttctccggtttcgccttcaccttctcatcgtcatcgctctcctcctttttgctgtaggtgtcattgggcaaagcgaggccgggaaacattttcaaaagttgcgatttcttgtcttccttcttgtcgccgacagttttctcctggctagcgccgccaggtctgctggggcgcataagattaatgatgcgctgcaggttctggaccagggagtctgggaattcggcgccattatccagcaaagccttgcgaaatgtgtcatatgtgcgatttttgttttctaaatcgatgataaactcggccaggtccttgtcgttgatgcccaagtggttgtctagctcagtgcaaatcttcgagaccagcgaaaggtactccaacttctgcagctcgtccatgcctacggagagtactagttcagctaaaatttacaaaatttgtggaaattttagaaaatttcccgctgaaactaaacgtgatcagctgtttctgcacgcaatggtgttgccaggcgcgtaaaaacaacggaacgaggtggcagcactagccccaatcactcggtttctgacgctacgcttaatttcgtcgcgtttttgttgtcaaaactaaaaacaatctctattttaattaaagatacatcgaaatatgtcttcgttcttcgattgcttcaatgattttctgcagagcggcggcaacttagtgcagaatgtgtcccaggagcaggaacagaaaatcgcggaccaggaactggacggcgtcatagagctaatgccgccaaccacccccacgcccagcgagagtgtaagtaacatcctgaataaaggagtaattgctccacttgccccacatcaaatatattcgtttcgttggcgttttgttgtgaaatagaataattatcagcgcggggcgtgaggttcggggtagccgcggtgttgccggactaaagttctactgttagatgtggcaaggccacgtttggcacgccatattttgctagaaagaaaattcgcagttgtgtactaggaaataccagaaaatcaataagaattgctggtaaaattggttaatatcagtgcgaatcgcgagtgacctttgattgggccgtaggctagcgccttgtggcattcccagctgtttcttaccatcgcaagcgcgacaacgacgtagaaaagaagaagaacatcaatttgggggtacccagttaacgcattattaattattaaaaattaactatgaaggaatcgggaagtgtcagcaaaaatcagccgcagacctcagaggccagaggctcgattataacctacagtcccagcaaatttctgactagcgttggaacaggcagaacgacatacagcacacatacacacacaacaacagcaacgtcggcggcgacaaccgcaacaaaaacaaacaatttaccaatgggcggatccagtgccgcttattatgtggtaaaggctggctccctgggcagcgctg

SEQ ID NO: 18068 - DNA, 3810 bp, DROSOPHILA
tcacgtttagtttcagcgggaaattttctaaaatttccacaaattttgtaaattttagctgaactagtactctccgtaggcatggacgagctgcagaagttggagtacctttcgctggtctcgaagatttgcactgagctagacaaccacttgggcatcaacgacaaggacctggccgagtttatcatcgatttagaaaacaaaaatcgcacatatgacacatttcgcaaggctttgctggataatggcgccgaattcccagactccctggtccagaacctgcagcgcatcattaatcttatgcgccccagcagacctggcggcgctagccaggagaaaactgtcggcgacaagaaggaagacaagaaatcgcaacttttgaaaatgtttcccggcctcgctttgcccaatgacacctacagcaaaaaggaggagagcgatgacgatgagaaggtgaaggcgaaaccggagaagcattccgaaacgcacaaaaaaaccgatatgagcgatgtggatgcagctatgatggagctggaagcgctggcccctggcgagggtgccacattggtaagaccacacaaagaagtcagttccagggaccgccacaagcgccgaagtagggatcgagacacaaaaagaagaagtaggtcgcgggaggataggcactctgatcgccgcagaagcagatcgcgtgacaaggaacgccgtcgtcgcagcagatcccgagacaatcgccgcagaagcaggtctcgcgaggatcgcgatcgtgacagagatcgacgccacaagagttccagctcaagagatcaccacgaacgccgaagacgaagccgatctcgttccacagaacggagagataggagagatcgttcgagggactgcagtgaaaagatgcccccaccatctgccgccatgaccgatgatccggaggcgggcaagatctattccggcaagatagctaatattgtaccctttggttgcttcgtacagctttttggactgcggaaacgctgggaaggcttagtacacatctcacaactaagagcagaaggacgcgtgacagatgtaacggaggtagtcactcggaatcagactgttaaagtgaaagtaatgtcaataactggtcaaaaagtgtccttgtcgatgaaagaggtggatcaggactctggaaaggatcttaatccactgtcacacgcgccagaagacgatgagtctctacgagatcgaaatccagatggcccctttagcagcagcacatcgatgctgaatttgcaaggcaatggaatggaaggtgacgagcacgagtccaggaaacgtgtgactaggatctccagccctgagcgctgggaaatcaagcaaatgattagttccggtgtgttggacagaagtgagatgcctgatttcgacgaggaaacaggcttattgccgaaagacgaagacgacgaagctgatatcgagattgagattgtggaagaggagccacccttcctctccgggcatggtagagccttacatgatctgtctccagtgagaattgtaaagaatcccgatggctcactggctcaagctgccatgatgcagtcggctttgtctaaggagcgtcgcgagcagaagatgttgcagcgtgaacaagagatagaagctatgccaacgagcctcaataagaactggatagacccactgccggaggatgagagccgcagcctggcggccaacatgcgaggaatggctgctgctcctcctgaagttccagaatggaaaaagcatgtcattggcggcaagaaatcctccttcggtaagaagactgatctgacgctagtggagcagcgacagtcgttgcccatatacaaactgcgagatgatctgatcaaagcggtcacggacaaccagatccttattgtgattggagaaactggttcgggaaaaaccacacagatcactcagtatttaggcgaatgtggatttactgctagaggaaagattggctgcacccaacccagaagagtggctgccatgtcggtggccaagcgtgtggcggaggagtacggttgcaggttaggccaggaggttggctacaccattcgtttcgaggattgcaccagtccggaaaccataattaagtacatgactgacggtatgttgctccgtgagtgcctaatggaggcggagctaaaaagttattcggtcattatgttggatgaggctcacgaacggacaatccatactgatgttctcttcggcctgctgaagacagccgtgcaaaagcgaccagaactgaagctaattgtcacatcagccaccttggacgcggtgaagttctcgcagtacttcttcaaggcgccaatcttcacaattcccggaagaaccttccccgtggaggttttatataccaaggaaccagagacggactatttggatgcttctctgattacagtgatgcaaatccatttgcgagaacctcctggtgacattctgctcttccttacgggtcaggaagaaatcgacacggcttgtgaaattttgtacgagcgaatgaagagtttgggaccggatgtccccgagctgattatcctgccggtgtactccgcgttgccatccgaaatgcagacccgtatatttgatcctgcgcccgctggcagccgaaaggttgttatagccaccaatattgctgaaacttcacttacaatcgatggcatattctatgtggtagatcctggtttcgtgaaacagaaggtgtacaactcgaaaacgggcatggactcgctggtggtcactcccatttcacaagcggcagcaaagcaaagagcgggaagagccggacgtacaggcccaggaaaaacgtaccgtctctatacggaacgtgcgtatcgagatgaaatgctgcccacgccggtgccagaaatccagcgaaccaatttggccacaacagtactccaactaaagacaatgggaattaacgatctgctgcactttgatttcatggacgccccgcctgtggaatcgctggtgatggcgctcgagcaactacattccctatcagcattggatgacgaaggcctgcttactcgactgggcagacgcatggcggagtttcccctcgagccgaatctatccaagatgcttataatgtccgtcgctctgcagtgttccgatgagattttgactattgtttcgatgctcagtgtgcagaacgtgttttacaggccaaaggacaagcaggcactggcggatcagaaaaaggccaaattcaatcaagcggaaggtgaccatctgacgctgctggccgtttacaacagttggaagaacaacaaattctcaaatgcctggtgctacgaaaacttcgtacagatacgaactctaaaacgcagccaggatgtgaggaagcagctgctgggaatcatggacaggcacaaattggatgtcgtatccgctggaaaaaactctgtgcgcattcagaaggcaatctgctccggattcttccgcaatgcagcaaaaaaggatccgcaggagggatatcgtaccctggtcgactcccaggtcgtttacattcatccgtcgagtgctctcttcaatcgccagccagagtgggtcatctatcacgagctggtgcagaccaccaaggagtatatgcgtgaagtaacaacgatcgatcccaaatggttggtggaatttgctccgtccttcttccgcttctcggaccccacgaagctaagcaaattcaagaagaatcagcgcctggagccactgtacaataagtacgaggagcccaatgcctggcgtatctcacgcgttcgtcgacgtcgcaattaa

SEQ ID NO: 18069 - protein, 1242 aa, DROSOPHILA
MDELQKLEYLSLVSKICTELDNHLGINDKDLAEFIIDLENKNRTYDTFRKALLDNGAEFPDSLVQNLQRIINLMRPSRPGGASQEKTVGDKKEDKKSQLLKMFPGLALPNDTYSKKEESDDDEKVKAKPEKHSETHKKTDMSDVDAAMMELEALAPGEGATLVRPHKEVSSRDRHKRRSRDRDTKRRSRSREDRHSDRRRSRSRDKERRRRSRSRDNRRRSRSREDRDRDRDRRHKSSSSRDHHERRRRSRSRSTERRDRRDRSRDCSEKMPPPSAAMTDDPEAGKIYSGKIANIVPFGCFVQLFGLRKRWEGLVHISQLRAEGRVTDVTEVVTRNQTVKVKVMSITGQKVSLSMKEVDQDSGKDLNPLSHAPEDDESLRDRNPDGPFSSSTSMLNLQGNGMEGDEHESRKRVTRISSPERWEIKQMISSGVLDRSEMPDFDEETGLLPKDEDDEADIEIEIVEEEPPFLSGHGRALHDLSPVRIVKNPDGSLAQAAMMQSALSKERREQKMLQREQEIEAMPTSLNKNWIDPLPEDESRSLAANMRGMAAAPPEVPEWKKHVIGGKKSSFGKKTDLTLVEQRQSLPIYKLRDDLIKAVTDNQILIVIGETGSGKTTQITQYLGECGFTARGKIGCTQPRRVAAMSVAKRVAEEYGCRLGQEVGYTIRFEDCTSPETIIKYMTDGMLLRECLMEAELKSYSVIMLDEAHERTIHTDVLFGLLKTAVQKRPELKLIVTSATLDAVKFSQYFFKAPIFTIPGRTFPVEVLYTKEPETDYLDASLITVMQIHLREPPGDILLFLTGQEEIDTACEILYERMKSLGPDVPELIILPVYSALPSEMQTRIFDPAPAGSRKVVIATNIAETSLTIDGIFYVVDPGFVKQKVYNSKTGMDSLVVTPISQAAAKQRAGRAGRTGPGKTYRLYTERAYRDEMLPTPVPEIQRTNLATTVLQLKTMGINDLLHFDFMDAPPVESLVMALEQLHSLSALDDEGLLTRLGRRMAEFPLEPNLSKMLIMSVALQCSDEILTIVSMLSVQNVFYRPKDKQALADQKKAKFNQAEGDHLTLLAVYNSWKNNKFSNAWCYENFVQIRTLKRSQDVRKQLLGIMDRHKLDVVSAGKNSVRIQKAICSGFFRNAAKKDPQEGYRTLVDSQVVYIHPSSALFNRQPEWVIYHELVQTTKEYMREVTTIDPKWLVEFAPSFFRFSDPTKLSKFKKNQRLEPLYNKYEEPNAWRISRVRRRRN

SEQ ID NO: 18070 - DNA, 3020 bp, DROSOPHILA
gaatttgtatcccaggagctgaccaagtccgatcgccccgagctggccggagccaaggttattgtgtccggaggacggggcctgaagtccggagataacttcaagctgctgtatgatctggccgataagtttggtgccgctgtgggtgcctctcgtgctgccgtggatgctggatttgtgcccaatgatctgcagatcggtcagaccggcaagattgtggctcccgagctgtacatcgctgtcggaatctcaggcgccatccagcacttggctggcatgaaggactccaagacgattgtggccatcaacaaggatcccgaagcgcccatcttccaggtcgccgatattggcatcgtggcagatcttttcaaggccgtgcccgaactaaccggaaagttgtaaggcgagattgtcacttgctgtagtataaagattgtgtaccgatgaattgataactgttgcatttatttgaattttgacataagtccgtggaagattttcccttaaattttgtaataaaacaagccgaagacctattctatgtgaaaattgtagtcttatcagttgagtgcaactgtttaaatcagcaaaatatttaaaaaaggcccagggctagcaataaccaaaattcaactaggataaactgtttactggcattgcagattgcacctagtctaggatttggtttccttatcagtttcccatcgtatatttatttttcaagaagcttttatgagagctttattaattaaattagttatactagaaagctgatcaagccaaaacaaattgtagctaaaagcatcaaaaagctttctcgccaattgcgaacttttttaaaaagtgtgaaaatgtgaaaactgtgtacaaaaaaagattatagatcaaatcaataggatttttacgcttaataaacaaaatgtttaggaattcgtaaatcgttggtatatttttggtacaatcaagttaaatataaatcgcagaatcataaaaactagaattaggccaaaaactacgcctataaccaaagtggtccactctaaaggattcaggctgttggtagtgggtaaaacgtgtgtgttgatgccactctaaaatggaaaatcattgaaatgaaacctcgacaattatgaaatgatcggagaaactcacccaaccaccattctcgttaatccacggaaccagctcatcttcgatcacctcggaaacgctctccatcaacttgggcaagtattccggatgtccttggcgtacacaatcaacggacagcccaccggcgatggcgaacagagagatcaccttgctccacgtaatctccacccggaagagctcgcgaccaacggctcccaaaagcaagctcacagcatccggagtatggaactcaccacccggattccggcaaatctgacgagctactccgttgtatatccggggatgcatgcgctccagttcatcgcccagcttgggcaaaggtgtgtaaaatgattaatataataaaataaagcgttattttttgcttaccacttggaccgctggaaacacatcgcgcacaatgcccatggaggtggagcccagtatgctacgtatgcgctgcagtcccagctttttgttgaacaaaccagatcttctgaggcgtctcttgatataatgaccgcacaggcaacgacccttcggtttttttatgatttttggaatcaggcgatattatatgtttgtgcaaggaattcctcgtctaccagctcacctgagaaatgatatcctgcgctggaatctgtgccgccttccagccaatcgtgtaggagagtttcctggtgacggcatcgctgacattactcaacctacgcctcgtggtctccttgggaccaccaccaacctccagtagtgatgcggaatgtagtgtggctggaaaactgaactttcttcgattctgggcctgcaagaggcgctcactttgtgtggtggccatcggaaatccgttgctgaaattatcgttattcgtgggatacgaggtgccgggcatgtttcgcgcaaccgatatcgttcgagatcctgagggaaatcgcctataagtatggcaagaggtggcgagacttaagtcatatatcaactggctgaggatccagtttaagtttctaacaatcccccccacgaagattggaaaatggagtgtgttgttaatttaataaattgcattcaatttggcaaatcttccgctgggaatcgtagccagctgaatggaaaaccagtcattcagtcgcacagttacatcaaaaataattggctcactatataaatgtcatgtttagctgattgaaagaccataaacgtggctcaaaaacatatataatatatcataaaagatatgcgttattattataacgaacatttagatggattctttataagccattatattttgatctgaataaacctgtttagttcttgtatattgatcgaacatttgatattaactaactatgatttcccaaaaatgtgcttaggaacaatgtttccccctgtttagtttccattatgacgctctgcgatgactgtttgtttgagcctgcccaaaatgggcacattaacggacagattgtcggctcgttaggtttgattggcttctggctaacagcgatcagaaatccgcaatatggccaaaatgctgctgtgtcgcagctgttgtcattagttgtccacaagcgagatgtcaaatggcaagtgatttgtgggacaatctgactggagctggtggtgcggcaagtgaatcgaagatgcaactttggaacttggctacttattccccggagagcacttcgcaattagctttacataacctgacccactcaagacccattcgtgaccatggaaagtctgttgagtacatcgaagtcgtgtggcattttttttttttttggggacccgaccattaaaagtgatagctgagaaagtgtgaggttccagaataatttggccttaaattaatccaggccataggagtcacgcccaaacgcctcagctta

SEQ ID NO: 18071 - DNA, 744 bp, DROSOPHILA
atgcccggcacctcgtatcccacgaataacgataatttcagcaacggatttccgatggccaccacacaaagtgagcgcctcttgcaggcccagaatcgaagaaagttcagttttccagccacactacattccgcatcactactggaggttggtggtggtcccaaggagaccacgaggcgtaggttgagtaatgtcagcgatgccgtcaccaggaaactctcctacacgattggctggaaggcggcacagattccagcgcaggatatcatttctcagggtcgttgcctgtgcggtcattatatcaagagacgcctcagaagatctggtttgttcaacaaaaagctgggactgcagcgcatacgtagcatactgggctccacctccatgggcattgtgcgcgatgtgtttccagcggtccaagtgctgggcgatgaactggagcgcatgcatccccggatatacaacggagtagctcgtcagatttgccggaatccgggtggtgagttccatactccggatgctgtgagcttgcttttgggagccgttggtcgcgagctcttccgggtggagattacgtggagcaaggtgatctctctgttcgccatcgccggtgggctgtccgttgattgtgtacgccaaggacatccggaatacttgcccaagttgatggagagcgtttccgaggtgatcgaagatgagctggttccgtggattaacgagaatggtggttggtttttggcctaa

SEQ ID NO: 18072 - protein, 247 aa, DROSOPHILA
MPGTSYPTNNDNFSNGFPMATTQSERLLQAQNRRKFSFPATLHSASLLEVGGGPKETTRRRLSNVSDAVTRKLSYTIGWKAAQIPAQDIISQGRCLCGHYIKRRLRRSGLFNKKLGLQRIRSILGSTSMGIVRDVFPAVQVLGDELERMHPRIYNGVARQICRNPGGEFHTPDAVSLLLGAVGRELFRVEITWSKVISLFAIAGGLSVDCVRQGHPEYLPKLMESVSEVIEDELVPWINENGGWFLA

SEQ ID NO: 18073 - DNA, 4369 bp, DROSOPHILA
gggctcagtgcaatgatacagcatgtgtccctggtgttccttcttgtgcagaatcaagcgtttctcctctcgaaactcgtcggcgcacaagtcgcacttgtatgtggtcaatggcggctcctgaaatcattgaatacaacttaacttacactcctgtttaaaccttaaacccaaactcacttccaaagctttcttttccgtttccgggggttgctggacattttcggtgaaggtatggaataccaaggttggcggtgcctgttcagcgactattggggtattttgtgcactcaaattggtatcacatataatcatctccggcggctccaatagaagttcttccagctccagctcctcttcctcatcttcatcgacctcgtaaacaggtttcctgcgatctattttcttccaagttaccagacttttagaacgccacttattgtcggctataatgcaaagtgctcggaaggagtggaacttctccagaagctcgtagcactccgagcaaatttcgctgggcaaaatatcctggtcatcaggatccaccaccaaatttgtgcactccgaaaatttgacggcgagatatggatggtgcagcaaattgtaggcctcgtcgtctctagccacatcgctggagcatacgcggcatttgtccaggtgtcccattaagtggttgaatcaaagttattgagacctttttttaaattcacaagaaaaaatatttttctgtgtcctgtctgccgttttttcttatcgctgttgtttgtatactaaacagctgatagggctggcaaaaataccgctgatagcaatagtgatggcaaataatagcgtgagttggaaggggttaaataaatatagtataaatgtttaaaaatatctactgtaagcataccacaaataatgttaaatacatttatatttttaatccttgcacgtacaataaatgaaattaatcgtgacttaaaacagcttgttactcgtggcacatctctagcaccctgtgctaaagtcacatctctaatggggggtgtataaaaagttgtgctgttgcagtttgttatttatttttttccagcacaacaatggataattccaatggaatccactacattgagctaaccccaaatcccatacgatttgatgctgtcagccaactaaccaatgtgtttttcgatgactccaacaagcaggtatagttaaaacatgttaaaaatccatgttgatgatggctaaaaatctatatctgtaaagatatttgctgttcggtctggaggagctactggtgtggtggtcaaaggtcctggatctcccgacgatgtcgtcatctccttttgcatgagcgaccgtggcggtgccataaggtccattaagttctcgccggacaaccaaatcttggccgttcagcgaaaggagaattccgtggagttcatatgttttcagggagatcagcctctgctgcaggacatcattacccaccaggtgaagactctgatccatggctttgtttgggtccacaatcgagaggtggccctgatttcgaataccggcgtggaggtctacaccgtagttcctgagaagcgacaggtgcgctctgtgaaatccctgagcattggcatcaagtggttcgcctggtgctgcgatgccaatgtggctctactgtgcaccagcgaaggaaactccctgattccggtgctggtcaagcagaaagtaatcaccaagctgcccaaagtggactgtaagtaatccttttgggttaaaatcctttaaaagcgttttaatctttcctttcagtgggcaatccaagtcgcgatgtccaggagagcaaggtcaccttaggccaagtttacggcgtgctggctgtgcttatcctccagtcaaatagcaccaccggactgatggaagtcgaggtgcacttgctcaatggaccgggcttggctccacgcaagtgccatgtgctccgcttaagtctgcttggtcgcttcgccatcaacacggtggataatctgattgtggtgcaccatcaagcttcgggcacttcgctgctattcgacatctccctgcccggagaggtgatcaatgaaataacctatcatacacccataactccagggcgctccatcaaaccgtttggcctgaaactgccctcactttcgcctgatggacaaatcttgcagtgcgagttgtgtaagttctttaaatatccaaaaagttactttatttgacacttatacccatgcagattccacgcactgggtactgttccagccaaatattgtaatcgatgccaagttgggttgcatgtggtttttgaacctctgcattgaaccattgtgccaactgatttcggatcgcattcgacttacagaattcctgctgcaacgcagcaatggcaagcagatgctattaaaagtcattggacaattggtagatgatcagtataagggaactctattgccagtcctagagaccatcttcagtcggattaacaagatctatgcgtaagttaaagacgttattttcatcaatatatatttattacattatgcatggtatactttaggtcttgggtccagttggagctgcaaaatcaaaccgctcaaccgtcgaacgtaaaaactactaccctgaaacagagcacaccgcccattgtgctcattgagcaactggatatggtgcaaatctttcagcgcatagctcgtcgcccgtacacggaatccatattgatgctctacctgcaatccctgaacaagttcaacattgccgcccaggaggagctgagcaagatgatcatcagcgagctgatctccaatcgcagcttcgacaccttgcgacgcttggtcagctattcaatgctgctggaatccaagtcggtggcttgctttttgttgtcgcattcaaatgtggatacggcgatatcccaggtggccatcgatatgctgggcaggattgaagcacatgaggtggatataactataattagatatttttactaagatgtatgaactaacaatattttttagatcatcattgaagtaatgctgggtcaaggcaaagttattgatgccttaaggctggctaagaattcaatgggtctggaaaaagtgccagctcgcaagtttctggaggcggctcataagacaaaggatgatctaatattccacagcgtataccgctttttccaaatgagaaacctgaaactttatgaaaccctatcttttcccaagggtaagctaatttgtaatcttgaattgcggcatcactttttaaacctttgaatttcttatttaacagctgaacaatgcacggaattcatacagcattataataacacttttcctgctgataatcctaccagacagcctgtaagctaaaggaaaaatggcaatttgtgattaatataatttaaagtgtgctttagaaagtataaacatactgaagtataaacatacttttgtattgaattgtaaatatatccaattgaaatgatgatcattttatacgaaagtaaaggaatgactcaaacaagaaccataaaaatacggatttttcatgcaatttttttacttacacatacaatacacatagttgtacaataaatacatagaggaataaatggaatatacaaaaaggacgatgaaactatataaatcgcctgggcggtgccttcagttgcaaggcacccatttccaaggacgaggaaatgctgattagatttttatttggccgcggcaaaccaatactttgatctggaatggccgtaaagcaccgtggacattcttcaaactgagtctccgactcctccatgcactgctcgtgtatgccatgcccacatccgccaaatattagcacctggctgtgatcgtacagcctttggcgacacatggagcactttgtggtggtcacccaaagtccacgatgcgcatgctgatagcgcttgacgaacttcaggtgaagatcttgacacagggctccagcagatgctcgcaaagcctccgttttgtgcctcgaactgtccagcatacccattagaagatcctttatatcaccgaaactagttgacacattgtgggtattcataatcaattgaaccaaattatgcagatcgatatgctgtgaggcctcgtgcagcagagatttggtaatggactgaagctcctgatgcggcagaatatattgcaagagagcgaaccaacagcgttccagttcctgggctggtaacgtttccacagaccgagccaaaagagccgatatagtctgtgcctccttggctgcttcctcgccagcagcggacttaagcagttccatggacaactcaaaggctttcgcatagctctcttgcttttcatacagataaatcacagatcgg

SEQ ID NO: 18074 - DNA, 1945 bp, DROSOPHILA
cctgtgctaaagtcacatctctaatggggggtgtataaaaagttgtgctgttgcagtttgttatttatttttttccagcacaacaatggataattccaatggaatccactacattgagctaaccccaaatcccatacgatttgatgctgtcagccaactaaccaatgtgtttttcgatgactccaacaagcagatatttgctgttcggtctggaggagctactggtgtggtggtcaaaggtcctggatctcccgacgatgtcgtcatctccttttgcatgagcgaccgtggcggtgccataaggtccattaagttctcgccggacaaccaaatcttggccgttcagcgaaaggagaattccgtggagttcatatgttttcagggagatcagcctctgctgcaggacatcattacccaccaggtgaagactctgatccatggctttgtttgggtccacaatcgagaggtggccctgatttcgaataccggcgtggaggtctacaccgtagttcctgagaagcgacaggtgcgctctgtgaaatccctgagcattggcatcaagtggttcgcctggtgctgcgatgccaatgtggctctactgtgcaccagcgaaggaaactccctgattccggtgctggtcaagcagaaagtaatcaccaagctgcccaaagtggacttgggcaatccaagtcgcgatgtccaggagagcaaggtcaccttaggccaagtttacggcgtgctggctgtgcttatcctccagtcaaatagcaccaccggactgatggaagtcgaggtgcacttgctcaatggaccgggcttggctccacgcaagtgccatgtgctccgcttaagtctgcttggtcgcttcgccatcaacacggtggataatctgattgtggtgcaccatcaagcttcgggcacttcgctgctattcgacatctccctgcccggagaggtgatcaatgaaataacctatcatacacccataactccagggcgctccatcaaaccgtttggcctgaaactgccctcactttcgcctgatggacaaatcttgcagtgcgagttgtattccacgcactgggtactgttccagccaaatattgtaatcgatgccaagttgggttgcatgtggtttttgaacctctgcattgaaccattgtgccaactgatttcggatcgcattcgacttacagaattcctgctgcaacgcagcaatggcaagcagatgctattaaaagtcattggacaattggtagatgatcagtataagggaactctattgccagtcctagagaccatcttcagtcggattaacaagatctatgcgtcttgggtccagttggagctgcaaaatcaaaccgctcaaccgtcgaacgtaaaaactactaccctgaaacagagcacaccgcccattgtgctcattgagcaactggatatggtgcaaatctttcagcgcatagctcgtcgcccgtacacggaatccatattgatgctctacctgcaatccctgaacaagttcaacattgccgcccaggaggagctgagcaagatgatcatcagcgagctgatctccaatcgcagcttcgacaccttgcgacgcttggtcagctattcaatgctgctggaatccaagtcggtggcttgctttttgttgtcgcattcaaatgtggatacggcgatatcccaggtggccatcgatatgctgggcaggattgaagcacatgagatcatcattgaagtaatgctgggtcaaggcaaagttattgatgccttaaggctggctaagaattcaatgggtctggaaaaagtgccagctcgcaagtttctggaggcggctcataagacaaaggatgatctaatattccacagcgtataccgctttttccaaatgagaaacctgaaactttatgaaaccctatcttttcccaaggacagcctgtaa

SEQ ID NO: 18075 - protein, 619 aa, DROSOPHILA
MDNSNGIHYIELTPNPIRFDAVSQLTNVFFDDSNKQIFAVRSGGATGVVVKGPGSPDDVVISFCMSDRGGAIRSIKFSPDNQILAVQRKENSVEFICFQGDQPLLQDIITHQVKTLIHGFVWVHNREVALISNTGVEVYTVVPEKRQVRSVKSLSIGIKWFAWCCDANVALLCTSEGNSLIPVLVKQKVITKLPKVDLGNPSRDVQESKVTLGQVYGVLAVLILQSNSTTGLMEVEVHLLNGPGLAPRKCHVLRLSLLGRFAINTVDNLIVVHHQASGTSLLFDISLPGEVINEITYHTPITPGRSIKPFGLKLPSLSPDGQILQCELYSTHWVLFQPNIVIDAKLGCMWFLNLCIEPLCQLISDRIRLTEFLLQRSNGKQMLLKVIGQLVDDQYKGTLLPVLETIFSRINKIYASWVQLELQNQTAQPSNVKTTTLKQSTPPIVLIEQLDMVQIFQRIARRPYTESILMLYLQSLNKFNIAAQEELSKMIISELISNRSFDTLRRLVSYSMLLESKSVACFLLSHSNVDTAISQVAIDMLGRIEAHEIIIEVMLGQGKVIDALRLAKNSMGLEKVPARKFLEAAHKTKDDLIFHSVYRFFQMRNLKLYETLSFPKDSL

SEQ ID NO: 18076 - DNA, 3400 bp, DROSOPHILA
atcctgcagataatcacgatgatcctccgcctgttcgtgcgccgtgtggtagaaaaccagccagccagagataaatgctagcaatatttcgacaaattcgaatttgattcgttcctgcacttcttggatgcgcagcacatagctcagcgactcctggatatactcgcgttcatgcatccccaaactggcgtcagcctacaaagaaagaaattatattaatattaatactattattcgaatgatatagcactaaattacaaatatgcgaccacaatccaagtgtgtaaaactatttattcataaaactatgccatttcaaagtgaagtggtaccttttaggtttcaaaaaacgtttctattttattatttttacattgcacaacaagttctgagtttaaacaatagcttttcgatggcaattgcaaaaaataaaaattttgaaataacttacctcctgtattgtgttttcgggctttttagttgacatattgaggaaacgctcctgcgattgacaaaatttctccgtctttttatcaaatttctttttgttttctttgacgccaccgatttgcttttttcgaaaatcctccagtgactcaataatatgtttatcggcgagcgttagctagttggtaattgttaatagattgttcagattctcactaatttggaaaccaatattatatgacccgatcagacaagccaacttaccattttttcgcgctcatcttcaatattgccaattatagcaccaaatcgcttgagactttcacaaatgacattctcatcgtcggtctgagcagtgccaatgcactcaaagttaaaatcgttaagtaaaatggccaattgtttcattcgagtggacaggactgaaaaagtatttaaatgcaatttgacaaaccattgaaataaatatgaaagcaaaagggaaaacatcaaacataacataaatctcattagaactagacgtctttgcctcacttcccaccacataaatacagcacagatatacgaaaaaaaaaaaacatgtataaaacgaggccctttttggcgagtaaaagaaaccctgatgctgatgctgatcctgatcctgatcctgatcctgatcctgatcctgttcctgaccccgaacctttgcaacctaagtaagctaataaattcccaatgtccatatgtccatttcatcaatgttaggacacgcgaaaggctttgctacttggaacagacatttctgaactttgcaaatagtatacgaacactgaaggaagatccaacggagtccgagattgtcgaaatagaccacgaagtgccgccagaggaatacctggtgccttacatccagaactacgagtgtgcggatataatagtcactgttcacgatcgcgtcttcctttgccacaatatcatactaagtatttactcaaggcgaatgctgaaaatattgcaggaagatgttgaccatattgtctttaagtcgaatgatttgagcccgaaaggattcagcgacgcatatctatggatgatttccagtgatggcgaggttaatccgtgcgatatgggcgaaattttgagggccgcatacttcctggacattcccgagctgctcgaggcctgttgggcgaacctggataggataacattctttgagatctctgcgtttcgcctattgttcgaattacgaggcgccaccaacttgtgggatgtattcgataagctgactgggcgcatttccatttcaattttgccagtcgcatcgactcgggaattcctgtgcctcagcgaaacacaaatttgctacatactcaagtccaactttctggcaatcaattcggaaatggaggcaagttctatatctatagtatagtagaagtataaccatgatatatgaatacacagcttttatattccgccttaatgtggctagcgcatctttggccgcagcgacgttcgagcacctatagggttttaagtcaaattcgcttcagcttcctgccgcccctcatgctaaagaagttcaggagtgaggaactccataagatgcccgaatttagtgacattctaaaggagtttagcaagtcgcccgatgtcatcacacttctgcgggactcggtgtttaacagcagtttgctcttaaccgtgcgcaacaatccgagtgtactcgatacgcatgtggagttcacggaggtggagctaatggagccacgccattgggtacaggatcatacctgtgactaccatcggaaggtgacacagctgtgtccaaatatgcgtttcataacgctaaacgaatatcaagagtacctaaaacgcctgtcgattggacccgaattcaatacgtgtttcaagcataccagggatcgggaatcagaaggacaagaagatatgtggaagcatatgtgaataggcattatttataaatcattttttgtatactttaataaacagacacacgttttacgccctccggtaaatggattgtactacttactctttgccgcactcataagatctttgacctctttgataattcgttttatttgatgactagtgtggtccagttccttttcatgtcgatttaaattttcgcgaaagtccggactgtcgacgatgcattcttcgaactccagaggctccaagccgcggcgtacatttttgccgccgcccatgatgtttgcgtttgcttttaataatattgaatttgaatatttgctgtgattttcagtttaagtttcagttttatttaggttctttcgatgttgctttccacagagctaagtgcattcgcagtgactgatatattgtgatatattgtgtagatttgtcggttgagtttcgagaaaactgcggtgtttgcaacatttacagctggaattgcgctccttttatatatttactattcaatgcaaatactgtttatcagttggtggattatgcatattggtaatccttcctgcaaagacaactgatataagatatctttttaaacaacaagtagagttaattgcgcaaaacttgcattgcggctgagcggccaagaatacgctaagttactttgagaaaatattttgttctagcatgaagaaacatgattcactcgattcttatcaactctgtattaaagaacttgcattctctcttttagagaacccattgctttgtgtggtttaaaaacgatattttgagtacatcgcaatcaccggaatatgaatttatagcctaaattgaccaataattagcaagtgaagtccattatgtattatatttattcgttttgatcgcgcagagctctggcaattgtgattttgatttaaggtcggttccccacattcgataaactttaaactgtgaaattccgaaaataagagcagatccgaaaagcaaactgatgagattatataaa

SEQ ID NO: 18077 - DNA, 1256 bp, DROSOPHILA
gcacagatatacgaaaaaaaaaaaacatgtataaaacgaggccctttttggcgagtaaaagaaaccctgatgctgatgctgatcctgatcctgatcctgatcctgatcctgatcctgttcctgaccccgaacctttgcaacctaagctttgctacttggaacagacatttctgaactttgcaaatagtatacgaacactgaaggaagatccaacggagtccgagattgtcgaaatagaccacgaagtgccgccagaggaatacctggtgccttacatccagaactacgagtgtgcggatataatagtcactgttcacgatcgcgtcttcctttgccacaatatcatactaagtatttactcaaggcgaatgctgaaaatattgcaggaagatgttgaccatattgtctttaagtcgaatgatttgagcccgaaaggattcagcgacgcatatctatggatgatttccagtgatggcgaggttaatccgtgcgatatgggcgaaattttgagggccgcatacttcctggacattcccgagctgctcgaggcctgttgggcgaacctggataggataacattctttgagatctctgcgtttcgcctattgttcgaattacgaggcgccaccaacttgtgggatgtattcgataagctgactgggcgcatttccatttcaattttgccagtcgcatcgactcgggaattcctgtgcctcagcgaaacacaaatttgctacatactcaagtccaactttctggcaatcaattcggaaatggaggcaagttctatatctatacgacgttcgagcacctatagggttttaagtcaaattcgcttcagcttcctgccgcccctcatgctaaagaagttcaggagtgaggaactccataagatgcccgaatttagtgacattctaaaggagtttagcaagtcgcccgatgtcatcacacttctgcgggactcggtgtttaacagcagtttgctcttaaccgtgcgcaacaatccgagtgtactcgatacgcatgtggagttcacggaggtggagctaatggagccacgccattgggtacaggatcatacctgtgactaccatcggaaggtgacacagctgtgtccaaatatgcgtttcataacgctaaacgaatatcaagagtacctaaaacgcctgtcgattggacccgaattcaatacgtgtttcaagcataccagggatcgggaatcagaaggacaagaagatatgtggaagcatatgtga

SEQ ID NO: 18078 - protein, 409 aa, DROSOPHILA
MYKTRPFLASKRNPDADADPDPDPDPDPDPVPDPEPLQPKLCYLEQTFLNFANSIRTLKEDPTESEIVEIDHEVPPEEYLVPYIQNYECADIIVTVHDRVFLCHNIILSIYSRRMLKILQEDVDHIVFKSNDLSPKGFSDAYLWMISSDGEVNPCDMGEILRAAYFLDIPELLEACWANLDRITFFEISAFRLLFELRGATNLWDVFDKLTGRISISILPVASTREFLCLSETQICYILKSNFLAINSEMEASSISIRRSSTYRVLSQIRFSFLPPLMLKKFRSEELHKMPEFSDILKEFSKSPDVITLLRDSVFNSSLLLTVRNNPSVLDTHVEFTEVELMEPRHWVQDHTCDYHRKVTQLCPNMRFITLNEYQEYLKRLSIGPEFNTCFKHTRDRESEGQEDMWKHM

SEQ ID NO: 18079 - DNA, 4578 bp, DROSOPHILA
atggccgtcgtgtatttataaattcgagccacagacagctctcaaagccagtcagattagatatttgctagaatatatataaattatgtttatttctacttgttactttgggatatttttcagtgcatttcgcttcatacatttttctggcaatcgtaatcattgctttgctttttatggcaaaaattagtttatggttttagttgtattatcaaaaattcttcaaattctcttgaattaagtggaatagttctcagcaagtcaatcgtgtagatttccagttaatttaagttttatttaaagtagttgttataagtcatatcttaccttgccacatttgtgttccttaatttatcccaattattaaaatttgtaagcttatatttttagttatttattttttccaattttgatttcgaaaataaaatctagaaaattaactaattcaatcgcaatgcgttattatacactttatatttgttatttttcttaatggctcttgttgttttcgttaatattaaatactacaattacataattacaattatttacacaaattacacaagcaaattgtaaattaccaactaaactaatcgcatttaatgtaatttatttacttaagcattactcatttagtttagatttatgtttactttgttatttatgttcgtgttcctatttagatttatgtttatgtacataaaggggctaaaaagaagggggtaatgaatttaatttatatttcttgtttacatatacacacacatatatcacacagtgaccagttgttgtggcacaaaataaaaataataatgcgaaatcaaagtgcaaaaaacccaaaaaagatttagaccgattgcgcgaatgaaactgggggcaagaatacagggtgtctcgttttaatggtgggacggcggtttgatcgcggcatgactagattggagaccactcctccagatccaacagatcctccggctgcttctccttactgctacaactcctaactggcggcactgggcgtctgttgctgctgctgctgctgctggttggcctttgcccgctccttggcctcctgctgcgccttcttggagcgcttccacttcatccgacgattctggaaccagatcttcacctgcgtctcggacagcatcagaccgctggccacctcgaatcgtttgggccgactcagatacttgttctgcttgaattgcttctccagctcgaggagttgctgcgatgtaaaggccgttcgtggtctcctggtcttgcccagaatcgcatgatgcggataggcggccagttcgggaattcgatggtgcagcattccggcgcgggccaggaattcgaattgcagctgcgacggcatgaaattatgacccatgggtatctgcatggataaataaggaaaatacgatgcaaatgatttgtatgatagtattgtatatattgatctatttcgtattaaaatttttattacaatagttactttgtaatattgatatatatttaatgttttacttaccggaatgggtttccctgagggatccagaggtctgtggaaggcggatccaccttgggccagcagctggtagggatgtcctcctgcgtagagcggaaaatcctggggtctgatgggactgtggggtggtattggcttcttgaactcgtcgtggaagtcggacatgcgcatggacagatgctggggatgcagtgcaccgtggggctgctgctgatcctcacaaccgggactgatgggcggactggagcggtgcgacgaagtgggcgactctgatctgcaaaaataaaaaaaattgtgggaaaaaacttaatggggcaccctttattgcgaattatctaaccaatcgatttcgacaatcgaaattacgcgacacattttgaaaacaattaatattaccgccgccctccctctaatttgtttgcttctttgtacacaattcgcactttaaattagccactcacacacttgtgacggcagacacatggcgtatacgtaatctctgtggctgatgaccaaattggaattgaccaattgaatacatttttcattgccatattttcgagtgccagcaaagctgctttggagcttcgctggggcttcgctttggctttcagaatggtttttaccaagtgccacggttttgtttggtagccagccaagggatttcaacaagaagttgagggatttttggtaagagctgcatttttatacgaatcgtttttaaattctgggtattagcaagcaaagtaatgcatatgagtaataatatgaggcaagtgttcgtattaggcgaaaaattgtattatttaacccaaagctattggtaagactttgtaataagtgactaattaaattatcaggacagatagtatagacaatcaaatgaatagtttcataaacaattgaaatttatcatgagtataaattaattactaaaacaaattaagtaatagtgataataaacaagttacctttacctttttaaaaacattttatagtgtaacgttattagtaataaactttatctattttttgatcactcataataagtttttcaggccttattaatatgcttttcttttcaaaccccctctgaaatcttccttatagttatgctcatcccaaatttctttactcacctcgacatgccgtcgggactgggtgagtcgtactccctggagtcccggatgcgctgcagtgcctcctgttcgctgatgccgccggcggccgaggcagccgcctgagcagctgccgccgcattggaggcggtcacaaaggcatgattgagttccgcctgatcccgggcatagtgcagggcagccagacgatcatccacaatgatgggctgtggctcacccgactggtgttggctcttggccagcaaagcatcgatgcagaaggatttcttgggctgactttgggcgggtggcaggagtgtggttgtggccatggtggctccactgtggctcaggtgattggcagcgggttgcggtgagacgggcggtggtgcagccgctcccgatggcacacctggtggatttgccggtaacataaggggcagtcgtggcagaggataggtgcccagggcgggatgtggatgtggcacatgatgcggtggcgggaaaccctccacatagagacgaggatgcggcggcggtggatgtgaatgtggcggaccagtgcccacgggcatgggagccactagtagaggcatctgtgaactctgaccactctccgtttggctgctatcctgtgcaccaccgggactcaaggccggtgtataggtgctaactggtgatcctgtggtggccgccgaatgcgtgggactggctgccggcggactgggtgttatctgggatctgggcgagagtgttgattgattgctgccctgatcgtagtcctgggcaggtggcgatgatcgctgatgactgcgctgatggtgcagactgctgctgtggtgctgaatgtggctaagtagcaattgcgacggcattgaggtgctactgctggcggtcagcggcggtggaggcggctgttgcgacacttgggcactggacatgcttcactcggttcaccaaagttcagtttctatactctttcgaatatatgtatatattctcaaaatttccaaacactttccaacacgtttcgaaatcgacgattttacgaacacgcgtgcgaacgcgagctgtgatttcctgcgaagcgaactcgacgagcgctcattaacgactgtgcgctgctggtagccaaacgtggtatcatatacgcgatacggaatgccagtgtgaagcagcaacggtggtgcaatcagtaccgctctgcttctctctctcgctctctggaaacccgctttcaagatggagtatctggcagttaacacgaaagcgcgacagagatagcctgatggcatggggcgtggctaagtggctgaaaatgtccatcgaaggggcgtggctttggtgagaaagagtggctagggacagaggggggtgagcttggcagcagcaaatttcatataaattgttggaaaaacgaggctataattgccatcattatggagtgttgagcaactagcaagttcagcaggcaaaagacgaaagaatcttcataatcaacttgagtggagagtggaaagtgggagtgctcggaggctcgaaaggtccttaatggctgccaaagggagtggtggtatggaggagggccaataggttataggaagtctggcagatgattaggccagcaattaaggcactcgacgagcagcgatccacgatccacaaaacggccaaaaggcagctttaagcccggccagaaatcaataatctcgataacaataaacgtctcgtttcatggcgcttttataactcggttggcagtttggcgctaccgccgtaatgcccctataatgcattttctttacgacctacgctcagccagatgagacgattttaatgttcccttgatggattactaagtggacatgaatggttggccaagtggctcagagttaagaagatggcgggtggctataaatgaattgaatgcggtagcaaagg

SEQ ID NO: 18080 - DNA, 1578 bp, DROSOPHILA
atgtccagtgcccaagtgtcgcaacagccgcctccaccgccgctgaccgccagcagtagcacctcaatgccgtcgcaattgctacttagccacattcagcaccacagcagcagtctgcaccatcagcgcagtcatcagcgatcatcgccacctgcccaggactacgatcagggcagcaatcaatcaacactctcgcccagatcccagataacacccagtccgccggcagccagtcccacgcattcggcggccaccacaggatcaccagttagcacctatacaccggccttgagtcccggtggtgcacaggatagcagccaaacggagagtggtcagagttcacagatgcctctactagtggctcccatgcccgtgggcactggtccgccacattcacatccaccgccgccgcatcctcgtctctatgtggagggtttcccgccaccgcatcatgtgccacatccacatcccgccctgggcacctatcctctgccacgactgccccttatgttaccggcaaatccaccaggtgtgccatcgggagcggctgcaccaccgcccgtctcaccgcaacccgctgccaatcacctgagccacagtggagccaccatggccacaaccacactcctgccacccgcccaaagtcagcccaagaaatccttctgcatcgatgctttgctggccaagagccaacaccagtcgggtgagccacagcccatcattgtggatgatcgtctggctgccctgcactatgcccgggatcaggcggaactcaatcatgcctttgtgaccgcctccaatgcggcggcagctgctcaggcggctgcctcggccgccggcggcatcagcgaacaggaggcactgcagcgcatccgggactccagggagtacgactcacccagtcccgacggcatgtcgagatcagagtcgcccacttcgtcgcaccgctccagtccgcccatcagtcccggttgtgaggatcagcagcagccccacggtgcactgcatccccagcatctgtccatgcgcatgtccgacttccacgacgagttcaagaagccaataccaccccacagtcccatcagaccccaggattttccgctctacgcaggaggacatccctaccagctgctggcccaaggtggatccgccttccacagacctctggatccctcagggaaacccattccgatacccatgggtcataatttcatgccgtcgcagctgcaattcgaattcctggcccgcgccggaatgctgcaccatcgaattcccgaactggccgcctatccgcatcatgcgattctgggcaagaccaggagaccacgaacggcctttacatcgcagcaactcctcgagctggagaagcaattcaagcagaacaagtatctgagtcggcccaaacgattcgaggtggccagcggtctgatgctgtccgagacgcaggtgaagatctggttccagaatcgtcggatgaagtggaagcgctccaagaaggcgcagcaggaggccaaggagcgggcaaaggccaaccagcagcagcagcagcagcaacagacgcccagtgccgccagttag

SEQ ID NO: 18081 - protein, 525 aa, DROSOPHILA
MSSAQVSQQPPPPPLTASSSTSMPSQLLLSHIQHHSSSLHHQRSHQRSSPPAQDYDQGSNQSTLSPRSQITPSPPAASPTHSAATTGSPVSTYTPALSPGGAQDSSQTESGQSSQMPLLVAPMPVGTGPPHSHPPPPHPRLYVEGFPPPHHVPHPHPALGTYPLPRLPLMLPANPPGVPSGAAAPPPVSPQPAANHLSHSGATMATTTLLPPAQSQPKKSFCIDALLAKSQHQSGEPQPIIVDDRLAALHYARDQAELNHAFVTASNAAAAAQAAASAAGGISEQEALQRIRDSREYDSPSPDGMSRSESPTSSHRSSPPISPGCEDQQQPHGALHPQHLSMRMSDFHDEFKKPIPPHSPIRPQDFPLYAGGHPYQLLAQGGSAFHRPLDPSGKPIPIPMGHNFMPSQLQFEFLARAGMLHHRIPELAAYPHHAILGKTRRPRTAFTSQQLLELEKQFKQNKYLSRPKRFEVASGLMLSETQVKIWFQNRRMKWKRSKKAQQEAKERAKANQQQQQQQQTPSAAS

SEQ ID NO: 18082 - DNA, 3793 bp, DROSOPHILA
aactgctctcggatgaaatccttagatgcttccctataccgttgactccactgcaagtagcgctgcagcttgcagttctctagctgaacaggaaaactagccggagctccggtgaacgcgagtacgggatatgattctgcaggatatttggtctgccacttggcagcctcgttgctatgatgcacatcaaaatgaagtggcgcatagaactctgaccgcacaaagtctatgtgaaaagtgtcccaaaagggaccaaaaggattgccatccttggcgtggcaattgggcttgtctggatcgttcttctcctgctgaaggctatatcgttccttgtagcaaaatgacactcgctccgattctggccaaatgtcgtcggccaggtgccacatgaaatctgccatggtgatgacgcgatggtattccttcaggggctccacttcaaaatatgtgttgaacggtacctgacgggatcgcagttcacccctacgatactccacccacggcggcaggatcagggtgcgattaagcgccttggcgaaggccaatgatcccaggaagtggtcggcctggttgccaaagcgtcctttgaaaagcgcggtttagttgtcgtttttcggttgcttccaagtgaaacttacccatacacggacagtaggtgaggtagccattgggatcgccccccaattgggcacatgttgagcttattaatagtaaaattaagtttacgaagcgaagcttcattttgagccactgcattctgccggcttcgattttctttgaccaggtggcaactctgtctctttgccagattacaaaatgtttggaatgcttttgtttatgatgtgatataaatataattgcaaacataaatatatatttgaaaatttatgaaattatattgtgaaattattttttaattttattgtgagactttcttactatgggctaaaaagctcagatctggcaacctattattttctaatcagatgttattgcttacatgaaactttagaaataattttatttagactttagacaaaatttacaatatataacaatgtatagcctgtgagtatttatgcggatagtgtcttttttgtatttctaagcccaaatgtttcccacagcaaggaggggctccgggctcttaacagtcgaacgagaccagctctcatttgccggcgcaacatttcggaggaggctcccaaacaggatagtccgtttaaatggagaaaaccaattggccagcacacaggaatcaatatatacaatcacggcttgcggcagaaggtacccctaatcctacgcaatccccaaatggtcacatggtacacttgcggacccactgtttatgactccgcgcacctaggtcatgccagcacctatgtcaaggtagacatcctgcagcgcattctccgcgattattttaaaatcaacctggtgacagccatgaacatcacggatgttgacgacaagatcattaagcgggcccagctcgctggactggactggcagaagatggcgcgagcttatgaagcggaatttcgtcaggacatgttgcgtctcaatgttcaggcgccggatgtgcgcagtcatgtgactaccaccatgcctgtcattattcagttcattcagcagctgatagacggaaagcaggcttacgttaccccggataactctgtttactttgatgtctccaaaagcaagaactatggaaagcttcaaaacttaggcctaagcgaggacaaattggaccccatcaaacgaaacactgccgattttgccttgtggaaggcgcgtaaaagtggcagtgagcccacgtgggctgcaccctggggtggcgagggacgccccggttggcacattgaatgcagcgccattgcaggtttattctttggccgccagttggacattcatgctggcggcttggacttgcgttttccgcaccacgaaaacgaggaggcgcagtgctgtgcacggtataaaactgaccagtgggtaaactattgggtgcacaccggacaacttcatatggttggagatcgggagaagatgtcaaagtctctgggcaacacgatctccgtgtcggagctgctgaagaagtacaccgccgatgagtttcgaatggcctgcctgctgtccaattaccgcaatgcaatgccttatagcgatcagttgatggtgacggctcgccagaccctgcagcggtttagaaactttcaggccgatctaagtgcctatacccaattcctgaagcccgtgcacttgttagacgagggagcgttaaaggcccaactgactcatacagtaaccgaattcgataattgccttcgagatgatttcgataccgccagagccatcagcgtgctaatcgatcagatgagcagcataagtcgctgcataaatgagcagcaagtggacgcacaggaggagcccgcctactgcattgatctgctgttggcagctggaaacttcataaaccgtgccatagtcacgtttggtctatcagagttgcaggataaagaatcgttgcaagaaaaggtttcctttacggatcatagcattgatcccaatttgcttgtgaatgatgtgataaacgttcggggaagaatgcgggaaagggccacctccggaaatgttaagaacccgcagcttttagccgcctgtgatgaactgaggagcttgttacaacagcacggcattcaggtccgcgaccacaaacagggcagctcctgggtgtttgccgtgtcctgtgaaaagcaagatgataaaagcaaaagctctgccgaataaaagttaatatattattctttggatggttactacataaatgcatctctcatgcgttgtcggaagggttgatcgggcgctacggcgtgctccgccttgtaaagatctttagtgatgaggtagtctcgcaccagcttgaagaaggctcccatgctggtgaaggcgacgaagctgatggagaggacaaagtgccactcgacgctttctgcgcttagagaccctatttctactagtagcacggcagcctgaaggatggccaatgtggaataaattatggtgggattgtgaaatagtttctgcaaaaattatgaataaactttttaatgataacgttgaacttatgatttaataccccacttgtaagatactcacataaaatcgagcgtgactggcgtttcccggagtggccacagtaaccatgccatgacttctgtacaggcctccgttgtgctttaccacggtgccgtggttgtaggaggagtatttcgaccaggtgagcgcactggcggctactattagctgcgaaggcgctggctcccggtcaatgcgctgccagcagcccaaatgtaaagtagcccgatgtaatgtatcactatacttggcaggatatagaaaaacagcacacagactgaaagcgcccaggcacacaatgatacagtgctgggctgctcggagtacattgtattggacactgacggccagacagcagggcaccaggccagtgtagtaagcattcagcatggaggtgaagataagctgcttgaatcgcttattgaagtcatgtcggagtgtttccacttcgtcccttatgttaaccggattggtggtgcaactatggaccggtaggtcgttgatatacacgcccggcagttcgaatcgtgtgcgcaggaagggttcaagctggaagccgaagatcaacaggtagatgaccacactataaaagagaatatatgaatatctttggatataaaatacttttcattcttacggatagaataagaag

SEQ ID NO: 18083 - DNA, 1734 bp, DROSOPHILA
atgaaactttagaaataattttatttagactttagacaaaatttacaatatataacaatgtatagcctcaaggaggggctccgggctcttaacagtcgaacgagaccagctctcatttgccggcgcaacatttcggaggaggctcccaaacaggatagtccgtttaaatggagaaaaccaattggccagcacacaggaatcaatatatacaatcacggcttgcggcagaaggtacccctaatcctacgcaatccccaaatggtcacatggtacacttgcggacccactgtttatgactccgcgcacctaggtcatgccagcacctatgtcaaggtagacatcctgcagcgcattctccgcgattattttaaaatcaacctggtgacagccatgaacatcacggatgttgacgacaagatcattaagcgggcccagctcgctggactggactggcagaagatggcgcgagcttatgaagcggaatttcgtcaggacatgttgcgtctcaatgttcaggcgccggatgtgcgcagtcatgtgactaccaccatgcctgtcattattcagttcattcagcagctgatagacggaaagcaggcttacgttaccccggataactctgtttactttgatgtctccaaaagcaagaactatggaaagcttcaaaacttaggcctaagcgaggacaaattggaccccatcaaacgaaacactgccgattttgccttgtggaaggcgcgtaaaagtggcagtgagcccacgtgggctgcaccctggggtggcgagggacgccccggttggcacattgaatgcagcgccattgcaggtttattctttggccgccagttggacattcatgctggcggcttggacttgcgttttccgcaccacgaaaacgaggaggcgcagtgctgtgcacggtataaaactgaccagtgggtaaactattgggtgcacaccggacaacttcatatggttggagatcgggagaagatgtcaaagtctctgggcaacacgatctccgtgtcggagctgctgaagaagtacaccgccgatgagtttcgaatggcctgcctgctgtccaattaccgcaatgcaatgccttatagcgatcagttgatggtgacggctcgccagaccctgcagcggtttagaaactttcaggccgatctaagtgcctatacccaattcctgaagcccgtgcacttgttagacgagggagcgttaaaggcccaactgactcatacagtaaccgaattcgataattgccttcgagatgatttcgataccgccagagccatcagcgtgctaatcgatcagatgagcagcataagtcgctgcataaatgagcagcaagtggacgcacaggaggagcccgcctactgcattgatctgctgttggcagctggaaacttcataaaccgtgccatagtcacgtttggtctatcagagttgcaggataaagaatcgttgcaagaaaaggtttcctttacggatcatagcattgatcccaatttgcttgtgaatgatgtgataaacgttcggggaagaatgcgggaaagggccacctccggaaatgttaagaacccgcagcttttagccgcctgtgatgaactgaggagcttgttacaacagcacggcattcaggtccgcgaccacaaacagggcagctcctgggtgtttgccgtgtcctgtgaaaagcaagatgataaaagcaaaagctctgccgaataa

SEQ ID NO: 18084 - protein, 558 aa, DROSOPHILA
MYSLKEGLRALNSRTRPALICRRNISEEAPKQDSPFKWRKPIGQHTGINIYNHGLRQKVPLILRNPQMVTWYTCGPTVYDSAHLGHASTYVKVDILQRILRDYFKINLVTAMNITDVDDKIIKRAQLAGLDWQKMARAYEAEFRQDMLRLNVQAPDVRSHVTTTMPVIIQFIQQLIDGKQAYVTPDNSVYFDVSKSKNYGKLQNLGLSEDKLDPIKRNTADFALWKARKSGSEPTWAAPWGGEGRPGWHIECSAIAGLFFGRQLDIHAGGLDLRFPHHENEEAQCCARYKTDQWVNYWVHTGQLHMVGDREKMSKSLGNTISVSELLKKYTADEFRMACLLSNYRNAMPYSDQLMVTARQTLQRFRNFQADLSAYTQFLKPVHLLDEGALKAQLTHTVTEFDNCLRDDFDTARAISVLIDQMSSISRCINEQQVDAQEEPAYCIDLLLAAGNFINRAIVTFGLSELQDKESLQEKVSFTDHSIDPNLLVNDVINVRGRMRERATSGNVKNPQLLAACDELRSLLQQHGIQVRDHKQGSSWVFAVSCEKQDDKSKSSAE

SEQ ID NO: 18085 - DNA, 5211 bp, DROSOPHILA
aataacacttaggcgtatgttgtctacaattgtttacgatttgcattttgcattttttagtcgttccttctgcctgtggaaattgcgtttgtggaaaatctgctgctcgctggttttagttaaaatatatgcgtacatggttagaaattgtataatttgttgttgtttttcactaattcgatacggtacacacacacacacacacatacacacacacacacagaatttggttttggttttttgagagacagatagagagtattacattaaggattatatgcctggctaatgcaaatatcaattagacaatcatcggagtttcgagtgtgggggaaagttgagttttatttcacttcgctcgctttgtatatttgttttttgtttttagtttttattattaactttatttgtagtttttgtgggagatttcctttgccgcagtaattatcattttttgcttatatggtagctatataattatatagtgtatatctagttggatgacaaacatacatatacagacagacacacacactgagatgcacatttagtttagctcgaaaattagattttgctctgttgttcttattggttgctttttttttgcattttgtttatagtgtattccttacttcgcttcgctcatcctttctctccccctccccctgctcctacggctccacctctcctactttctcctatactagacacacagacatttagtggtatttaaatatatatatatatatcatatatctagcattatcgctattgtgtttacatatgtgaaaatttgttggctgatcgcgcattattttaaacacacaattacaattacatttataacatacacagatacacagtaaattttatttaaccatcttcctgctgacatcctactagatatctccccatgctttcacatatatatcgcttggttttctttttctcttatttttctttttttgttttgttttagtttttagtcattttcttgttcttgctgttgtgcgtttgtcgttggcgcccccgccccgcccctcgagatgggtggagcgtttgtgggtggcggatggcaggggaggaggaggaggaggaggagtagactggcggtggccgaggggcggggagtggggggcggcgaggggaggtctcactcaatggattcaacgacaagggggacgcaccaccacacagagaaaatacttgacgcgtttacatatatcacggaaacacaacaaagccatcgatacaaaatatatattgtatatataaaaaataaatataccctacttagccaagttctgttgtctcgctcgcacacacaatcaggaatcactaatcacacactgcacacaatagacccaagtatattatatactattataaatatgtatatgcctggctgctgatcctcatttgaatgaatcgatcgatcgatgggctgcctcctgctaacgcctcctgcctcctccagcttcctcctgctatcttctctctatggctattactaatatgctccttagttcacccaaaaaacacaaagcacacatggcacacatggcactggcacatggcccacattcatacacaaacgcacattgaatctaactatctcgttttggcttcgcgtccggcggtcaagtagaagtccaagtgtgccatggcctggcggggatctaggcctagaccatgacaaaagcatccttgccgcagaacagatacgggaactggtcaatcattgtctggacaatgtcctccagatacggacgcagctgctcgaagtggcccatgtcggtgaagtcgatgggtatgagtgtcggccaccagcaaatggccaagttcttgctgtccatgctattcagcttcgaattgtctgatacgctgtgtggagcataaaaaaatgtaagtatcaacgaatcacagacagtggattccccaaacgtcccccccccccccccaacttactgcacaaagtgttggaatatgtatttgagtatggcaaagttgatgggcggcagcttctggagcagcgattttaaagctatcaagcggcaacttcggtccgttttgacctccacattcagtttggaattgccgacgcctcgcgagccttcacggaaaatggagttagagccgcgttcgaagtgagtgcattatggttgctacataccggcaatctcctccagctccttgatgatgtccttgctgaacagcggaggcaggcgcttggagaagaagtccttcagtgccgtggccacggcattgacgggaatgtcgagcgcatcaatctcagtattggtatctgcatttgaaaaaatcataaatttgttgtacctgtaaggcctgaggtccgtaggacacacttaccctcttcgaagcgttggaacaacatgtcgacatgcgccctacttccgggcaccctataaatgccctcggagtcgaggccctccttctcgataaactcgacgcacttgttgaggaagatggggatctcgccttgctcggaggtaatcatcagcttgccgaattgcgcctccgcggattcaaccaggcccttggcattctgctttagtttgcgcttgagcttcttctcttgctccttctccttctcctgtagtttgcgctgcctggccgtttcctctttgatgcgccgcttctccagcttctcaaagtccttcaagcatttggcctggttcatgttgtactcgggcagattctctgcaccgaagatgccggcacccgccagttctggcaccatggaatactgcaggcggtggaggataacaatggtcaatggttaagttggataatagaagatattatgtcaaagacggacactcacctctggcgacttgtcactcttcatgaactcgggaacacatggctctggtttctctgcgaaaattcaaagaatataaaatcaattagatattatgtatttgtgtttggttaagaaataaattaaatttagttgtaaagattttctagacacagacagtttgccagcttccggtgaagaaatacacaaatatgaacatagatacaatataaacagaaaacacaaatcacgacacatacttttctcacctggcccgctgccgccaacggccatgcgctggtagtgcagcggaatctccggcggactcacatacgagccgaacggaggaacacgcggtgtctgcaccggaattgccaccttcttctttttctgcttcttggcggccaccggcttcttgctggccttatagtaggcattctgctggcgcacccgtcgctccgtggaactggcacagctgtccgattcggtgcagtctgcggatgacatgaaagattggtgtgagaagtgcattccacttggtgcggagatgattgcgttggcgcaacgaggagcgagggacaaaggacaatgctttgtacgagaatcaatggtgcaatctccaaaaggaacttgatcctatcatttcaaagcaaagttgtgaaacaaaacgacggcaaaatttaaataatatcttaaatacaaatacgatcttttcgataaagagattaaaaaaaaaaaaaacattcgagtgttaatgaaattcaaatatatatataatttcgatctgttagcatcaagttcgtggagtcatcagcttgtcggtgtgcagggtgagtgatttgggtgagtgttagtgggcgaggagcagatagttagtactagcgaaacgatgatggagctgcaaagtagtgtccctggcatcaataccttcattttcgtagatctgctcgtactcggcgagctcctcggaatcctcatcctcgccatccaattgggcatgatcgtagcgcttgccgtccttgtcgaccggctccaaaaacgaatcacccatgcagccactgccggagcccagacccaggcccagtccagtgctgcccgatcccgagccggaacccgaacccgaaccggagccggtgaaattcatcttggccaccgcatcgctgaccagctggaagttcttcatgttcagcttgcccggctgctgcgtgggcagggtgaaggtggaggagctcatggccgggcaattgcgactgggcgcctcgcccactttgagcgtttgactgggtcccttcgggcggattttgttcaaattggagtcgatgtgacggcgaccggtggtgtaggcatgtgtggatccgctgaagttgttccaaatcaaattcttgttcatgttgcgtcgcccatcgctcttgtcctccagccactctaaattatccacgcaagttgagttgggcgagagaagcacagattcacaattagcccaatcgaaggagattcttctcgtggaaacttctcaaactataaatgcatcggtctggggcacaattcttacttgatataaaacgaataaattaatatgtatgcgagctcacatacagtaaaaatatacgcatattactaattcattataaatcatttgaatatagaaatctattcatttattaagtacactctaagtgcgtatgaataactgagtaactggagaattgaaatactttttgaattgatctgaataaaaacgattcaagtctagcttattcacgcaactacaatattattcattttatattcaagaaattgtgcagcatttaacgaatatatgcaaaaaatgcaataagttacaggggcaggcagctaaataaactcgggggattcgtgccggggattggatttggttttggtttgattggatattcaggcagtgcttcggttgcaagtttgaacacaacaaaaaaaaaaaaaaagcgacttaatctagtgtctagaacgtaagtgaatcgtgagattaacctgcatcatgggtggccagtgaatccttggacccgctgacatccgctgcttgtcgggaaatgagaaaaacgagagcaaacacaccggattcatcagatttgaaatggattcaagttccgacgagtgatttcacaaaaaaatgaagaggaacagattgagcaaagcaaaaggagaacgtggggaacagcaaacgaacgaaagaacatctgtacaatcgattcccatcgatatggggatttggatttgctttttagcaggggtcgtgggtcggagaccatggcaacatggctatatggtggacatgggcacacggaatatatatacataaacagcattactggcagacagtacgggcgcacggaactgaagagcttacgaaa

SEQ ID NO: 18086 - DNA, 2347 bp, DROSOPHILA
atgaacaagaatttgatttggaacaacttcagcggatccacacatgcctacaccaccggtcgccgtcacatcgactccaatttgaacaaaatccgcccgaagggacccagtcaaacgctcaaagtgggcgaggcgcccagtcgcaattgcccggccatgagctcctccaccttcaccctgcccacgcagcagccgggcaagctgaacatgaagaacttccagctggtcagcgatgcggtggccaagatgaatttcaccggctccggttcgggttcgggttccggctcgggatcgggcagcactggactgggcctgggtctgggctccggcagtggctgcatgggtgattcgtttttggagccggtcgacaaggacggcaagcgctacgatcatgcccaattggatggcgaggatgaggattccgaggagctcgccgagtacgagcagatctacgaaaatgaaggtattgatgccagggacactactttgcagctccatcatcgtttcgctaactgcaccgaatcggacagctgtgccagttccacggagcgacgggtgcgccagcagaatgcctactataaggccagcaagaagccggtggccgccaagaagcagaaaaagaagaaggtggcaattccggtgcagacaccgcgtgttcctccgttcggctcgtatgtgagtccgccggagattccgctgcactaccagcgcatggccgttggcggcagcgggccagagaaaccagagccatgtgttcccgagttcatgaagagtgacaagtcgccagagtattccatggtgccagaactggcgggtgccggcatcttcggtgcagagaatctgcccgagtacaacatgaaccaggccaaatgcttgaaggactttgagaagctggagaagcggcgcatcaaagaggaaacggccaggcagcgcaaactacaggagaaggagaaggagcaagagaagaagctcaagcgcaaactaaagcagaatgccaagggcctggttgaatccgcggaggcgcaattcggcaagctgatgattacctccgagcaaggcgagatccccatcttcctcaacaagtgcgtcgagtttatcgagaaggagggcctcgactccgagggcatttatagggtgcccggaagtagggcgcatgtcgacatgttgttccaacgcttcgaagaggataccaatactgagattgatgcgctcgacattcccgtcaatgccgtggccacggcactgaaggacttcttctccaagcgcctgcctccgctgttcagcaaggacatcatcaaggagctggaggagattgccggctcgcgaggcgtcggcaattccaaactgaatgtggaggtcaaaacggaccgaagttgccgcttgatagctttaaaatcgctgctccagaagctgccgcccatcaactttgccatactcaaatacatattccaacactttgtgcacgtatcagacaattcgaagctgaatagcatggacagcaagaacttggccatttgctggtggccgacactcatacccatcgacttcaccgacatgggccacttcgagcagctgcgtccgtatctggaggacattgtccagacaatgattgaccagttcccgtatctgttctgcggcaaggatgcttttgtcatggtctaggcctagatccccgccaggccatggcacacttggacttctacttgaccgccggacgcgaagccaaaacgagatagttagattcaatgtgcgtttgtgtatgaatgtgggccatgtgccagtgccatgtgtgccatgtgtgctttgtgttttttgggtgaactaaggagcatattagtaatagccatagagagaagatagcaggaggaagctggaggaggcaggaggcgttagcaggaggcagcccatcgatcgatcgattcattcaaatgaggatcagcagccaggcatatacatatttataatagtatataatatacttgggtctattgtgtgcagtgtgtgattagtgattcctgattgtgtgtgcgagcgagacaacagaacttggctaagtagggtatatttattttttatatatacaatatatattttgtatcgatggctttgttgtgtttccgtgatatatgtaaacgcgtcaagtattttctctgtgtggtggtgcgtcccccttgtcgttgaatccattgagtgagacctcccctcgccgccccccactccccgcccctcggccaccgccagtctactcctcctcctcctcctcctcccctgccatccgccacccacaaacgctccacccatctcgaggggcggggcgggggcgccaacgacaaacgcacaacagcaa

SEQ ID NO: 18087 - protein, 553 aa, DROSOPHILA
MNKNLIWNNFSGSTHAYTTGRRHIDSNLNKIRPKGPSQTLKVGEAPSRNCPAMSSSTFTLPTQQPGKLNMKNFQLVSDAVAKMNFTGSGSGSGSGSGSGSTGLGLGLGSGSGCMGDSFLEPVDKDGKRYDHAQLDGEDEDSEELAEYEQIYENEGIDARDTTLQLHHRFANCTESDSCASSTERRVRQQNAYYKASKKPVAAKKQKKKKVAIPVQTPRVPPFGSYVSPPEIPLHYQRMAVGGSGPEKPEPCVPEFMKSDKSPEYSMVPELAGAGIFGAENLPEYNMNQAKCLKDFEKLEKRRIKEETARQRKLQEKEKEQEKKLKRKLKQNAKGLVESAEAQFGKLMITSEQGEIPIFLNKCVEFIEKEGLDSEGIYRVPGSRAHVDMLFQRFEEDTNTEIDALDIPVNAVATALKDFFSKRLPPLFSKDIIKELEEIAGSRGVGNSKLNVEVKTDRSCRLIALKSLLQKLPPINFAILKYIFQHFVHVSDNSKLNSMDSKNLAICWWPTLIPIDFTDMGHFEQLRPYLEDIVQTMIDQFPYLFCGKDAFVMV

SEQ ID NO: 18088 - DNA, 2725 bp, DROSOPHILA
tcatcatctgcgtctccttcaaacagaagccaaatgagcttgtcgtggagctatgcatattgctgccggaaactgacggtttcttcaatcgaatgaccagaatggccaagtgagatggagtccgcttgagctgcaactgtagggttggtggagggctgatcaaaaggtccgctcgagcggatctctgtgggtcaagcaaacgcttcgacttaatccaaggtggctactgagttgcctcccgttcaacaggtatgtatgtagatagatcccacctcaaacggagtgcattctgcattctcagcaaacacttgtggactaccgatcgtccagtgtcccaatgtccgagtgtccaattgtccaatccagtggccagcggttccagtcgttccatcaatcttttgcggcgggctgctgtcaatctcctgcggcaaataaactcgagtgcctctcgcaggcaaataaccaatatttgctctcggattattaagtgagccagcatcccattccgctgtccatttccagttcccatcggtggttcttcggttcctcctcctgctttcaggtggcttgttaactgtttgctcgggctgtttaatcgctttaatggttaggcaattaagagttcttcggaaaacgtctccgaatgccaactactccctcttcttgtgctggaaatattaataaattcttttgatatgctccgaaagaaattacatccatttcaggtaacatgagtaattcttagaacgaataaagatattcttttatgtgaaaaatatggcaggtttggttgcattacctattggaaacttaattttggaatagattgattgatctagatatatataaaatggggtttttaaaccaaattaatgataaaaacaccaaaagattgattagtctcgttgcatttttcagttctcccttgatttatttcatgctaatcgtttcatggaaatgtgttgaaagaccgattgactcttacgataaatacaaaaccgtatggttaacattatgaaaaacattttgcaccgccgccgctgcctgcagatggggatttggaccaccagaagagaagtaatgatgatgatgattccatccgcagttcattcgcaacgtgtacagagcagacatttataaaatgtcgtttaaaagcaggctaaatgcagcagctactctgatcgccacattcgaatgtcaaaaactcggcggcttttttggtgcttaaaaactaaattcaatgcgggtgttgatggcacacacacaagcacacacctgctccggcgaagcaacaacaacattcgtggccgattcatatgctcatgcatgtgctatgatctttgttgttgttcctgggcagaagtgtcgccgtggccaaaaagtttctgtttttctgcgttctattccttggacgccatgtgtcccaccaagttgctggtgatcttctcgatttttctgagatccggcatgttctccgctttgtactgcacacactgtggtttaatgaagtaaaaatttaaaaatgtgttttgcactgataatggaattgggtgcaaaccttaacgttgtccgtcatttttagcagaatgtggcccttggagtgcgcgtatttcatggtaagtcgacagttctgtggattggccaagtacatgttctcgacggcaatctcgaaatcatcccagttctttacaaaaaccattttttatttaaacaaatggaaatccaggcgaaattattaaaaacaacaacagcaactggacggcgtgacgttgaagctatcgaaaaaataccaaaccaacaagccaaaactattcgataacgaatagctcaacagctgaacaccccattgtgaatgtcttagtatttttcaaatatttgctgacggtttttcaaacaagggcctttctaaatttaaactttacataaatcgaaaatattagaaataaatataattaattttagtaagttacggtgtaataatttgctaaacattacttaagtgcgaccgtaaaacacctagttaaaaataccacttcgccaatgcaaggtgatcggtattttcagggtaacacgttcacacccacccacacatcgtagctgcgctgcaaagtgtttcaatatttattgcaaaaatggtgtgaaaaaccactgattcgcttaaatttagtgctcaatcgtaagcaacggatggccgcgaaggcgtcggcagtgaaattcgcgagtaacattgctgaaaatacatcgaaaagcaaacgcgaaaaacgatgaaatctagtcaatcaaatattgtgaatggatgtgaaagagaagaaagaggggcgcaaaacgaaaacgcaaataataagtgacacgcagaagccagctaaagtgcagtttatttaaatatactagagatctgttcaaaatataaatataatctcacaaatcatcaaaaagtcaagtgtctgtgtgtggtgtgtgcgtgtgtgtgggagtctctctctctttttctccctcttttcttccccatctaccgtgttgttattctggtggggttgaaaagccattgcctgcataacggttaacgcgtgacgtacgacccatcaacagcagtcaagtgcagcaccctaccgcccctcgcccttcctaaagagtagagagcacacctcctttataaataaagagatcctccgatccacccaaacaccattcatcatgatggacaacgatgatgcactgctcaaca

SEQ ID NO: 18089 - DNA, 660 bp, DROSOPHILA
tggatttccatttgtttaaataaaaaatggtttttgtaaagaactgggatgatttcgagattgccgtcgagaacatgtacttggccaatccacagaactgtcgacttaccatgaaatacgcgcactccaagggccacattctgctaaaaatgacggacaacgttaagtgtgtgcagtacaaagcggagaacatgccggatctcagaaaaatcgagaagatcaccagcaacttggtgggacacatggcgtccaaggaatagaacgcagaaaaacagaaactttttggccacggcgacacttctgcccaggaacaacaacaaagatcatagcacatgcatgagcatatgaatcggccacgaatgttgttgttgcttcgccggagcaggtgtgtgcttgtgtgtgtgccatcaacacccgcattgaatttagtttttaagcaccaaaaaagccgccgagtttttgacattcgaatgtggcgatcagagtagctgctgcatttagcctgcttttaaacgacattttataaatgtctgctctgtacacgttgcgaatgaactgcggatggaatcatcatcatcattacttctcttctggtggtccaaatccccatctgcaggcagcggcggcggtgcaaaatgtttttcataatgttaaccatac

SEQ ID NO: 18090 - protein, 77 aa, DROSOPHILA
MVFVKNWDDFEIAVENMYLANPQNCRLTMKYAHSKGHILLKMTDNVKCVQYKAENMPDLRKIEKITSNLVGHMASKE

SEQ ID NO: 18091 - DNA, 4778 bp, DROSOPHILA
tcacgccaaggagactcccggggcaccgcggacatctctttcatcttcttgatgccctggatttgtgcttgagtctggtcgtcgaaggtatatcggtctgcgtagcgacgattttggctggtaactgctggtaatcgtcgcaaactggaaaattgccccttggctttgttactaacaaaccgccaagaatgattcaggctcgttcgagccattttaaaagtggtattcatcttgctattgactcgtcttggattgaactcccttttcagaactaaaaattttgatgcgtgcacgagagggtgttgtctgaaaataaaactccgaactgaatttttgaattttcaattttgttagctacaaatttttaactccaaaaattaaagaccgaaattttgtgaactgaacgcttcgcaaactgggaatattatgagaacgctgatgattttttcccaggaagtaaaaggcaatgctatcccagttgaactcaaaaaatagaggtggtactcatgacctacttggcgtttaacattacgttaatccaatactagaaacaatctttgaaaatgcacaaaatatgtattcattaaaaggtttcctgaccacataagcggttaacctttgaagtaactatccattaggtttcacacccaaatgggaaagtgtggaaagcttaaatatgcagcatttatcttcgttggaggttgtctgccttccgcatcgcgcactccacttccatcgaattttgatagcagatttatgatgcacttccgccgctggctaaacttgacacactgagaagtttgtctggttttttttttcgattcgctcttcgatcgccggctttggtttcataatcgcagcgatccagttggactaatgaacttgaactaaccgatgtcacggcgcgtttccttttcttatttctttgccacagcttgccgcaccgtcttcgaatctcagcagcaaattggcgccgccgacgaatcttgagccctacaccatggctgtcatcacggaacatggcggcaccacctcctctcccccggaaaacaacaatagcatcggaaacggaaaacaccgggtcaatggccatcagttgagcacctcgctgaccataccggagttctttgcccacaagaacatctttgtcaccggcggcactggattcctgggcaccgttcttatcgaggctctgctggacacacatcccgacattggaaccatctacgttttggtccggggcaagcgcaagtttgatccgaacgagcggattcgtcgcctgctccaaaagccggtaagtctggtggcatttgttttagattgttttgaccggtcgaaggggggcggcaaccggccacgccctctgacacgacgcgccgtctgcaaggtatataattaaagccaattacgagtctctttatggagcgttaatttgtcaaagtcgtaacctggccgacctcttccgccgcgttccatggggctttcattttcttttcttttcatttttttttttaaccacaagtgtgcaatactcttttgggatttttgaaaatatttaaattgttatttactataattacaaattttgaaataacctaattattatcttatttaattgttaagctcaagcaatcttttcataaagcattttttacaatcaaaataagtttgtacaaataatgccttgaaatcatataaattatatttagagagtgcttaaattttcggtccaacaaaaagtcttttgttttttccccaacttttgttaggccctcttcacaactcgttaatttattttatttttaaacgcatttttaatggcacaacaaaaagaagctaacatcatatgttgtttgctttgaaaattgcttacttacgagtgttgcccaaaaaggtaaaagtaccgaaaaaagcactcatcgctaacaatcataatttgttggccataatgtgggcgtgtatggttagcaagccaacctccgaacagtagtgaaattaattttcaacatccgtctttagaggagaaaaaataggtctccaactggtttaaaaatatcgaatacatatgtacaatatataaaactcttattcgccgcttctgcaagtcataaaatcacttatagctcgaagcttttaatgctaccaattaatgaccatatccttttagttagagttatcaaaagtttaagatgcatgagattatattcaataaaatgtttgtttaatattgcaaatataaattatgatttaattacagattttcgagaaatactcggagaagactctgtccaaggtggtcccagtggttggcgaactgagcgaaccaaactttggctttggccccgagctcctgcaggagctgatcgatcgggtcaatgtgatctaccacagtgcagccaccatcaagttcagctccccgctgcgcaccgccattcgcaccaatctcacgggaacgatgcgcaccattgagctggccaaacaattgaagcaactggcggcgtacatctattgctccacggccttctgcaatagcaacaatcgtggtctgattgccgaggaggtgtacaagtcacagttcgatccgtacgagatgatgaagatggccgaagatgactccgcctgggaggatttcaccgatcaaaagtgcaagggctatatccgtgatcatcccaatacgtatacgttcaccaagaatctgtcggagaatttgctgatggccgagatgtcgggactgccagcagccatagttaggccatcgattggtgagattccattcggcagtaaaatgtcttaatcaataacatttcatttttagtttatggaaccctggagcacccgatgaagggctgggtgggcaatgcaaactctggtcacctgggcttcttggccggcttcgtgaagggaatttttcgcaccatgtgcgggaatgcaaatgctgtgatcgacatcataccatgcgactatgtgatcaactcatcactggttatgggctggtacgtgggcacccggaagttggagcagccggagatcatacattgcacgtcgggagaggttaatcctctgaatctcgccgagttctgcacgatcatcaacgatagtgtggagcggcatccgccgaacagttttgtttggaaaccggtgacgaaattgcgcaacggatggcgttacaatctgttcttctatctgtttcatttgctgccagctatggtctttatcataccagagaagctattcggaatcggaatgccccagcacacgtaagtactgcaaaaagctggatctacttaacttttaaccataatatttatctactttagagcctacgagtacatgcgggtgttccagaaaggtaccaaggcctttgattacttcctggacaaggacttccggtattccttgaagaatgcgctgcgtatatcggcattaataccggagagcgatcgaaggcgctataatttcgatgccagtcagtgcgattggtcggagttcatcgatcggtgtctgataggaatccggcgtttctacttcaaggagtcggcagtgaccacggattggcatcgcaactactggaaggtgtaagtgtgatccattccaccgatctaaagcataatttcaattttcatttcatttctgtcctgtctatagctttaacgtcctgtactacgcgggctatgtggtcatcttcgccgttctctactttgcccttactttaactttgggcctgcagatcggacttacgttggcggttctgatctggggatttctcgtctggttgtagtggctgcatccgaatcgccaacagttggattgtgcaatatttccgctccaagtgcgatgctaccacacatggttgttcgtttccatccgtagtttgttctagtagggtatcatgtattttacttttaagttctttcacacaagccaagtacaagtcagcgaaatgtatcatatgaatcagcactaatatcgaatctattcacacagcaatgcaaaagtagcccaaaacttagtcactttaactaaacacgtaatgtaaaagtaataaacaattttagattgtttgtaattatcaaccggtttatagtcaaatagtcgatgaatacgagaactaaactttaaatgattaaatatgtaactattattcaaataaatatgatttttatattaaggaaaggatgtgtgtgtttttattaggtgtgtgtaatattttattatatggaggttggtataacttataataatattgttttataattttttaagtccatcttaaaaatcgatgcatttcgttttcgacaatgcacagtggcgacacctagctacactctttctacacggtgtacactaagtaagttcggtaatattccgacaggggcgctagctgaagagaattctcttatgctcgagaagagaaaacatacatatgcagctaaaataacaaaaaaagtatctgcaagatagcgaaaaatgtatccgcaaactcagtgagctaaccatattgtatgtgatgagatcagaaagtaaacatatgtgggggaccaaaccaaataggcactcccctttgagacgccactgactaactggtttggccgacgatcgtgatcgttattatgacgatccgcggagcgtagttaatgatcatacacgaacagttcgcttgctgccgagcacatttcgttggccattgacggcataaagattcagttgaagttttactgttgccggctaacgttcgaaaatcggaggatcggagaaacgcagataaagataaactcgcc

SEQ ID NO: 18092 - DNA, 1632 bp, DROSOPHILA
atggctgtcatcacggaacatggcggcaccacctcctctcccccggaaaacaacaatagcatcggaaacggaaaacaccgggtcaatggccatcagttgagcacctcgctgaccataccggagttctttgcccacaagaacatctttgtcaccggcggcactggattcctgggcaccgttcttatcgaggctctgctggacacacatcccgacattggaaccatctacgttttggtccggggcaagcgcaagtttgatccgaacgagcggattcgtcgcctgctccaaaagccgattttcgagaaatactcggagaagactctgtccaaggtggtcccagtggttggcgaactgagcgaaccaaactttggctttggccccgagctcctgcaggagctgatcgatcgggtcaatgtgatctaccacagtgcagccaccatcaagttcagctccccgctgcgcaccgccattcgcaccaatctcacgggaacgatgcgcaccattgagctggccaaacaattgaagcaactggcggcgtacatctattgctccacggccttctgcaatagcaacaatcgtggtctgattgccgaggaggtgtacaagtcacagttcgatccgtacgagatgatgaagatggccgaagatgactccgcctgggaggatttcaccgatcaaaagtgcaagggctatatccgtgatcatcccaatacgtatacgttcaccaagaatctgtcggagaatttgctgatggccgagatgtcgggactgccagcagccatagttaggccatcgattgtttatggaaccctggagcacccgatgaagggctgggtgggcaatgcaaactctggtcacctgggcttcttggccggcttcgtgaagggaatttttcgcaccatgtgcgggaatgcaaatgctgtgatcgacatcataccatgcgactatgtgatcaactcatcactggttatgggctggtacgtgggcacccggaagttggagcagccggagatcatacattgcacgtcgggagaggttaatcctctgaatctcgccgagttctgcacgatcatcaacgatagtgtggagcggcatccgccgaacagttttgtttggaaaccggtgacgaaattgcgcaacggatggcgttacaatctgttcttctatctgtttcatttgctgccagctatggtctttatcataccagagaagctattcggaatcggaatgccccagcacacagcctacgagtacatgcgggtgttccagaaaggtaccaaggcctttgattacttcctggacaaggacttccggtattccttgaagaatgcgctgcgtatatcggcattaataccggagagcgatcgaaggcgctataatttcgatgccagtcagtgcgattggtcggagttcatcgatcggtgtctgataggaatccggcgtttctacttcaaggagtcggcagtgaccacggattggcatcgcaactactggaaggtctttaacgtcctgtactacgcgggctatgtggtcatcttcgccgttctctactttgcccttactttaactttgggcctgcagatcggacttacgttggcggttctgatctggggatttctcgtctggttgtag

SEQ ID NO: 18093 - protein, 543 aa, DROSOPHILA
MAVITEHGGTTSSPPENNNSIGNGKHRVNGHQLSTSLTIPEFFAHKNIFVTGGTGFLGTVLIEALLDTHPDIGTIYVLVRGKRKFDPNERIRRLLQKPIFEKYSEKTLSKVVPVVGELSEPNFGFGPELLQELIDRVNVIYHSAATIKFSSPLRTAIRTNLTGTMRTIELAKQLKQLAAYIYCSTAFCNSNNRGLIAEEVYKSQFDPYEMMKMAEDDSAWEDFTDQKCKGYIRDHPNTYTFTKNLSENLLMAEMSGLPAAIVRPSIVYGTLEHPMKGWVGNANSGHLGFLAGFVKGIFRTMCGNANAVIDIIPCDYVINSSLVMGWYVGTRKLEQPEIIHCTSGEVNPLNLAEFCTIINDSVERHPPNSFVWKPVTKLRNGWRYNLFFYLFHLLPAMVFIIPEKLFGIGMPQHTAYEYMRVFQKGTKAFDYFLDKDFRYSLKNALRISALIPESDRRRYNFDASQCDWSEFIDRCLIGIRRFYFKESAVTTDWHRNYWKVFNVLYYAGYVVIFAVLYFALTLTLGLQIGLTLAVLIWGFLVWL

SEQ ID NO: 18094 - DNA, 4684 bp, DROSOPHILA
atttcagcggtaacttctaactactcacatcctggtctttccctttgtttttgaagttttgtaaacgattttgctccatagacgtcattttgtctgatttccttgtataagggtttgctttttcgattggctgttaaaaagtgagtttttaaaaactattgaatgcgatgttggcgacgtacgcctcctagcgtattcgatgaacaattaataatttgtttcaattgcacaccagccaatgggaaaaattattcgcacccacaccagcgcacatccacgaaaaaataacgtagaatcgaccaacacagttgcagcataacacgatggcgcaggcattgaaaaaaggaaatggcgaaaaaatacatgaaaattagcaatgcaacgggcgaaaaaagtgtttctcttggtcctcggtagaggatacttacgtttttagcaagtaaatcgggtttctcccacgacacatacactttctacgtcttttaaaagtgataaaattctttcctttttattaaaattgcaatcagtgacaacgacgtgagtgaagttggctgcggttggcaattcgggactgcccacttataggcagggtcgattgaagcaccaatcgtcagatctgaatttatgtcgacttattttttaaatttagaaattttaagtttactcagttggagttgtaagcttatgaaccagttgaacattatttaggaaatatttcatttgtcttaaaaagcattatagcaattcttattatttaggttttttcaagcaggcgcttgtcgtgacggtactattacacaactctagcaaagtatcgatatctttgagccctgcgaactgtagataccattacgagtgtcatcgctattattgaaacttctgtccaagcaagacgtgcagaaaaacgcttaatcgcgaacagcgacaaattcgctgatctgttgcggtaatctattagcatgcatagacactaggacgatccgcgcccagcgagagagcaatgacggagaacacagagaaaggggcgagcgtagaaacgcctcaagtggcggggtctcagacaaatcctccggttcaggagccacttgcactgaccaagattccgccaattaaggtaaagagcgaacgaccggacgcagaggtggaggccaaactccgggccatgaatgccaagatcaaggcggagatggtgactttgatgcggaggagcaacagcaatgaactgggcaacaatgacgagtcgggggagagcgagagctccgcgtcggcggacgacaagaagaacattaagcctgtaaagtcctcgaacgagatccttgccgagctgttcggcgtattcaatgccgctccaccagaggaacttctagacgacaatctgttcaagaaaaagaaaaaggtgaaaaaggagaagaaggataagaaggccaagaaaaagaagacgaccaagtcagatggcgaatgcagcgactcggaggcggaaggcaagcacaagcataaacgtaagaagcacaaacataaagacatcagagtcaaagacaaggagaaggatcgggaccgggacaaatctaaggagaaagatcgggaccgcgttacggacaaatcaaaggagaaggatcgggacagggacagggatagggacaaatccaaagataagtttacggcagcacaagctccctccgagaaggagaaagaaaagtctgagagccggaagcgcagcgctgtggagccttccagtcattccgaaaagcgcgaacgacatgaaagggagaagcatcgcgactgggaacgagaaagggaacgggaaaaggagcatgaaagggaacgcgtccgctccaacaatagcttttacaacgggcaacgtgaagcggatcgcttgaaaggatctgaatcagcgagcacaaagtcacggcaggaacaagatctctccgatatctcgctctccgatgaggagtcgtacctccgggagaaggcttccaacggccgtagacgggcgcacaacagcttttatgatgaaaaggaggaattgtcggtttcacccaagcgtaacgtgcgcgaatccaacaccaggagaaaccgaaagtcaagatctcgctcgcgtgacctcggcatagacaaaaagcgcttgctcgagattgcgcgacgaaatgccattaacatgttcaaacagggaactatgcccggtgtggctaacatgactgcagaggtcaaggacaaggttctcgtcaagatgcgctacggaggtcgcactattcaagatcttaccgacttctgcaaaaaaatctccaacggcgacggcctgtcagatctgagttcagaagaggagtccgatgtggacaagaatggtaatgcgaaggtcttccatcatccctttcagctgaaggagcgcgagccaattgtgatgcatatacgaaactcaacggcgctggttccagcaccacctcgactggacgagcaaacaaaggccataaccatgcagttcccggtgtcgtcgggtcagacccatcgcaacaatgaggtgtgggtgccggtggatcctaaggactcgctagtgccgttgccctccctaccgccagcaaaacaggccaccaatatgtttaaggaaacgccgaagaacgtgttcgcgaagtcgatacccttgcaggagcagcaggaacccgcctttaagccactgggaggagcagtcgtagtcccgcccttagccgccactcaattacccactgttcctcaatccgtcccgccaaccgttcccaaagagtttgcccctccggctgttcccttcgttcccgaggtgcccatcccgtcaacgtcacccgtaacaccgatgcaaagtgcttccatttttcccgatgttacgccgccttccatggacgtgtccagcataatcacccagcgtcttagtgccattcgacgcctgcaggtgagctctagaaccatttgtcattttaacggttggcttcataattttgtttatcttaggagaatccggccgactctgaggccctaaaaatgatgtacactgcgcaacgcaacatgtcatcgtgggccaactcaaagcatctgcccggtcagttcacgggaagcacgggtgcccaagtgatgaaggcacatgagctgaacagcggtccgcagctgtgggtgcgcaaagaccaaatgacctccaccaaaccggtgactgggggcatgggcatggcgctcctgcaaaagatgggctggaaaccgggcgagggactgggcagatgtaaaactggatcattgcaaccacttttgctggacgtcaaattggacaagcgtggcctggtgtcgcgcgatgacttaaggccaccgcaaatgcgtgcgccggctgcccagcgaagaaataaaaacatggcgggaccaattggagctggcccctgtccagcagttcagggtgcgggacctggaccgttggcgtccacgccgctggtcacccaggataagcatcccgtgtgtgtgctcaacgaactgacctcgaagaacaagtggatgccgccgcagtataagctacgtcaggatatcgggcccgctcacaaccgttcctttctcttttcggtcgagattaacggacagacctttacgccggatcgaggaagcaacaacaagaaggaggcgaaactcaatgcggccgccttatgtctgcgatctttaggcattcttccgcccagctagtgatcgaacgttgaataggctaatttctagatagtgaatataatagaatccccacactgtacataaaattagccctatatttaagttgtaaaatcttgttcgtctcctttggagcgatgacaaatatagtgctaacatcaaaaatgattgttagtttgactaaaattactgatatttgatgtacccctaacgttatcatttctattatttatacactacttactttaatgctgtccttaatatcagttataaattacctgtttacttctagttccttttagaaatgcaagtttcgtatttgaagtgtatttccttcccttattaaattgaatattttaatttaatttttgacacacacatttttccaagtgtaatgcccgttatttgggagaggagctttaacgcgcgagctttgctcactcgccaaacggggcttttgcgcaagtacacaaacaaagtcagctgttccatccgagtgggttaaacaagagtgggccgtgtggacagagactggcagtggttgtggtggtgggagtggaagtggaagtgggagcatcggcgctgcaagttccaaaagattgctcctcgacgaaggtcagttcacgcggaagctcgaacttcgtcggatggcgagcacggaccattggattggctagcaggcgcagcagaaggggcaacaaggagcggagcagaggtcgtcacccggatacagacaaaacttttccgagtgccccagtcctcgtcgcccaattccccaacagcagcagctgcagcatcatcatcactcagcatccaaaaatgcctcaaaaacgtgcacaataatatttgttgtgaaaatatccaatgctagcgtgtaaatgcttttgagccactgcgtcttggcattcggtggatgtggctgcggatttggatgtggttatcgtatcgacgcacgcaatcacagcccgcgtagctcgtaaagttgcataattaccgcacatgaatggctggcgagtcgaat

SEQ ID NO: 18095 - DNA, 2625 bp, DROSOPHILA
atgacggagaacacagagaaaggggcgagcgtagaaacgcctcaagtggcggggtctcagacaaatcctccggttcaggagccacttgcactgaccaagattccgccaattaaggtaaagagcgaacgaccggacgcagaggtggaggccaaactccgggccatgaatgccaagatcaaggcggagatggtgactttgatgcggaggagcaacagcaatgaactgggcaacaatgacgagtcgggggagagcgagagctccgcgtcggcggacgacaagaagaacattaagcctgtaaagtcctcgaacgagatccttgccgagctgttcggcgtattcaatgccgctccaccagaggaacttctagacgacaatctgttcaagaaaaagaaaaaggtgaaaaaggagaagaaggataagaaggccaagaaaaagaagacgaccaagtcagatggcgaatgcagcgactcggaggcggaaggcaagcacaagcataaacgtaagaagcacaaacataaagacatcagagtcaaagacaaggagaaggatcgggaccgggacaaatctaaggagaaagatcgggaccgcgttacggacaaatcaaaggagaaggatcgggacagggacagggatagggacaaatccaaagataagtttacggcagcacaagctccctccgagaaggagaaagaaaagtctgagagccggaagcgcagcgctgtggagccttccagtcattccgaaaagcgcgaacgacatgaaagggagaagcatcgcgactgggaacgagaaagggaacgggaaaaggagcatgaaagggaacgcgtccgctccaacaatagcttttacaacgggcaacgtgaagcggatcgcttgaaaggatctgaatcagcgagcacaaagtcacggcaggaacaagatctctccgatatctcgctctccgatgaggagtcgtacctccgggagaaggcttccaacggccgtagacgggcgcacaacagcttttatgatgaaaaggaggaattgtcggtttcacccaagcgtaacgtgcgcgaatccaacaccaggagaaaccgaaagtcaagatctcgctcgcgtgacctcggcatagacaaaaagcgcttgctcgagattgcgcgacgaaatgccattaacatgttcaaacagggaactatgcccggtgtggctaacatgactgcagaggtcaaggacaaggttctcgtcaagatgcgctacggaggtcgcactattcaagatcttaccgacttctgcaaaaaaatctccaacggcgacggcctgtcagatctgagttcagaagaggagtccgatgtggacaagaatggtaatgcgaaggtcttccatcatccctttcagctgaaggagcgcgagccaattgtgatgcatatacgaaactcaacggcgctggttccagcaccacctcgactggacgagcaaacaaaggccataaccatgcagttcccggtgtcgtcgggtcagacccatcgcaacaatgaggtgtgggtgccggtggatcctaaggactcgctagtgccgttgccctccctaccgccagcaaaacaggccaccaatatgtttaaggaaacgccgaagaacgtgttcgcgaagtcgatacccttgcaggagcagcaggaacccgcctttaagccactgggaggagcagtcgtagtcccgcccttagccgccactcaattacccactgttcctcaatccgtcccgccaaccgttcccaaagagtttgcccctccggctgttcccttcgttcccgaggtgcccatcccgtcaacgtcacccgtaacaccgatgcaaagtgcttccatttttcccgatgttacgccgccttccatggacgtgtccagcataatcacccagcgtcttagtgccattcgacgcctgcaggagaatccggccgactctgaggccctaaaaatgatgtacactgcgcaacgcaacatgtcatcgtgggccaactcaaagcatctgcccggtcagttcacgggaagcacgggtgcccaagtgatgaaggcacatgagctgaacagcggtccgcagctgtgggtgcgcaaagaccaaatgacctccaccaaaccggtgactgggggcatgggcatggcgctcctgcaaaagatgggctggaaaccgggcgagggactgggcagatgtaaaactggatcattgcaaccacttttgctggacgtcaaattggacaagcgtggcctggtgtcgcgcgatgacttaaggccaccgcaaatgcgtgcgccggctgcccagcgaagaaataaaaacatggcgggaccaattggagctggcccctgtccagcagttcagggtgcgggacctggaccgttggcgtccacgccgctggtcacccaggataagcatcccgtgtgtgtgctcaacgaactgacctcgaagaacaagtggatgccgccgcagtataagctacgtcaggatatcgggcccgctcacaaccgttcctttctcttttcggtcgagattaacggacagacctttacgccggatcgaggaagcaacaacaagaaggaggcgaaactcaatgcggccgccttatgtctgcgatctttaggcattcttccgcccagctag

SEQ ID NO: 18096 - protein, 874 aa, DROSOPHILA
MTENTEKGASVETPQVAGSQTNPPVQEPLALTKIPPIKVKSERPDAEVEAKLRAMNAKIKAEMVTLMRRSNSNELGNNDESGESESSASADDKKNIKPVKSSNEILAELFGVFNAAPPEELLDDNLFKKKKKVKKEKKDKKAKKKKTTKSDGECSDSEAEGKHKHKRKKHKHKDIRVKDKEKDRDRDKSKEKDRDRVTDKSKEKDRDRDRDRDKSKDKFTAAQAPSEKEKEKSESRKRSAVEPSSHSEKRERHEREKHRDWEREREREKEHERERVRSNNSFYNGQREADRLKGSESASTKSRQEQDLSDISLSDEESYLREKASNGRRRAHNSFYDEKEELSVSPKRNVRESNTRRNRKSRSRSRDLGIDKKRLLEIARRNAINMFKQGTMPGVANMTAEVKDKVLVKMRYGGRTIQDLTDFCKKISNGDGLSDLSSEEESDVDKNGNAKVFHHPFQLKEREPIVMHIRNSTALVPAPPRLDEQTKAITMQFPVSSGQTHRNNEVWVPVDPKDSLVPLPSLPPAKQATNMFKETPKNVFAKSIPLQEQQEPAFKPLGGAVVVPPLAATQLPTVPQSVPPTVPKEFAPPAVPFVPEVPIPSTSPVTPMQSASIFPDVTPPSMDVSSIITQRLSAIRRLQENPADSEALKMMYTAQRNMSSWANSKHLPGQFTGSTGAQVMKAHELNSGPQLWVRKDQMTSTKPVTGGMGMALLQKMGWKPGEGLGRCKTGSLQPLLLDVKLDKRGLVSRDDLRPPQMRAPAAQRRNKNMAGPIGAGPCPAVQGAGPGPLASTPLVTQDKHPVCVLNELTSKNKWMPPQYKLRQDIGPAHNRSFLFSVEINGQTFTPDRGSNNKKEAKLNAAALCLRSLGILPPS

SEQ ID NO: 18097 - DNA, 20700 bp, DROSOPHILA
atctttctcaataaaaaaagatacgagtttcgccctctcatctgattttccccttaagacttaccaaaaataaaaaaatttttcgtcaaaagttgttttatttctatatttagatatattatttaaattctttcgactacattagttttcattttctcagaaaaaagtaaaatattccaataaaatgtttcaaaaacataccagagataaaactcataagtttcgcaaacccctcacaaggtgaaaaaagagttagcgaaatgtggattttttctattgatcaaacttgatatttatgctacacttgcttagctgtaaataattttaagcatactctcatcatttgcctacaagtatgtgttataatgtattgtattttccttgctttgccgttgcgtttgctttatttcatatttttgttcacactccctagcagcttttaatttttggcttccaaaatgttaatcaaaaatagttgaatttcatgggaatttttaagttttctaaacaattttttagcacaatttagtatattatttaaagctacagcttgtcgtatatgtgagtgttggtgggtgtgcctgtatatgtatttatagacgtgagagcgtgtttatgtttgtattgcttattgtggatttaaaactaggattacaattgaactgccaacaggatcaaattaagctttcactataaagcgttttagcaaaaatggtaagccctaacattaaagaatgcaataaatctaaacacatgcatctctgttccaattgtatatatagatctgtatctgtatatatttgtgtatatattcattcattaaactacgatatataaaaatatatacgcacattataccatagaaaatcataagcgtctccgtttacggttgcattaaattttttctttacgaaaactttttggggttttttttaagctttttcgttttttttgttctttttctttttgacacatttttcctgcctaaaagatccctattctaggcatccgacagatcacaataagctgcgccaccagttcctccgcctgttgaagacttctgttcgtcgtccataagaccgtccacaaattcgccaaccgcatcgtggtgatttacctgcggcgatgaggagctctctccgcagttggttgcatacacatgtcgtcgacttcccccaggcagctggttagaatcgtctgtgtccgcgtcccgaatcgagttaaacgcattacaagcgtttgcgttgggcgaacaagtgtcgtcgtttggcggatagacgtggcggtggtagcttccgccaccactgcccccaccaccactgccatcaccgtccagctctgcatcgcgcacgcttccaaataccggagtatgcgagctgcttttgcgcagcgaggctggaggtgaccagacggtctggtaaagcggcgaggcgaacacgtacatgtggttgagatattccatgtcgtagcttggctggtatgagtccgtttccaacgggttgtaggtgggctggtacattggagtctgtctgcagctggccgatcccgatgcgctacctgcgtagtgcggcgtatcatagttctgcgaccgactggagctgctaaggtgcagcatttgagcatgcccactattgctaccgcccgcgctgctcccaccgccgcccatccggtgaacgggcagggtggcgtaaatgccccgatatgcttcatatggcgtctggggataatatgcatcgctccaacgaacgtgattcggggtataatcgccctttgcatacaactattgggaagaagacgaaaagtcaacagttatctcttgaataaagaatattaaaataaatatattaatcacctgtatgggtcggcagaagcccttgttcatgtgacgaggcacgccaagcgtatagctgtgactgaatcctacctccgaactaagcaagtattcgtgaaacttgttcggaaagaactcgatctgcttgtagttgttatatatttccggctgtaatgaaagaaaattaacagatattaagtgatatattcggaaagcggtagcgttataagaaccatattcatgtttatcaataactaaccgttaggttctttttcttcttgtagctggcccagttttgggcttcaagtataagttttccaccgggtcgcagctggttgaacatgcgcttaaatgccatcttcaagccgttgtctccaaagttgagatggatccacttagtaactgagagacacagtatgagatcgtattgctgggtatcgctggccatcaatgactcgtccttgagaacatagttggtgtgtctgaagaagacgtttgccggaaactgattcttgttcccgagcatgttgggcgatttactcgatgataaaatacggggaatacgtccgtaggtcagagggaaagaaatgggaaagaattcgtgtggcttaacaagcaacgagttcaacttctgttgctgttgcagctgttctaaatcatgatgatgatggtgatgatgatgtattccttgatgcaccttgcgtctcctcttgccccgtctcgttttcttgtgagctgctccagatgtctcatccttcaccgcgatattcgcttttgcatcaaccgttggctctgctttgacctccagcagcttttcctccttgggaatacgcacaaagatcgacagatttctccttgctcgtgcaacaagctcccggtcaatgtcaataccgacaattgtttttggtgccagatgtctggccaccgtaatggtcatgtggccaacattgcagccaatgtctagaatgtccttgttctcgaacagttccacgtgacgctggaaaacctgcaagcgcacgtctcgaaactcgttcatctgccgaaagtccacgtagcggtcgaagtttccgtaccggtactttaatccatcggcccgaaactttggcagcattttaattggtggaattttagccggttccagcataagactactagtcagcggtgccttgcccacgaccccagaccccaatgtatcccccatgctgatgtccacaccggccagagaatcctgctcgccggccgtgtgcgaggtggcccccgaagtagtgctcagcggactgcctagcccatgatccggcaaatccggcgtgtcatcacggggtatctccactgcagaacagaaaattgaaagttacatcagaaacataaaattgagggatagagctcttacccccgatgaggggcagctgtttgggcggctgctcttccacgggactgagtagttccgattcgctgacggacgtagagcggcgggtgctgggcttcctagctccgctgggctgaaggatgcgtggcggtctcttccaggctcctggctgcggaaccactggactgacaatcttgtccatggcatcgtgacgatgaaatttctgtgcaaaaaaacaaaataaattaaactggttgtgcacgaagtagtatcattagaatgaaattggctgtatttgttgctgctcttaggtttctttttcaaatcgcagggacattctaactagaattctccggactttttgccatttccctaaaacaatttgtgcccgatgtgcaaacttgcatcatatgaattgatctccgttgctggtcataatttatcactcataaatacgtctattttaaataaatatttaagtcaatttcttagtccatatacatgaattttaaaaggttctagtcgtgtggaaaagtacatatgcacagtgccgcttaacttacatcttacatttttccatctattttttcccattttttgttctttaatagtattttgcacatttttaacccattatatgcaaggcaaaaatagtgggacaaatgcaacggtaattcagcattttgctttgcaaaattcatctgaaataaaactacttgtgacattactttttgtttgaccgggtgattaattgattttacgtattctaaaattcaaggcttgtattataagttctttgtaaaacgagcatatgttaaaaaaagtaaaataaaagtctatatggaatctgaataacaacactataatatatccactaacatcaacattatcgaaaactcttggggactcttgtaaaggagagtacttttatttcatagctttagaggtcaaacctattcagcccagccgaaaacaatgaataattttttgttgtttttaaaaaaataatacaaaatttctgatttctatataaatcaaaatatatcttgtttaaaacggatatttaaaattatataacggatatataaaaacctattcagttgagcgccactgtatgcacacacataaatatcggcttaaaaaaggttcctataataagctagtgcaaaatatttcaccaatatatgtatatctacgacgtcgttttggttataacccctaagctataccttaacttattcggcctaagcacaaaagcaaattggcaaagccaaaacaccaaaattggggaacgtaagagctgccaaaataaatcaaaacaaaagcagcgagtgacttggtgctataccgcaacaacaacaatgggttctcgctctcaatcgttctctccctctcactgcctattcctccgtctttctctctctctctctcgcatgctctatctcggttgtctggccacatggaacgagtttcgttcccaccacattccacccgaaccctactcaccttgctcttttgcgaagtgctgctctcgctgattttcctcttcctcccaccgccaccaaagctactgccgacgctggatgagatgctgccgccgaagctcagacccgtgccgccaacgccgtagcacgtgctcgacaagtccagacgcaggtctcggctggcccttcgctctgccagcgtcgaagccaccagtgaggccgacgtggccgaacagctaaggagcatctcctctgccggcgtctcagcagcagcggaagtttccggagtggggagttcctcggctgcagcggccacatgttgctgctgccgctgtggcgacgacgttgcagtcggcgctggagccgactgctccttgtgctccgcggtcgcagtcgctgccgctgcactggttggcgtcggggtgggcatctcagcggcggtcgtcgtcgttgatgccgactgcggagagtgcacatgcgcctgctcctgctgttgtcccatttccgccgtttcgcccggggctggggcagcggattcgctcagcagcaagctgccgcctacgttaaggggcgctgccaccggcgacgccgccagcgaagaggtggctgcgggcagcggcggttcgtcggtcagctcgcttccgacccctccttcatcgccggcatgcgaggtgttgttggagtcaaagcgccgtcgctttcggttctttcgcgtgcgatagtggtgctgccggtggtggagcatcccacctcctggcccagcgcgcttcatcggcgacgtcagctgcttctcgtactccatggaatcaacggggtccagcaggtggagcggatcgtggatgttaggcggtatgatcacctccactttcggaggcgtagtgatgggcgactggcggggcgtggtcgccggcgtgttgttggtggaggaggcattcgaggtgttctcgttctgcagcgaattaaggttgagtggatcggagatgttgccgcccagcagaaacttggtgggcggtacaatcacctccttgcgtaacctcttctccggcaaaaagaacttggagcggccgcagcaatagtggactgcgttgcccgctccagcgctgcccgcaatgctgctgttgccgctcagcgagctggtgtccttgcagctctgcgcttccttgcacgacgctccgccgccccccgctgaggcggtagctcctccgcttcctgccacgcctactccgccgatagagctgccgttgcatcccgtcaccaggcagcacgtgtggttagcattgtttccggcgcacagcacgtggtgatggtgacctctgggaaagagaatacacagttccattaaattacctataatacttacacacaatagcgaattaaaccgttaagtcttctcatttttctccaacaaaaaactttacacaaatgacaaaaatataaaaagtgaaaaggaatctggcttcggttagccgaatctcatataccctcacatattgatagaaatttgcacaacgctgagtatatgtttcggacggatattgccaggtcgacactgctagtgatcctgatcctgatatagaatatataccgcataaagtatacggttacattccagtttaaaaagtaagttacaaaaatagcattatatttctggtgtaaaaaaaatgttatatagtgctattatttttacattatttttacattatttgtacatatgaacatatggtccttataaaatcgaaaacgatttaatgaaaatagcactttataataatacctcaacattttcttatgcatttgaatggttcctcctccgctggctccaccagcggcagcgttttgcgccagcctagtgttgtgatggtgatggtggccacccgctgcggcatgatgggcgccggcaccaccgccaccgccgtgatgcgctgttccggcgttcccatgatggttgactccaccgccggcagtcagatttttgttatggatattctggatgttctcgagatccgccttgtgagccgacgccgcagtgggaaggagagtcgcggctatgaccgaggagcccgtagactgggcctggccactgcttgcgccgacacaggcactggggttgtgcttcccgccggccttgtgttgcctcttactccaggccttgttccggtttttcgggccctgctgctgctgcggagcgcggaactggtgatgctgggcggcctgtgattttccgggcaacggagtgggggacttagactttccaggcgctgcagctgggccattatccggctgctggggcagaggctcttgcctggaagtctgatccaggcgcagagtgggcgtcatggtggatctcgttacgcgacaatctccgggactgtcgctaagccgcttttccatatttctctagtgaatgcacgccatagactaaccctattttttaaagagcaatcggcccttacttttaattcagttttatgcaggcacacttttcaaatatttgtcttgtattttcactttttgatatttaatgctacttcggacacagtttataaacttactcgagagccttgctccctcataagattttcaattaatacgctcgaatggcagtcaatgtaaaatgcctgataggcattaacccaaggctgcacttaatattgcattctttggcgtacgagttatttctttttattttaaaacttcaaccgttttcactttcactgttaaatattttatcgaaattatccattttggtgagtatgttcttgccaatggttctcctcccttcactcttctcgttatccactccgttgagatgtaccctgcaagagtcaagagataaaatggggaaaattaattgtggaatttcactgcatctgaacgaacgaacgaactgaatgggattactgggttccgccagaagctctgctgatttttcaacactcgaacagaacagcattttgcattcgttatttgcatagaccaaaacaggatgggagctgaagctgaataaccagcagggaaggagtcaaaaccgcccgaaacccagccaaccaactaacgacaaagacgagctttgaaaaattgagtgcagacgatgctgcataccccgattctatcctcgttccccttgtggtcgtgtctagcctggcattaatatttacatggcaaattgtggctggaactgagaggcttctctcgtggctctccccttcaccagttacctcccttgttcgttttggcggttttgtggattgcaactaacaacctggacagacacacaaggacctcttgaaaagaatatcaaaaaattctaccagtcgaaaacagatttgtgagaagagcggaaaaaatgaagttgcagaagaaacgaaacgaaatacaaaaggatataagtttaatgtgcaattgcagtcgagaagggacgtccgtgtaaagtaaactgtgacccccagcaactgtcatatccaatttccattacatatttttaggaggtaagccgaagtttattgaacacgtatctaatgtcaagcatttcaacagatgactttttaaaggacaaaaatgcaatcgaggcttacccatcggcggttactttatttgtttatttgataagcaaaacattgataaggatacaaaatccattttccataaaatattgtagacagatatcgactctctggttttgaattggaagtgactagttcggtaatggatgaaataaaggtttaaattatccttcagtcgccaggatcctgaccccatcctggataggaggctcgctcgaaggcaatttttatttgcatattattaggcgcgcgaacgcgaaatggaaacatgccgcgcccaccgaatggcaaagaacctaagaggacgaagtgggctgtgcggcaggccctgaagaaaattttaattaaaatttaaatatgcggcgcattgttgccgtgccaaaggttgttccattcctttgccaaggccccatggggaggcaagttgaaaactgggacactgagcggcggaggtggaaatcgctaagaaaaaacaattgcttgagtcttgaaagcggagccatgaagattctatttttattattttgctgagcgtcctggtcgccggaaattgtcaattatcttcaattcgtaaataatttagtgtagttgcttttagttgtttagaaatgtgatttgcgtgtaaataaattgagtttatttgtcaaggcttcttttaaagcaacattcgccccctccgatattaaagattgcgggaaaatgtccaacaattgaagttgctaggggcagcgagaaaaacaacaaaggcaacatggaaagcggggatagccaaatatctacgaggcacatgtgtttcgaatggcaaaataactcctgtgggacaacaaattcaacactagcagagcaatagtacactgagagactgatatattattagaaaagactttagagagacagaagacaaaacgaatgaatacccagattattcgatttcaattgtttttacataagttttacttaactccctcaatgactaacatccaaactttattaggaagcaaaaaaactttttttcataaactagaaaaatatggaaagtattagtggaaatttcaaagggaaaactaatttaatgtcttgccattagagagattgttatagaatgacgataactggtcggttagaatacaatgaatattaaagttttaacctctttaaatattatttcttcaaggtacggaacgccatccccgctttatcaggcgtatttttccccgcattttttggaaatgccaattctttgaaatgtcctggtgcctttttccctaacactctagctcggctgtcaacatgtcggcaccaagaactgcttatccttccctcccagcgacatttcccaccgcctttcttgcccataccccattgccagcacaattgtccccagcagatgctccatccgcagagccgtcaaaggcgactgtcattcggcacaggtgcattaatgcaccatatgtgtgactgggtgagtgtgcgattccacaacatacagcgctgatgtcttcctaataataacccttttccgtgactgtacgagccttttgcttcgtgttgcagaaacgatattttcgtcaacatttattgatacgtttttaggaaaaacagctaacagaagagatggataattttattttgaccggattgggaatgtataaaataataagataagaaactaaaacaatatggcactaaagttgcaggacaagggctggcgtgtcaaaactattgttccgactgcactttgtcagttgttctcggttgtgttaagtgcttcgcatttccacttttactcaacttcgacatttccgcctttttcaactttcttagctatagccaagagtttgatgcgcaagtaaaattactgccaaccccccgaaagtacaaatcgtattaaagaaagcgattaagacaggtaaatcagaagaagcagcagcgaaattgctgataatgacgatgagaacggtaatcaagagttgagattgcagaaatcgaagtctagtcaaaaggccagataatcaattatgtaaaaagccataggaggaagcaatacaaatgggaaaatgtgaatcttgcttgtcacagcaataagccgaaagaaatggcaataaaaacgccgaaactggaggcggacaaaagcggagggggtggtcaggtcagacaagggctgcataattttgcaaggctattgactgattacgtgcgactcgctgaaccctgactcatgcgcaagactgtaggaaaaaccgaaggtgcggcgaattaaattgcaatgagaaattagtgaaaatgagcataatatgctctaaaaacgaaagtttaacccagagacaaagctcgagtgcctcgactaacggatacccggtggtactcagctaaacggagtacgaggaagacgtatgcaagaagcaaaaccatcgaactttacccatccaactattgaaaatgggaaaagcgaatagctaacaaaaatgtaagaatttatttagcattccaatcaaactaattacttctctttataaaaacgcacttaagacaccttaagtccgttgttcttccgagttttgcaatttcttaattggaattattcgttacgtggtatagtttgtgtttttcattctggttttgctgctgccctattgactggttgcgactgcatttgtcatcttttttttttttttttttttgatttatttttgttgcatttcgaggccaacagcgagcaaacatgccacgtactatcttcttcttctcaatgtatagatgtggtgtccgatgtggactagtcaactttccaatactcgctggttgctcccagcgtggttggtttttagtttcaaaagagttcttgggtctggggggctcaccttttgtgattttcagcattttgccttctcgaaaagtaacaaattttattattttctccctcctttggtgggtttgtgggtgacgtacgtctgcgtgactgtaaaggccatgtatcatcgatatcataactaggaactaaaacttgcaagtagaagtaatagtggtagaaagttttaactttagtccagccgcagttgctcatagtttttcattcaattcagttttaggactgacatacaatgtcaggaaaaacgctgtcttccattttataccttaatctaccaaggatagtttaaaggaatactttatcgacttttaatgtaatattaagtatttttaaattgattcaaacttactcaaaatgcaaactagaaacctgtttaaccttattagtgctggaactaaattcacatttctatagtgttcatgttttgatgctgaaggtcaagtcaaacaattgcccatttccttcttctgcttccccaactgattgatttctaattaactacattctaaggtccttataatggcagcattgtctcgcaagcaattgagtaaaaaaatgcagtaaaacatatacatgtataacataacgtatatataaagtccattaagataataacaagagtattaatcaaatactattccttaaatatgttcaacaatatgttgaaaatgttttttgtttttccctgctttagcgcaactacaaagcgactaacatgccaatagttagcgcatataaatgcgaaaacagaaaaatgtgacatgtaaacaagacaaagaatctcggaatgggagggctgtgggtgtgaaaagagaaaaacataaaataaatacaacgttcaattgtgtcaacaacggcaagtacaattgttggccgcaaatgcagaatttcccccaattttcccaacattactcctggtaagataacctcccaatccgcccaccacctcccttttttgcagtccgtctggacacgtttcacaaacaaatgaattcgttaaaatttatagtgcacatgcaaattgcccagaaaagcgatggcggagcgataagttggccgagggcaaaaatgacatggttcaattttgggggtcgaatggaaaccaaattgaaaccgttgaaaacgcaggtaataatataagcggtaaacgacatgaatgccaaatcgggggcggatgcaacgacagtcaagcgcacaaaacactaaattcagaaccgcatgagcgggcgaattgttgttcacgctctattaaaccgggttttcacatagagatgaaggaaaattggggaaaatcggcaaaaacaaggcagggaaaaggaaaagacaaaagttccagacttccagaagtgagagttttagcgttttgtgcacctcaatcacgaaacgccaaatcggctaaaagcttttgtgagcttgctttacgctgaaatagaaatgaatggcctttttatgaaagtatacatcgaaaaaaataaattgtcattttctaattatgccaatgatttaatcgtttaagctaccaatgcattgctatgaatcattggaactgaaattcctacattaaaaatcacctattggttgttcttattcttggcgatgtcagctatcaacacatttttatacaacacacttgccaataaggtattccagcttctaggattcgttgggtttgtatttgtttttaaagagcacaatagtgcatacataatttacatatgtatattttttctttcttgaaaatagatggtaacctacatcaaactcctactcaaccgaaccctatcgatttcatattttcacttactaactatgattgctgttaatgatctacatgattacatattttgtggtagaactagaacactttgcaccgccaaatcaatttggccaattagctttagcctccataaatctgctatgaacgcggagtgacgcgaactgagagcatgaaagacagaagtggaaaatgggaagtaatacaataaagagaccaaactctagaaccattttctgttctactttgctttctcttttgccttttttatcaacatcgtcagatgtgctctccgctggatagcactctttttaatttattactccgtttctcctatttttgagcattagctttttgttgctattatatatatgctttactcgtagagtaaagtgttatactagatgagataaaaagtacgtaaaagttataaggaattataagttgttacattttattattatttgctaacttctatcgattttttttaaagaatttcgaaatattttgtgcaacgatgtgccatacacgttatttattgttattttattttaatataatggttcacttttaatttaaaaattttgaaatacttccttaatggccattgatgcatgcttctggtattgcaattgaaaagcattaagaaacaaaaaaaaacgcaaaaataatctatttgcttatgcgtgtacctaatacactgaacaaaatgcttttaagtgtcaatgactttgaaatatcattatcctttcaacagtctttaaatgttataatttcaatttaattaacattccatcatatctcataatttttgcatatttttcgttcaacctaacaattctatgacattttttgaatttcgtatatttgtattttaaattgtatttacattacaaccttaaattttgaaatcaactacttttagagagcatgactgctttttaattgcatagggttaaaagttaagcaatatgtttggttttatatttttatagactttacaggaagcttgatctatacaacgtaaataggacatattttcgaatcttattcgaaaaaaaattaatagatccactaaatggcacgcctttttgtgcttccgctggattactattaagtaaatttgattcatcctatcatgaggccacatcccagccgaaaactatttttttggtgattcatacgaccgctaatggccaacgagaacggtagcggctgcagtcttttctcaaggactccggaaataagccaattggaatcgagactgccgcggaagactaggtctgccttgggcagatcaatctggtatgccaccgtggccgtcgactcttgctggcggatattcgtttccacctcgactccgatctgtagctgatcactggccttctggtagtaactaaggtggaatccggcgggtcccaaagtgcaagaccacacggtatcaccgaaggcgtaacgtcccaccgctgataatacagccacttggcgtccgggcacattcggcccgtagtgataggcgaactccgatcctagcgccagacgtttggtgacggactgcaagtactggcacacaaatactccggaactcgtaaaaaaccccggattgcccattgtcagggtcagcgtgtagtctctgccgcgatagtcccccgtcagctgggtgcccaccagctttgagtcctggaactgcgaggcaaacttgcacctcaaacgagaggtcagttgatggataacgtttgcattaagattgcccatcggatcgatctcgccaagaagaaccggaaaggcttcagtcggcccgtattgtttggtacccacgtaggtagctccaaaacgatagccacttggaccagccgaattcatgttaatggtgtgggtcacttggaagtggttgctcagacccttgttcaccataattttggcgccttcgaaggtgttggcctggatgtcgcgacagcgactgtgcagttcctcaagagttccgggatttgtcaattcgggctttttagcttccgcctttaaggcctccaccatctgtggcggcactccgccggaatactgcggtgcctccggcaagcgtagtccggcggacagatgtccacgcccacgagaggactcagcgtctgcggtggacgccattacgttgcccattctggaaccgttttggatctaacgtgattaaattttttttcttttttgcttctaccaaaattgttttccgttccggcgttgtgtgtttgtgctcaaacttcaaaataaatacaaaaacaaacttatatgctgtcaaggagcttcaaatttaataatttttctgattgctttgattcgggcttaaatgatcaacttcttctaagcaaagcttggacaaacagaaacactcagcagaaatccaaacgaagtaaatcgagaattgaagctcatctgtttagttggttaatattttgctgaactttagtaagccccattaacatataagatatatctcatctttaatttttcaattaatttacctcattctacgcccaacgaaaaaaatagcgatatcattgcggtaataataacacttatttaaggtttctatccaccgtaagtataaaatgcttcagtttaatattttaaatcattcagggagcaaatgctacgcctaattttaaagttatttcacacttaagtcgtacacatacagaatggggaaaataactttgcgatacttacaacaaaatccgctcaaagtgactgcataatgtgtgcctatcacaaccaagacatctcctaacttagccatataccacaggctaatacacttttggctcagaatcggtgaagcaaaagtcgaccaactttattttgctacaaacacagtaaacaaacttcatctgcgccctaaacaacttatacatacgcataaaaaagctcattgactgaaagatacaagcaactttgaagaaggaggaaaagcaggcctggctcggttagctgagtgggtgtgggtgaaaaacttgccaagaaaatatttccgacgacatccgctttccgttcggagacgccgcgcattgctgctggctgggtgtcagaagaaaaaggagtcctggaaccattacaaaagctaataaacgcacactctctctcacataaataggcactgagagaaattacaatacaattatcaatggtaacatcactaatcgagagataaatattcgtggggttaaggattacaacgttaatgcgagcacagactgtctgtctgcccggcttcctgctattttaggtagactttttttaattgtattgcagtattttaattaattcccggacagtttgaatatgagttacgaactttccactctgtttcgtaaagtcaaaccattagcactcatgctttgacagtaaattctctaatgaaattaggcaaaaaaaagcaccaacaataaagcttgccaaaaaaataaacacattgtctacctattttgtctacttgatgtcactttccttcaaggcaagtgcaaataccaacaacaaaaacgacgcaggacatcaacggtattttattagcaaataaatgtaaaaacaaatcctttccaaatcctttgtaatcaaaacaaatacctccgaatcaaaccccttatgcttgctgatgtcctaaatgaaaggttcagaatccaacacagccaaattaattatctaagccaacaattcattgttctacattaaaatattctcgtctcttttcatacaaaaaatcgacttgagatctatctgttaaatgcgccgaaagggtagctacataggttcatcagaatagcgagcacacacacagcgcaagaaaaaagtaatgaaaaagtgacctcaaatgtgtgtatgtgcatatctgtatgagtgaatgttcagattagcccgcccggaaaccagggagatgagtctgcatgctgacgtggttgttgtttcgtctgaacacaattttcgaatagatctgctgtaatcaatagatatatctgctacccaagtatgcatatattcaagattggaaaggacaagccaaaaaataacggatagcgtcaattagttgtttttctgctggtcctaggccaacacaattataaaaactttccccgatttctatacctgcaactcgtctagaaagtagtaaatacgttgggtatatattgctcatagtcttttgtttatttaaaaaaaaattgctaacaattgtatctaaaatgtcttctataaattaaaatgagctcttggttttcttaaatgactctaaaactagaacggtaaaaggtatacattttagcacacagttctcattgaaaataaattggattaacttgtttagtggtgatcaatcaatcaatattttttttaattatgttcttgtcttattctaactcttttgaatgatttcacattgtaaatattgtatatcaaaagaattgtaatttcaaaattccttgtaattttcccttgaaatttcctgccactacttgagtaacgggtacgtgatagtcgagcaaatgaactataccgctctccctggctatatatatgtatatgtgtgtacatttggcacaaatcattcattttgttattttcaaaattgtatttctttccgttcttccagttatgtattaccatacctcttttacgccctttctcttcatgaatttcgaatcttttgggagcgcttaaaaaatagagtaaaaaatactactcgtatcatcgaatcgagtgagattgtgtctgatttttagctttaagtgggcttatatgtagtcgtcgagctcaaagatagaggagcttaaaactcgttattgccttcaatgcaaagcagcttaccgattttcttattcattcgccctctcacggtcacggcatatttcttgaagctaaagctaagagccgaattattcaggatctgccttgcttaggtggaattactttgttgcctgttttagcttgttttcatttgtaaacgatatttttaacgtttgaataactatgttgaagtgtggatagtcaccactacataacatgaacttagcgtcataagcgtttagctacataaaccgattaaaaaaaacccattcaacgaaagactgtatttatttacagttcaactgtacagttcaactgtaaataaattgagcaacgataattcttaaaaagacgaaacatatacattcatgcagcacacattcttattatgtacattgattaatgatttcagaataagctcagtcaacttttccggttacttaaacttcacaagtgctcaaagtatagcaataataaacatatctacactttatatgcctaaagtaaattcaaccaacatatgttgataatgtgtagataatcgcacggaaacatctaaataaatacataagtacatatgttgtagaattagtgtccgttgagttacatacacatattaaattagaaaccggccactgatagtaaaattttcaagcacgcgaatttgttaatatttggaaacatagaaaacgtgctcagttacacctacttttttcaatccacgcccttttacatgaagtatagaaaatccgaattgagatccggcacctggacaaatggtaggctgccatttgttgtgataaattaaggtaacattgggattttcttattttttttatctaaaaattcctctctatttgtctctctgtctttgttgtacaaacgagcagcagaaatacgtaaaacgcgcttgccttgtctaattaatgcaaatttaattgccgccagacattttaatgaaactgaaacataccaggcagcggttcgtgggcggcaagggcttttcggcatgggggtgggtaattttatgtgaagctaaaaacactgggcaggattgcaaactcattggggccacgaactgctggttattctatgcttttttaattcataaatagttaggttagctgtatgattttggtttggcaaaaggcactagaatttcattatcaaatataacaatgcctgatgactgttacgttttaaattaatcacttatcaaatatcactttcgatatccaaagagagcgagaaattcatgaatgtttgttcacttcagtttaaacccctttaatttcaacgctttaaatatttttccgccccttcccgctttcgataaatatttcttgctgttatttataggattttcttttattttcgctgcttccttgccccgttcagtcggcgctcgtttcagttccacttagttttatttctcgcacagtggttcgctatttcgcggaacgtgcaaacttgggaagatacacttatatttttcactattgaaccattttgccacacggttcgcttctgcgtgcaaatgtcgccgatttcgttgttgttgttgtattcgttgcaaaagagtatcaaaagaagagacggctcgctaaatatcttaagctgttgttgttgtgcgctatttaaactcgcgcacagacacaaagcacttatacacacgtatatgcatgtagttgtatatactgtatatactgcaattttgacacacacaccggggtgaaaaagagaggaatcatctcgttttcttttcaaaaaatacttacaacgttagaaaacacctaattaagcgctttaaaactgtatattttttctatcgactctgccccgtgctttagtcaatcggttacgcacgactaatcgggtgtgttctattgttttgccgtcggtcttttctcatttccactgtgtgcagctggtactcgatctcgttattaattttatatctcggcaaagcggactcttgcttgaagtccgaatgcgtcgcgggtttttcgacaaatgaaacgtttcagtgccaaagcgttgcgctgtggttgctatgaaacaatatggaaatacgtgaaacagatatggaaaagagagtgcacagtgggaccttacatgttaccaaaagtcccgaaaattacaaaattcatatatattttagaattctagtaaaattcttataatttcttaaactttctagcgcgcttcaggacacgagccttttaaataaaagaggaataaatcaatttcatttttatgataaaacttgaagacagatttgctctcatcaaaaattttaatttgacaaaataaacactaatatgtgcattaatatgtatgtccaatcgttttagagaaaaatttgaaacgtattaagacccgattgctgataagagaaggcttttaaaaagccaagtgaaaatcgaagctcgctcctgtatccatacctgaaatgtatttcaattgttaagcaagtttacaacccactgtgcgaagacggagtggcggtcggtcaggtcggttggttcatttgccattcgctcgtctctcggctttatgagccgaatgtgatgtacaaacagtgagaaaactggttgtgtgtgtgtgattgcgccatcgctctatgcctgtgtttctctctgagcagagcacatttcgtttgtttacagtttttcgtttttgcgccatgggaaggctgtattcggattctctttaagcaatgaatttaacaaaaaattagctagccagtgaagcatatctctttaattctaggctgtaaaataatttttaaaaataccgatatgttttctttgtaagagttggcaatctgaatataacattcatttcattcattcatttcattcatttcttaataaaaataatgtcatgtaatagttttttacttaaattttccagaacaactattttgtttccgaataccttagtattaactctctaagggtaagggtaggggtattaattctattaaggg

SEQ ID NO: 18098 - DNA, 4743 bp, DROSOPHILA
attcggacttcaagcaagagtccgctttgccgagatataaaattaataacgagatcgagtaccagctgcacacagtggaaatgagaaaagaccgacggcaaaacaatagaacacacccgattagtcgtgcgtaaccgattgactaaagcacggggcagagtcgatagaaaaaatatacagttttaaagcgcttaattaggtgttttctaacgttggtacatctcaacggagtggataacgagaagagtgaagggaggagaaccattggcaagaacatactcaccaaaatggataatttcgataaaatatttaacagtgaaagtgaaaacggttgaagttttaaaataaaaagaaataactcgtacgccaaagaatgcaatattaagtgcagccttgggttaatgcctatcaggcattttacattgactgccattcgagcgtattaattgaaaatcttatgagggagcaaggctctcgagtaagtttataaactgtgtccgaagtagcattaaatatcaaaaagtgaaaatacaagacaaatatttgaaaagtgtgcctgcataaaactgaattaaaagtaagggccgattgctctttaaaaaatagggttagtctatggcgtgcattcactagagaaatatggaaaagcggcttagcgacagtcccggagattgtcgcgtaacgagatccaccatgacgcccactctgcgcctggatcagacttccaggcaagagcctctgccccagcagccggataatggcccagctgcagcgcctggaaagtctaagtcccccactccgttgcccggaaaatcacaggccgcccagcatcaccagttccgcgctccgcagcagcagcagggcccgaaaaaccggaacaaggcctggagtaagaggcaacacaaggccggcgggaagcacaaccccagtgcctgtgtcggcgcaagcagtggccaggcccagtctacgggctcctcggtcatagccgcgactctccttcccactgcggcgtcggctcacaaggcggatctcgagaacatccagaatatccataacaaaaatctgactgccggcggtggagtcaaccatcatgggaacgccggaacagcgcatcacggcggtggcggtggtgccggcgcccatcatgccgcagcgggtggccaccatcaccatcacaacactaggctggcgcaaaacgctgccgctggtggagccagcggaggaggaaccattcaaatgcataagaaaatgttgagaggtcaccatcaccacgtgctgtgcgccggaaacaatgctaaccacacgtgctgcctggtgacgggatgcaacggcagctctatcggcggagtaggcgtggcaggaagcggaggagctaccgcctcagcggggggcggcggagcgtcgtgcaaggaagcgcagagctgcaaggacaccagctcgctgagcggcaacagcagcattgcgggcagcgctggagcgggcaacgcagtccactattgctgcggccgctccaagttctttttgccggagaagaggttacgcaaggaggtgattgtaccgcccaccaagtttctgctgggcggcaacatctccgatccactcaaccttaattcgctgcagaacgagaacacctcgaatgcctcctccaccaacaacacgccggcgaccacgccccgccagtcgcccatcactacgcctccgaaagtggaggtgatcataccgcctaacatccacgatccgctccacctgctggaccccgttgattccatggagtacgagaagcagctgacgtcgccgatgaagcgcgctgggccaggaggtgggatgctccaccaccggcagcaccactatcgcacgcgaaagaaccgaaagcgacggcgctttgactccaacaacacctcgcatgccggcgatgaaggaggggtcggaagcgagctgaccgacgaaccgccgctgcccgcagccacctcttcgctggcggcgtcgccggtggcagcgccccttaacgtaggcggcagcttgctgctgagcgaatccgctgccccagccccgggcgaaacggcggaaatgggacaacagcaggagcaggcgcatgtgcactctccgcagtcggcatcaacgacgacgaccgccgctgagatgcccaccccgacgccaaccagtgcagcggcagcgactgcgaccgcggagcacaaggagcagtcggctccagcgccgactgcaacgtcgtcgccacagcggcagcagcaacatgtggccgctgcagccgaggaactccccactccggaaacttccgctgctgctgagacgccggcagaggagatgctccttagctgttcggccacgtcggcctcactggtggcttcgacgctggcagagcgaagggccagccgagacctgcgtctggacttgtcgagcacgtgctacggcgttggcggcacgggtctgagcttcggcggcagcatctcatccagcgtcggcagtagctttggtggcggtgggaggaagaggaaaatcagcgagagcagcacttcgcaaaagagcaagaaatttcatcgtcacgatgccatggacaagattgtcagtccagtggttccgcagccaggagcctggaagagaccgccacgcatccttcagcccagcggagctaggaagcccagcacccgccgctctacgtccgtcagcgaatcggaactactcagtcccgtggaagagcagccgcccaaacagctgcccctcatcggggtggagataccccgtgatgacacgccggatttgccggatcatgggctaggcagtccgctgagcactacttcgggggccacctcgcacacggccggcgagcaggattctctggccggtgtggacatcagcatgggggatacattggggtctggggtcgtgggcaaggcaccgctgactagtagtcttatgctggaaccggctaaaattccaccaattaaaatgctgccaaagtttcgggccgatggattaaagtaccggtacggaaacttcgaccgctacgtggactttcggcagatgaacgagtttcgagacgtgcgcttgcaggttttccagcgtcacgtggaactgttcgagaacaaggacattctagacattggctgcaatgttggccacatgaccattacggtggccagacatctggcaccaaaaacaattgtcggtattgacattgaccgggagcttgttgcacgagcaaggagaaatctgtcgatctttgtgcgtattcccaaggaggaaaagctgctggaggtcaaagcagagccaacggttgatgcaaaagcgaatatcgcggtgaaggatgagacatctggagcagctcacaagaaaacgagacggggcaagaggagacgcaaggtgcatcaaggaatacatcatcatcaccatcatcatcatgatttagaacagctgcaacagcaacagaagttgaactcgttgcttgttaagccacacgaattctttcccatttctttccctctgacctacggacgtattccccgtattttatcatcgagtaaatcgcccaacatgctcgggaacaagaatcagtttccggcaaacgtcttcttcagacacaccaactatgttctcaaggacgagtcattgatggccagcgatacccagcaatacgatctcatactgtgtctctcagttactaagtggatccatctcaactttggagacaacggcttgaagatggcatttaagcgcatgttcaaccagctgcgacccggtggaaaacttatacttgaagcccaaaactgggccagctacaagaagaaaaagaacctaacgccggaaatatataacaactacaagcagatcgagttctttccgaacaagtttcacgaatacttgcttagttcggaggtaggattcagtcacagctatacgcttggcgtgcctcgtcacatgaacaagggcttctgccgacccatacagttgtatgcaaagggcgattataccccgaatcacgttcgttggagcgatgcatattatccccagacgccatatgaagcatatcggggcatttacgccaccctgcccgttcaccggatgggcggcggtgggagcagcgcgggcggtagcaatagtgggcatgctcaaatgctgcaccttagcagctccagtcggtcgcagaactatgatacgccgcactacgcaggtagcgcatcgggatcggccagctgcagacagactccaatgtaccagcccacctacaacccgttggaaacggactcataccagccaagctacgacatggaatatctcaaccacatgtacgtgttcgcctcgccgctttaccagaccgtctggtcacctccagcctcgctgcgcaaaagcagctcgcatactccggtatttggaagcgtgcgcgatgcagagctggacggtgatggcagtggtggtgggggcagtggtggcggaagctaccaccgccacgtctatccgccaaacgacgacacttgttcgcccaacgcaaacgcttgtaatgcgtttaactcgattcgggacgcggacacagacgattctaaccagctgcctgggggaagtcgacgacatgtgtatgcaaccaactgcggagagagctcctcatcgccgcaggtaaatcaccacgatgcggttggcgaatttgtggacggtcttatggacgacgaacagaagtcttcaacaggcggaggaactggtggcgcagcttattgtgatctgtcggatgcctag

SEQ ID NO: 18099 - protein, 1367 aa, DROSOPHILA
MEKRLSDSPGDCRVTRSTMTPTLRLDQTSRQEPLPQQPDNGPAAAPGKSKSPTPLPGKSQAAQHHQFRAPQQQQGPKNRNKAWSKRQHKAGGKHNPSACVGASSGQAQSTGSSVIAATLLPTAASAHKADLENIQNIHNKNLTAGGGVNHHGNAGTAHHGGGGGAGAHHAAAGGHHHHHNTRLAQNAAAGGASGGGTIQMHKKMLRGHHHHVLCAGNNANHTCCLVTGCNGSSIGGVGVAGSGGATASAGGGGASCKEAQSCKDTSSLSGNSSIAGSAGAGNAVHYCCGRSKFFLPEKRLRKEVIVPPTKFLLGGNISDPLNLNSLQNENTSNASSTNNTPATTPRQSPITTPPKVEVIIPPNIHDPLHLLDPVDSMEYEKQLTSPMKRAGPGGGMLHHRQHHYRTRKNRKRRRFDSNNTSHAGDEGGVGSELTDEPPLPAATSSLAASPVAAPLNVGGSLLLSESAAPAPGETAEMGQQQEQAHVHSPQSASTTTTAAEMPTPTPTSAAAATATAEHKEQSAPAPTATSSPQRQQQHVAAAAEELPTPETSAAAETPAEEMLLSCSATSASLVASTLAERRASRDLRLDLSSTCYGVGGTGLSFGGSISSSVGSSFGGGGRKRKISESSTSQKSKKFHRHDAMDKIVSPVVPQPGAWKRPPRILQPSGARKPSTRRSTSVSESELLSPVEEQPPKQLPLIGVEIPRDDTPDLPDHGLGSPLSTTSGATSHTAGEQDSLAGVDISMGDTLGSGVVGKAPLTSSLMLEPAKIPPIKMLPKFRADGLKYRYGNFDRYVDFRQMNEFRDVRLQVFQRHVELFENKDILDIGCNVGHMTITVARHLAPKTIVGIDIDRELVARARRNLSIFVRIPKEEKLLEVKAEPTVDAKANIAVKDETSGAAHKKTRRGKRRRKVHQGIHHHHHHHHDLEQLQQQQKLNSLLVKPHEFFPISFPLTYGRIPRILSSSKSPNMLGNKNQFPANVFFRHTNYVLKDESLMASDTQQYDLILCLSVTKWIHLNFGDNGLKMAFKRMFNQLRPGGKLILEAQNWASYKKKKNLTPEIYNNYKQIEFFPNKFHEYLLSSEVGFSHSYTLGVPRHMNKGFCRPIQLYAKGDYTPNHVRWSDAYYPQTPYEAYRGIYATLPVHRMGGGGSSAGGSNSGHAQMLHLSSSSRSQNYDTPHYAGSASGSASCRQTPMYQPTYNPLETDSYQPSYDMEYLNHMYVFASPLYQTVWSPPASLRKSSSHTPVFGSVRDAELDGDGSGGGGSGGGSYHRHVYPPNDDTCSPNANACNAFNSIRDADTDDSNQLPGGSRRHVYATNCGESSSSPQVNHHDAVGEFVDGLMDDEQKSSTGGGTGGAAYCDLSDA

SEQ ID NO: 18100 - DNA, 4252 bp, DROSOPHILA
ccagaagccgcgaaaccgctacaggccgcagttcctggagcacttcgatcgcaaaaatgcgggagatggccgtggcgatgaaaaacccatagccacagagtattctccggcagcagcggagcagcaacaacaacaacaacagcagcagcaacaacaacagcaggatgaacagcatctggcaagcggggccaacgatttgaacaactgggagcacaacatggaaatgcagttccagcagatctccgccattaatcagtatggtctgcagcagcaccagcagcagcagcaagttctgatggcttatcccctgatgaacgaacaactcatcgcgctcaacaatcaaccgaatctgctgctcagcaacgctgcgccaatgggacagcagggaataccggcagcggctccagctcaaccgccgcccgcatatcagaatcagcatatgcatacgcaatcgcacgcctatgttgagggtgagtttgagttcctcaagttccttaccttcgacgatctgaaccagcggctgtgcaacatcgatcacgaaatggagctggagatcgaacagctaaacaagaaatacaatgccaagcggcagccaattgttgacgccatgaatgcaaagcgcaaacgccagcagaacatcaataataatctgattaagatataggtaaagcaactcacaatttcgcaagacaactgattatgaaatctcaactcactcaattgcctctacattgggttaagtttgcagatgaatactgaatcttacagacccatcatctgtatcctctagaaattattcgtgcattgtgcaaatttaacctggtggaagggtctaaaatcaatcacaagaaatgaaaacacaaaagctttattgtaaaatgcagtgaaaacagaaaagaggagtcatcggcagtatcttccagcacgaaagcatattttctgttagatttcatcaaatttatgcttggtttcttatatcctagctttcattgatctgtcttttaatataaataggtatgctcgaataaaatttatcttgcgtttattgtagctgcccgtattgtgaactgcccaggccttatcataatttaataagacttataatattcgttcttccttggtaactattaacctttatctctaaaacacttattttctgtcttcgtgcgataaaaacagtaacccgtcaagcaatacttataaaggagaaacatttttatacgcattggaatgcatatttttcgaacatatatttatcaaagcaaaatgcacagaaacactcacatttaaacatttatatatacctagtacttttagcaattataaataatttacataataaatatataggaatatatgaatcaaaaaattgcatacaatatataacttattcgaaagatacttaagaaaattttgtaataagtaatgatatatgtagaccaaggaaacctcctttttattttagtatgactactcttgtatatccatttcctgagttgcctgctgcatgtcgtgcaattgtgcccgcaaatcttcgggcaaagtgtgctcgttcaaggcactagggtcttcaccatccacgacaatctcctctggatctggggctcgtggcaaaaagtcggcatctgggaacattttgccaaatatgtcgcgagcattggcaatggccgcgtcataatccagctcgtaggtaggtggatcggtgtagtaaatatgctcggcagcgggacttttactagactgggcagcaattgtgaagtatgagctaaatattatttgtgcgtctgattgatcgaagagttggctagtgaaaatggctagatcagacgctggatcctcgctcaacgctggcgtggtcagatggaagatatctgtaaaaattaattcattaaaaaggaataattcacatattttcttaagtttcttacataaaccctcgggacaggctcccgtgtagtgcgacagttgtattaggaaggcttcccgtccaccttcattgtcaagtagtcgaagaagatttacaccaccacctcccttgttcagctcctcattgcccaggggactggacgatatgaacaagccacgtgagatgtgcggcttcaactcgatgccctttgaaactggtgtatagccaggggcagagaccacattcttggcacgcaaagttttccctgcgctgctcagcaggaactcattcgaattggaatctaaggcaatgtcgtcaacggctcgctttaggcagtaaatgccaccataaacagcgcacaaacggcagaagcactgcggcaattccccgcagccatacatgggaaagagaaagggtgtgttgccatagcggcccagactgcccagaaatcgttgtgtgcgctgcataccctcctcgaagctggtgctggggccgcacatggcaatggcctgcatcacgcacgacgatatcttttcggtcacccgctgcgcctgcaaatattccagaaacgttcgtccccggaattccaacgagtcctcgttgcacttgtcctcgccgtaatcgttgcaggcggtgagaaatttcatcagcaagcgcttttccacgatggtcagtgttttggtgttgaagacatcgctacgggagcagggcacggacacaatttcaccattgtggcgcatgcacacatggtccacggctcggaattcagcatagcggcagatgttcgacttgatgagcaactgcaccagctccccggctgcgtataaaatgcgcgggcatagatccaagctgaagcgtcgcgacttggccagcactgagtccctattccaggattgtgcatctgtttctgattctttttccatggaatgccaggtgtaccttgcgtttcgcaatgcagaatgaggctcgacttcctggtccaagcgggcacatagagcatccatagagaaggagctccaaacatccccgtagtactcattactatccaggtggagcaccgatttgcctatcctgctgcccgcagcggcgatgcaggactcggtgaagcctgaaaagggcgtccctcgaatgactcatctgtggttcttttcaaatcttcttaattacctgtgcctatgacgaccaggtcaaactgctccggcaggtcatccaacatgttctaagccttatttgcactgatatttaaactatatttacggataaataaagtattccgtgaatttattgcgaatttacttaagcagctgtttacagatgcgcagctagcgatgacgtcatcaacaaacagctgttcatagtattggctaacgaaacaaaacgttataaagttgtttgaaatttgaaatataattaaacttttgtaattattccatacggagtttagcattgcattacaactctttaagcatttaaatgtattaaaaattgtctaattcaatagttatcgcaggcgtattacaaaaatactgaatttcccaatgcccaaatcaacaggtgcaataaaaatgcacacatacaggtggggggaattgtgcttgtagttgtagtcgccgctaccatggaaacggaaaattcgtaaacaaaagccggaaaattaaaaattgcagaatgtacactaacgcagcagaaacgtaaagccaataatgtcctttgaaaagatcctttacaaatatgaggaaccgcacgggatcggagatgtgtacttcatttggcagaaggctttgctggccacaactggtaccgatggatcggtggccctgtacaatcgacagggccaactggtgcagcgcatcatactttctgggtgagctatgctcaatctctacgtaataatgaataatgaccagtaatggaatctcttctccaggctgtgctcaggattcgcctgggaccaagagggtgacctgctgggcatcattaccagtggctccccaaacataacgttgtgggactataacagccaggaaaagatcagtgtggagacgggccttcgagatcccctcacgtgcattctctggtccaagcagcaacaactactggccgtcggcacaggacgcggtaatctggccatttataatcatagcagtggaaagcgacccacaccggttctgggcaagcacagcaaacgaatcacttgcggcgcctggtccgcccagaatctgttggctctcggttcggaggacaagagcttctcgttgagcaacgaggatggcgacacagtgcgcgtagtccagctaagagatgcgcccaccgacatgtacttcgccgaaatggccaatgacgaac

SEQ ID NO: 18101 - DNA, 2136 bp, DROSOPHILA
gtttgttgatgacgtcatcgctagctgcgcatctgtaaacagctgcttaagtaaattcgcaataaattcacggaatactttatttatccgtaaatatagtttaaatatcagtgcaaataaggcttagaacatgttggatgacctgccggagcagtttgacctggtcgtcataggcacaggcttcaccgagtcctgcatcgccgctgcgggcagcaggataggcaaatcggtgctccacctggatagtaatgagtactacggggatgtttggagctccttctctatggatgctctatgtgcccgcttggaccaggaagtcgagcctcattctgcattgcgaaacgcaaggtacacctggcattccatggaaaaagaatcagaaacagatgcacaatcctggaatagggactcagtgctggccaagtcgcgacgcttcagcttggatctatgcccgcgcattttatacgcagccggggagctggtgcagttgctcatcaagtcgaacatctgccgctatgctgaattccgagccgtggaccatgtgtgcatgcgccacaatggtgaaattgtgtccgtgccctgctcccgtagcgatgtcttcaacaccaaaacactgaccatcgtggaaaagcgcttgctgatgaaatttctcaccgcctgcaacgattacggcgaggacaagtgcaacgaggactcgttggaattccggggacgaacgtttctggaatatttgcaggcgcagcgggtgaccgaaaagatatcgtcgtgcgtgatgcaggccattgccatgtgcggccccagcaccagcttcgaggagggtatgcagcgcacacaacgatttctgggcagtctgggccgctatggcaacacaccctttctctttcccatgtatggctgcggggaattgccgcagtgcttctgccgtttgtgcgctgtttatggtggcatttactgcctaaagcgagccgttgacgacattgccttagattccaattcgaatgagttcctgctgagcagcgcagggaaaactttgcgtgccaagaatgtggtctctgcccctggctatacaccagtttcaaagggcatcgagttgaagccgcacatctcacgtggcttgttcatatcgtccagtcccctgggcaatgaggagctgaacaagggaggtggtggtgtaaatcttcttcgactacttgacaatgaaggtggacgggaagccttcctaatacaactgtcgcactacacgggagcctgtcccgagggtttatatatcttccatctgaccacgccagcgttgagcgaggatccagcgtctgatctagccattttcactagccaactcttcgatcaatcagacgcacaaataatatttagctcatacttcacaattgctgcccagtctagtaaaagtcccgctgccgagcatatttactacaccgatccacctacctacgagctggattatgacgcggccattgccaatgctcgcgacatatttggcaaaatgttcccagatgccgactttttgccacgagccccagatccagaggagattgtcgtggatggtgaagaccctagtgccttgaacgagcacactttgcccgaagatttgcgggcacaattgcacgacatgcagcaggcaactcaggaaatggatatacaagagtagtcatactaaaataaaaaggaggtttccttggtctacatatatcattacttattacaaaattttcttaagtatctttcgaataagttatatattgtatgcaattttttgattcatatattcctatatatttattatgtaaattatttataattgctaaaagtactaggtatatataaatgtttaaatgtgagtgtttctgtgcattttgctttgataaatatatgttcgaaaaatatgcattccaatgcgtataaaaatgtttctcctttataagtattgcttgacgggttactgtttttatcgcacgaagacagaaaataagtgttttagagataaaggttaatagttaccaaggaagaacgaatattataagtcttattaaattatgataaggcctgggcagttcacaatacgggcagctacaataaacgcaagataaattttattcgagcatacctatttatattaaa

SEQ ID NO: 18102 - protein, 511 aa, DROSOPHILA
MLDDLPEQFDLVVIGTGFTESCIAAAGSRIGKSVLHLDSNEYYGDVWSSFSMDALCARLDQEVEPHSALRNARYTWHSMEKESETDAQSWNRDSVLAKSRRFSLDLCPRILYAAGELVQLLIKSNICRYAEFRAVDHVCMRHNGEIVSVPCSRSDVFNTKTLTIVEKRLLMKFLTACNDYGEDKCNEDSLEFRGRTFLEYLQAQRVTEKISSCVMQAIAMCGPSTSFEEGMQRTQRFLGSLGRYGNTPFLFPMYGCGELPQCFCRLCAVYGGIYCLKRAVDDIALDSNSNEFLLSSAGKTLRAKNVVSAPGYTPVSKGIELKPHISRGLFISSSPLGNEELNKGGGGVNLLRLLDNEGGREAFLIQLSHYTGACPEGLYIFHLTTPALSEDPASDLAIFTSQLFDQSDAQIIFSSYFTIAAQSSKSPAAEHIYYTDPPTYELDYDAAIANARDIFGKMFPDADFLPRAPDPEEIVVDGEDPSALNEHTLPEDLRAQLHDMQQATQEMDIQE

SEQ ID NO: 18103 - DNA, 4650 bp, DROSOPHILA
acttctggatcgaattcaacccttcgaaattgtggatccgtgaaattagcgcgcacctcggtgaccattcccgaatgcggcactcgtttggtgaggttttgaaactcacagcgtcgctttgggcaattatgcgtattaccctcgtcacacattgtaggatcctcttcgcgggacactttctggatgggcggcatcttctccgtccaattccagtatgtaatattgtcgtgggcagctactccgccacacaagtcctcgggaccccagcgcacatacgacagattgtatgtggtggaggagggatcaaggtacttgctaaaggacgcctccgaacggtcgatgactagcttggtggctaccaccggagtgggcattgttacaggcaatatttcctgttcctccggcagctccttaagtacatacgactcatgactgacactagaaatgggcttcatctttcgctttacaaagcgaagggaaccctcctcaaatggtttcatatactgtgttttcatgttgagcgagggatttctaagtgcgttgggatcgttatactggaacatcatggtcacgttttagtttggtgcaacatatctcagcatatcaatcaactcacctgccacacatagttggccatgcactcagaagtcggcttctcggacagcagcggatcttttacataaatacccttatccgtaaacttggcgttcagcttgttacccattctcaagtctgtaatgtggcgatgccctcgatagtacgaggtcctccaatcgggatctgtagcgctggcagggcgcttgtaatcgaagacgccgaactcatccatggcttatggactttgaaaatctatctaacactgacaacaaacacaattttcagcgacaatggaaatgtgcaccccttgagacgcttaatttggaaacccttgatgttgcccagttaccgaatagactccaaacaatgctagtatactgactgctcacaaacagccagccttctgtacaatatttctcgtttatattctgcttcaaatgcaagtgtttacaatatatgtagttgtagtttatgctgtagagaggaatgcttgtttgacaaatataaaagcgctctgttcacaaaacaaatgaatattcgttaatataatacgtgggctaagataataatgttgcactcgatttggcctgtgcaataataaactgtttgcttagcaattaaacaattgatttacttcgtctcccggatgtgtgtaatcgatgaggcttgcgtttcaatggggtgtgtaaacaatgtgcgggtgactcatccttctattccttgtctacttccggctccccgtctcaggcaatctctttgagcgctagcagtgattggcgcagatattcatactgcgtcttggcatgcttgatctccagctctgagagctcgacgaggctgtgtttagaaaagcgataataaaatgcagagcatagcaaaatgtttagcagctgctgactcacctcttcttgaaagcagctacccgtcggttgcggaaaccgatcaactcctcctttccacatgcagacatagattcgaatttttcacaggcctccgcctgggcagtctcggcctaattggaggataaacaaaaacgattatatacagggaacacaacaagtgggccacagcaagggcatgctaaagtgaatacaacagattgagcaacggtggagcgcatgcagcatttacgtggggtggcgacacatctactaaaccgacggttaaaacgttaaatgccaaatacctcttgcacctccaacggctgcagaaacagaaccacaaacacgcacaaaaagtgaagagggagggacaggcagatcagagagttgtgaggttgtgtacggtagcaataaaatacaagaacgcaaataatttgttatttgtaattagtgaagcgtgagaattaattgacccgctggaaactttttgtagggaaaacaattgctctttaaacgatctgaaacatagttctggaagaactagttgtgatcatccctcaatcttaccgcatgaacatccttgtttttggagcgagccttctccaggtttcgattggccgcttcataagcagccaaacaccgcagtcgccggataagtagagctttggcagcgtcgctatcccgctgatagtagcgcagagtgtcgcccagcttgagatcttgatcgctagccactcgggtttccagattctttaaaatatcaagaggaaaatttataaaatataattatagcgaaaacgcagcgtagcgcaccttgatcctttcaaatatctccgctgtcttggccacaaacgtctccacatttcccttttccgtagtcgagagctgcgtcaacgcattcgaaatcttctgatgcgagtcgcctacatccttgtggcgttgcgtcattttctccgtcctgagtgctgcctcgcgcaagtggccgtggtactcggtaaggaactgcagctcgttctcaaagaagtcatttacatcccgaaccgtggcgctcaacaagatctcgtctgtggtcttgcccagggacttgacaaagccgccaaagatggccatcttcttgcgtggcttagcgcacagatcttggtcgtattccaggaaaaccttcaagtgctgatcgacgcgaaagacgggatgactagcaaggcggcgcaggaaaacctcgtgcatggccaccgtcttcttgaaggtagctaggtactcactggcaagtaaagatgtacattagtatataagaaaatgactatttggattaattgacacttacgcctccagctctgacttcatctttttgaactcctctttggtcatgttgccttcgccctcgccaagacgctgcagcttctctcgggaggcatcgaagtccggacgaggtggacagggcggaatctaagaaagatattatagcaagcagtttggaaatgtttttaccaaacactcacaatgtagccagcatagtcgtcgttctcctcaatacggtcatgtagccagacgaactcctcgtgctgacgcactacgttattgtccttttttgagaatcccggcagtgtggtgcgggtgtgcactgtgaacttgaccttctccttttcgctgagcgcatcggagatctcgacatgcagggcgttctcgcctagaactgccggcgtggccggggctgaggaggagctatccggcgatgtggcggatccactgccatttgtggctccacttggtgcgggtgcaccgcctgttgctggtggagtggcaagtggatttgttggcgaggcgatttccattgtggctccattgttggtggaggggctgttaagcagatttgagtcatccgtgccgtcctatgggggtcaaaataatcattagcctaagtacactataattacgcccatttttaatgataaggctttctttgtgtgcgggcgaggcgtcattttagaagccacgaaacccaagtactacttagtactttaatttttccaataattccaatataaaacgttttatttgtcttttcgtttctacttaccatcatcttgcggccaagtaaataacaaatgatttggctaaaaacaagtttttattacaaattacagagagcgaatttcaactagaggtggcatcaggcggactagcgaataatcgataacacgcagctctaacatcgatatcgaaaaagcttgcgatcgaatttgaattgcgaaaatgaatataatggttcactcctacggaattaaatctttttatttctaccagcaaaatatcattaatattcgattaatatcataatttattgccacgagaatttatattagatttttggttgttttagctgtgacagtcatctttaaaacaaatttttataatacatttttcaaaaatttttcccatttttcactcaaagataaaatttatttagcgtgtatttaaccacacaagacgcgacataatgcttaattttgattagatgaaaagagccttggtagttagttatgatagaatcaagggagttgaataaaagccaattgatattgttatcatacccattgtatttgagtagtcgtaggtacatgcatacacaattcaagacaatcatttacatagataagtttaatcgacttagactacactaaatgtaaaacatgaaatggcattaatagtatataacatggagtgagtgtgtggtcctaaagctatatcagaatcttaacaatgccactaagtagtattgtttcttaaaggcccctaaacaattaagttgaaattttaacttttttttaaaaggttatatcgcgtacgattactttctgttaacaatttgttttcctaagatcaacaatagtcattacataagttgattatacaatatttaaaattttctatttaagatttcacttaaaactccaactgagctgcaaagaggtcctaaacttaatctaatggctccgggacgtcctaataccttcgttgctccttctcgttgacggtggacagtggctggtagctgggattcgagaaggcctccgtggaggctccagcagcagcacccccgccacctgttgtggttttgccgggtatattcttcctgggtggcttcatattcacatagttttcggatggctcccca

SEQ ID NO: 18104 - DNA, 1782 bp, DROSOPHILA
cctgatgccacctctagttgaaattcgctctctgtaatttgtaataaaaacttgtttttagccaaatcatttgttatttacttggccgcaagatgatggacggcacggatgactcaaatctgcttaacagcccctccaccaacaatggagccacaatggaaatcgcctcgccaacaaatccacttgccactccaccagcaacaggcggtgcacccgcaccaagtggagccacaaatggcagtggatccgccacatcgccggatagctcctcctcagccccggccacgccggcagttctaggcgagaacgccctgcatgtcgagatctccgatgcgctcagcgaaaaggagaaggtcaagttcacagtgcacacccgcaccacactgccgggattctcaaaaaaggacaataacgtagtgcgtcagcacgaggagttcgtctggctacatgaccgtattgaggagaacgacgactatgctggctacattattccgccctgtccacctcgtccggacttcgatgcctcccgagagaagctgcagcgtcttggcgagggcgaaggcaacatgaccaaagaggagttcaaaaagatgaagtcagagctggaggctgagtacctagctaccttcaagaagacggtggccatgcacgaggttttcctgcgccgccttgctagtcatcccgtctttcgcgtcgatcagcacttgaaggttttcctggaatacgaccaagatctgtgcgctaagccacgcaagaagatggccatctttggcggctttgtcaagtccctgggcaagaccacagacgagatcttgttgagcgccacggttcgggatgtaaatgacttctttgagaacgagctgcagttccttaccgagtaccacggccacttgcgcgaggcagcactcaggacggagaaaatgacgcaacgccacaaggatgtaggcgactcgcatcagaagatttcgaatgcgttgacgcagctctcgactacggaaaagggaaatgtggagacgtttgtggccaagacagcggagatatttgaaaggatcaagaatctggaaacccgagtggctagcgatcaagatctcaagctgggcgacactctgcgctactatcagcgggatagcgacgctgccaaagctctacttatccggcgactgcggtgtttggctgcttatgaagcggccaatcgaaacctggagaaggctcgctccaaaaacaaggatgttcatgcggccgagactgcccaggcggaggcctgtgaaaaattcgaatctatgtctgcatgtggaaaggaggagttgatcggtttccgcaaccgacgggtagctgctttcaagaagagcctcgtcgagctctcagagctggagatcaagcatgccaagacgcagtatgaatatctgcgccaatcactgctagcgctcaaagagattgcctgagacggggagccggaagtagacaaggaatagaaggatgagtcacccgcacattgtttacacaccccattgaaacgcaagcctcatcgattacacacatccgggagacgaagtaaatcaattgtttaattgctaagcaaacagtttattattgcacaggccaaatcgagtgcaacattattatcttagcccacgtattatattaacgaatattcatttgttttgtgaacagagcgcttttatatttgtcaaacaagcattcctctctacagcataaactacaactacatatattgtaaacacttgcatttgaagcagaatataaacgagaaatattgtacag

SEQ ID NO: 18105 - protein, 428 aa, DROSOPHILA
MEIASPTNPLATPPATGGAPAPSGATNGSGSATSPDSSSSAPATPAVLGENALHVEISDALSEKEKVKFTVHTRTTLPGFSKKDNNVVRQHEEFVWLHDRIEENDDYAGYIIPPCPPRPDFDASREKLQRLGEGEGNMTKEEFKKMKSELEAEYLATFKKTVAMHEVFLRRLASHPVFRVDQHLKVFLEYDQDLCAKPRKKMAIFGGFVKSLGKTTDEILLSATVRDVNDFFENELQFLTEYHGHLREAALRTEKMTQRHKDVGDSHQKISNALTQLSTTEKGNVETFVAKTAEIFERIKNLETRVASDQDLKLGDTLRYYQRDSDAAKALLIRRLRCLAAYEAANRNLEKARSKNKDVHAAETAQAEACEKFESMSACGKEELIGFRNRRVAAFKKSLVELSELEIKHAKTQYEYLRQSLLALKEIA

SEQ ID NO: 18106 - DNA, 6855 bp, DROSOPHILA
ctgcagatcggacttacgttggcggttctgatctggggatttctcgtctggttgtagtggctgcatccgaatcgccaacagttggattgtgcaatatttccgctccaagtgcgatgctaccacacatggttgttcgtttccatccgtagtttgttctagtagggtatcatgtattttacttttaagttctttcacacaagccaagtacaagtcagcgaaatgtatcatatgaatcagcactaatatcgaatctattcacacagcaatgcaaaagtagcccaaaacttagtcactttaactaaacacgtaatgtaaaagtaataaacaattttagattgtttgtaattatcaaccggtttatagtcaaatagtcgatgaatacgagaactaaactttaaatgattaaatatgtaactattattcaaataaatatgatttttatattaaggaaaggatgtgtgtgtttttattaggtgtgtgtaatattttattatatggaggttggtataacttataataatattgttttataattttttaagtccatcttaaaaatcgatgcatttcgttttcgacaatgcacagtggcgacacctagctacactctttctacacggtgtacactaagtaagttcggtaatattccgacaggggcgctagctgaagagaattctcttatgctcgagaagagaaaacatacatatgcagctaaaataacaaaaaaagtatctgcaagatagcgaaaaatgtatccgcaaactcagtgagctaaccatattgtatgtgatgagatcagaaagtaaacatatgtgggggaccaaaccaaataggcactcccctttgagacgccactgactaactggtttggccgacgatcgtgatcgttattatgacgatccgcggagcgtagttaatgatcatacacgaacagttcgcttgctgccgagcacatttcgttggccattgacggcataaagattcagttgaagttttactgttgccggctaacgttcgaaaatcggaggatcggagaaacgcagataaagataaactcgcccattcagctgcctcgctcgcactcgcacacgccgacacacacacacacacacacgcacgttcgttgtggcacacacacgtgcagttgcactggtgttggtaatttgtttacagtcgcatcgcaacaacaacaaaagcagtggagtaaaagatagaaagacggaataaataagaagaggaggaggccgataaaaagaaagagagctacgtggaaaagagaaatttcgacgttctaagccgagttttagtcttaaacaaataatcagaacgagcggatagactgcaattggcattattattattgacgttaaccacacctgctgagaaaccatggccaggtaagtcccactacatttggctctaagcaacggcttctgctcaattttggttgtatttaattttggtagcatgtttgacaactttcaacctgctttttttattttttttttatttcttttccccgctttcgagcgccttttgtgaggttagaaagacggagcaaagttcgaaatgcgacaaaaatctggcgtagagaacacaagccatcgagctaaagatacccgaatcatctagactttccatgtgatggggaatcttgattcaaaacacttacttaccataaattaggtatatgtgtgtgttgttaactattttcacatatgtagactttatcattcatataagccagaagtccagtggatcaacatatctattccaactttccaaaacttgaactttaaactactctaaaactagatgaccaataaaagcgcattcactttaagtggaattagtgatctataatcttacatagcctttgcttttggaactcaattcaaaagtttaatgcataacataatagttcgtgctattggggtcacactgtactataattaacacttgcgtcggcggctaattctacttcattacgagctgacagtgggtcatttggtcggacactttcgccagcgagaatccatcacctgagagtcacctgcaatgggagaacaatggaaatttttcattaacccgctaaaggtggctatgcagtgctagccaattggagagggagatgcaaacagggctagacattccagttttcaagctaaatctttgacctgttcgaatacactcttttgcaagtcaaaagccgccttttcagccaaatgacgtcaatgatgcagtggtgggcatgccggaaatcaaccggaaaattacagattattgaaatcaaaaggaaccgcgggacaacaagatcattacatattatggccatcgcatcctgacgacaggttgttcgaaacattttcgggacgaatattaataataatatgccagagatttatggccgctcacaaggttgattgcagttggtagggtcagttacttacttactcaaagtcgagtggcttaattgccggggtgggcaagcatttaagtttatgtgcaatgctaatgatatgggggttcttaacgccagtctcaacggaatgcggtaaactgtggcaaatgatatcgcattatgcaaggcattattaaggcactaagcttgatttttcaaataacaccactttattgcttatttcctcacttgtagccaagttccattaaatactgtgcacaattcatacagtagtatcagttccaaggcaaagcaaaaccataatttgaaacaaatttcaagtagcactgccaccataaatcggctcacttaattaagccagataagcaccgaactggccaacagaaaaatctaatctcagaagttgatttaaagctgataagaaagttaatttcaaagagttggccaagaaagggagtgaataagaaacttcaggaaaaacgcttgatgagttattagccatttgtgttgattgggtcacctgtcccttttcaccccaaattcgctggtccacaaagtgaaagcttaacttggctaacaagcgagcgtttgaactgtgagcctggctaaaacgatgacttgccatttcgtgtgtgcaaatatgagcacctgcaaaggcttcaactgcactttatttacttgtgacggctctgcaatctcgagggtttcctttaattgctcaaaagaaaatttgcatttcgtctgattttttgtttttttttgtttttgtttgcatattcaaatatgggaaatgtaaatgcaacacatttgttatgcagaaattatatcacgcatcgttagaggggagtaaaaaccaaagaattcatcttcaatgttcgtcattataaaatcatttggcataaagaaaaaatatagcggagacagcgagtggaggtcattaaaagagaaatgcgccagacatggctaattgaatgaacatgttgcgtgtttgctggagccccaatacgttttgtaatttgatcgaaattgttcgaaaattaggcgattgcaaagtggaaatgggaattccccaaagctaaagagcttatcttaactgatttgcagcaaaaaacaaagtacatttactgttaaaagcatgatatctttaagaattgacttggatgaataatgaatccaaaagagtgggctaaaatcctatttattgatagaaactaaagaaaatctttagagatcaaaccatttgatttatgcgtttaagcgcacgacttgattccaatcaaagtacaaagaaaccagagacacccacgagattgctttgcattccggcattgaaccgcccgccagtcgacacctgctaagtaatcattagttgtatcaatattagaagaaatacaatgggcactcagaactgggagcccacgataaaaacgggtttttagcgggacaaacagccaagatgcgctaccctgaaggtttttacgggtgaacgagtgtcgtaagcacaatggcgtctccattggaccatttgaatgggcgacgagagaaagtttggttcatcttttttatgacgtctgtaaatttggtcgtattcgttatataaacagaatagacggcactgaactgattggtaaacccttcatatttcagctcacccatcacagacttctatgcgggtcgcaatgtcttcatcacgggcgccactggcttcgtgggcgtcaccattgtggagaaactattgcgcgatgttcccaacgtgggcacactgtacctgctgatgcgcgccaagaagggcaagagtgtgcaggagcgactggaggagctgaagaagaactccgttttcgacaagttcaaggaactgcagctgcagtcgcgtctctccaagatcgtgcccatcgaaggcgatgtcggcttggagcatctgggcatctcgccgaaggatcgccagaccctgatcgacaacgtgaatgttgtctttcactcggctgccactttggacttctttcaatctctgaaggagaccaccaacatcaacttgaggggcactcggcgagttgtggagctgtgccagcagatcaagaacctggatgctttggtccatgtgtccagcgcctatgtgaatgcctatctgaccaaggtcgaggagaagctatatcccgcgcccgaagatccagagaagatcatccagctctcggagacgctcaacgatgatgccctcaaggaactggaaccaaagtgagtggctcttaactaaactaaagggtttatgcttagaaataatgaattatcatctcccagacttctgaaggatcaccccaatacctatacctttacaaagcatctggcggagcacgaggtggccaatgtggccagcaagttcccctgcggcattgttcgtccgagtatgagtgagtattaggtagaatattaattttcttccagaaactaatgattctttgtaatgtgctaaagtcaccgccgcttggaaggaacccattcccggatggaccatttcgaagaacggtccgcagggcttcttcatgggcgcatcgaagggcgtactgcgtcgccttcccctggatcccagcatcattatggactacatacccatcgatgtggtggtcaatggcatcataaccactggctattatgtcaactcgctgcaggcgaagaacggaggacgcccggccgatctgcagatcttccacctgacctccagcacatacaaacccttccgctttgagctgatgacggacaagatcaacagctatctgcacgactatcctctgaacagtgccgtctggtatcccaacctgcgtctggtgaagagcctctgggtcttccgactgagcgccattctgtttcatttcatacccgctattatcctggatctggtcacgaaaattggaggcggcaggcctatgtaagcatataatattggtacacctatttcctagtagcctacatgatttcatttaacttttagcttggttcgtctgcacaagaacgtttggaactcactgaataccctggaaaagttcatcttcaccgagtggcactttgacagcaagcgtctattggcgctatcgaagaccttgaacatagtggacaagaagaagttcttcatcgacatcggggagctggcgtgggatgagtacttttccaatacgatcctcggcgtgcgtcagtatctcagcaaggagcccatcaagaatctggagaaggcgcgtcgcaaggacaaaatgtaaatatcttcaataatactatgtaagttaccatactaacccttaacttttctagtctcctgggtcttcatgtggcgctgcagctctcgttttggtatggagtcttcaagttgatcgtgtgcctcaccggaatctcgacggctaaagcagctcttgtcctgcccgtcctttactacctttttggactgctttaagaagtcgatgaatattcccacatagttcaacattttctcaatgttatttatgcttaatgcactttgtatgaggtttggttttacaatataaatacaaaaacaagcgccgctcttttttgatttaaaaggaaaagtttattaaaggaaagccctaaagaggattctattgatagttaaaatctggtataaaattagatctacttttactttaagccacattataaagattcagaggtaatatcaggctttttgagcggtttaaaaagtgtaaaattttcaagcttttaagtttttaaacttcccaccgaggtgcataagacctggtcacatcgaatttagtgtgacctcaccagtggacgccatcgaatacccaagtgcatcccaaaccccaatcaacagtttcccaacaaaaacaacaacagcaaacgaccagctggtccagtgcatgcaaaacttcatcaattggccgaagtgtgcaggaaaagcgagggcttttctccgcacttgacccatttgcggacacacaaacgcttgccgagctcaaagaaatcatgtactgagaaccaaccgaggatgcggagcccagaaacggacagtgagcactcggaaacggactccgtcggctcctccacggacagtcagtcgagtggattgggcgcggtgcgccaccagcgacggagcgcccagcgcacggatgtcttcagcctcaaggccatggcgcctaggtgagtcagtgcagtgactgagtctccgaggggagtccaaagttccagcttatctgtaatctaatctgaccctttcgtaggccaaatgccggacccggcggctggttatgtctactgctgccgctggccttgaccgtccgcctgttgcgccacgccacgccggcatgcaaggaccaggccaggatgcagtgtctcctcacggtggccgccggcggtatggcccttgaaacgctgtgtttcttcatctatgcctttgtgaagacgggcattttggt

SEQ ID NO: 18107 - DNA, 1937 bp, DROSOPHILA
ccggctaacgttcgaaaatcggaggatcggagaaacgcagataaagataaactcgcccattcagctgcctcgctcgcactcgcacacgccgacacacacacacacacacacgcacgttcgttgtggcacacacacgtgcagttgcactggtgttggtaatttgtttacagtcgcatcgcaacaacaacaaaagcagtggagtaaaagatagaaagacggaataaataagaagaggaggaggccgataaaaagaaagagagctacgtggaaaagagaaatttcgacgttctaagccgagttttagtcttaaacaaataatcagaacgagcggatagactgcaattggcattattattattgacgttaaccacacctgctgagaaaccatggccagctcacccatcacagacttctatgcgggtcgcaatgtcttcatcacgggcgccactggcttcgtgggcgtcaccattgtggagaaactattgcgcgatgttcccaacgtgggcacactgtacctgctgatgcgcgccaagaagggcaagagtgtgcaggagcgactggaggagctgaagaagaactccgttttcgacaagttcaaggaactgcagctgcagtcgcgtctctccaagatcgtgcccatcgaaggcgatgtcggcttggagcatctgggcatctcgccgaaggatcgccagaccctgatcgacaacgtgaatgttgtctttcactcggctgccactttggacttctttcaatctctgaaggagaccaccaacatcaacttgaggggcactcggcgagttgtggagctgtgccagcagatcaagaacctggatgctttggtccatgtgtccagcgcctatgtgaatgcctatctgaccaaggtcgaggagaagctatatcccgcgcccgaagatccagagaagatcatccagctctcggagacgctcaacgatgatgccctcaaggaactggaaccaaaacttctgaaggatcaccccaatacctatacctttacaaagcatctggcggagcacgaggtggccaatgtggccagcaagttcccctgcggcattgttcgtccgagtatgatcaccgccgcttggaaggaacccattcccggatggaccatttcgaagaacggtccgcagggcttcttcatgggcgcatcgaagggcgtactgcgtcgccttcccctggatcccagcatcattatggactacatacccatcgatgtggtggtcaatggcatcataaccactggctattatgtcaactcgctgcaggcgaagaacggaggacgcccggccgatctgcagatcttccacctgacctccagcacatacaaacccttccgctttgagctgatgacggacaagatcaacagctatctgcacgactatcctctgaacagtgccgtctggtatcccaacctgcgtctggtgaagagcctctgggtcttccgactgagcgccattctgtttcatttcatacccgctattatcctggatctggtcacgaaaattggaggcggcaggcctatcttggttcgtctgcacaagaacgtttggaactcactgaataccctggaaaagttcatcttcaccgagtggcactttgacagcaagcgtctattggcgctatcgaagaccttgaacatagtggacaagaagaagttcttcatcgacatcggggagctggcgtgggatgagtacttttccaatacgatcctcggcgtgcgtcagtatctcagcaaggagcccatcaagaatctggagaaggcgcgtcgcaaggacaaaattctcctgggtcttcatgtggcgctgcagctctcgttttggtatggagtcttcaagttgatcgtgtgcctcaccggaatctcgacggctaaagcagctcttgtcctgcccgtcctttactacctttttggactgctttaa

SEQ ID NO: 18108 - protein, 471 aa, DROSOPHILA
MRAKKGKSVQERLEELKKNSVFDKFKELQLQSRLSKIVPIEGDVGLEHLGISPKDRQTLIDNVNVVFHSAATLDFFQSLKETTNINLRGTRRVVELCQQIKNLDALVHVSSAYVNAYLTKVEEKLYPAPEDPEKIIQLSETLNDDALKELEPKLLKDHPNTYTFTKHLAEHEVANVASKFPCGIVRPSMITAAWKEPIPGWTISKNGPQGFFMGASKGVLRRLPLDPSIIMDYIPIDVVVNGIITTGYYVNSLQAKNGGRPADLQIFHLTSSTYKPFRFELMTDKINSYLHDYPLNSAVWYPNLRLVKSLWVFRLSAILFHFIPAIILDLVTKIGGGRPILVRLHKNVWNSLNTLEKFIFTEWHFDSKRLLALSKTLNIVDKKKFFIDIGELAWDEYFSNTILGVRQYLSKEPIKNLEKARRKDKILLGLHVALQLSFWYGVFKLIVCLTGISTAKAALVLPVLYYLFGLL

SEQ ID NO: 18109 - DNA, 4097 bp, DROSOPHILA
ctatgtaagcatataatattggtacacctatttcctagtagcctacatgatttcatttaacttttagcttggttcgtctgcacaagaacgtttggaactcactgaataccctggaaaagttcatcttcaccgagtggcactttgacagcaagcgtctattggcgctatcgaagaccttgaacatagtggacaagaagaagttcttcatcgacatcggggagctggcgtgggatgagtacttttccaatacgatcctcggcgtgcgtcagtatctcagcaaggagcccatcaagaatctggagaaggcgcgtcgcaaggacaaaatgtaaatatcttcaataatactatgtaagttaccatactaacccttaacttttctagtctcctgggtcttcatgtggcgctgcagctctcgttttggtatggagtcttcaagttgatcgtgtgcctcaccggaatctcgacggctaaagcagctcttgtcctgcccgtcctttactacctttttggactgctttaagaagtcgatgaatattcccacatagttcaacattttctcaatgttatttatgcttaatgcactttgtatgaggtttggttttacaatataaatacaaaaacaagcgccgctcttttttgatttaaaaggaaaagtttattaaaggaaagccctaaagaggattctattgatagttaaaatctggtataaaattagatctacttttactttaagccacattataaagattcagaggtaatatcaggctttttgagcggtttaaaaagtgtaaaattttcaagcttttaagtttttaaacttcccaccgaggtgcataagacctggtcacatcgaatttagtgtgacctcaccagtggacgccatcgaatacccaagtgcatcccaaaccccaatcaacagtttcccaacaaaaacaacaacagcaaacgaccagctggtccagtgcatgcaaaacttcatcaattggccgaagtgtgcaggaaaagcgagggcttttctccgcacttgacccatttgcggacacacaaacgcttgccgagctcaaagaaatcatgtactgagaaccaaccgaggatgcggagcccagaaacggacagtgagcactcggaaacggactccgtcggctcctccacggacagtcagtcgagtggattgggcgcggtgcgccaccagcgacggagcgcccagcgcacggatgtcttcagcctcaaggccatggcgcctaggtgagtcagtgcagtgactgagtctccgaggggagtccaaagttccagcttatctgtaatctaatctgaccctttcgtaggccaaatgccggacccggcggctggttatgtctactgctgccgctggccttgaccgtccgcctgttgcgccacgccacgccggcatgcaaggaccaggccaggatgcagtgtctcctcacggtggccgccggcggtatggcccttgaaacgctgtgtttcttcatctatgcctttgtgaagacgggcattttggttaaatgcctggtcagcctgctgcccggagtggccaccagtttgagcttctatctgctggtggacacctcactgaccttcgccatcatcgtgggattcgtgatgacctctgcttatcagcaaatctatatttacacgctacgtggcttccagagatccttcacgtatggcgaagcctcggttttcgtccagggactggtgctcttcgctttgagtgccatccatcgactaggtggattcttttgcggcggttcttggccaaccgaggaatttgatacgctcaacatgatcatggtggtatgtaaggctagggagtgttgaatggaatggaaccaagttttaataacccgcttgcattggctctacagaatgccctattttgcctgctggtgttctgcgtggctctcgtcctctttccaacgctgaggaagccatgtcgcttctacttgtggacggtgatgctcctcttggctgtcacctgcatgccggtgacgcgacctcttcctctgctggcacttgtgcagttcctgctccgcgatcaggagagactggccatcttggtcttctatatgctgctggttgtgctaacctgcctcacagtcgcctggcaaattggaagctccgctaaggccaatacacgtgtgcgcaagatcttccacctgctcattgttatggtctatatacccggattgatcttcgagtgcgccctgctctacttggccactggcgtggcgttggctgctttcgtggtcctggagctgctgcgtctgctgaagataccgccattcgccgatagactagctgtggcctttagcacattcaaggacgaaaaggacgccggagagttggctctaactccgttctgcttgctcatcggctgctcaatgcccatttggatgacaccatgtccgtgctctggcgacaatactctggccttgctatcgggaattctagctgtcggcgtaggagacactgcagccagtgtagtgggatccaagctgggacgcaacaagtggggaagtaagtagaatgaactgaaagatacactgatctttcaatgcgttcattcgcatatataagattctattttaacacgcgtgccatacttctaggatcttcccgatccctggagggcaccattgcgttcgtggtgtccattctcatggccgtctggctcctggagatttccggcctggtggccatgagccaggccaagtggttcgccaccattttcgcagcactgaattcggctctggtggaggcgttcaccgaccaggtggacaacctggtactacccctgatattctataccattgtgggcctggcctaaatagaatgcatatttatgtaaattagttttagtgtacgcattcctcggtgtatttatatataaaactacttattaagaatgtttataaaactctatattccatattatattttgacgaacttttatgggactaaaaagaagtacttccctaaaaatgtatatgctacctttctaatccaacacaaagctataagtttgatattttgtttagtttagataatatttataaatacaagatttctagaaccggacagcaggttattttatatctttaccaatatgtcatctcgtcttctgatccatttttgcccttctgaaagtgtagttactaatttccatctattttgtttgttatacacaaggtctaaaaaatatctaaaaatccaataagaatgcgctgtcttaacagtgcaccccgccgactgttaagttaacataatccactccgtaggcgtccaacagaatgttagccaacacgtggatccactgttatgggtgaaaaaacggcacaaaaaccatgaaaataaccgcataaacggcacaaaaaacacaatttcacttggtttatataaagtgcaaacactgctgatttttattacgtagaaatggtgaacggatgggtgctacacaagtgtgtagactggccggccatgtatgaatggctgctccagaacgctgctttctcgcctcgcaagtgtgttgcacagtatattcgccacattcaaccgcttattcgaagagagcgaagcccatgtcgtcatcctcggactcggactcctccttcttctcctccttcttggcctccttcttgtcgccaccggcggcggcagcgggtgcggcatcagcggctgcgacggcaccaccgccgcccaccggcatcgaggagagcttctcgcgaccctccttgatcaggtcgtcgatgctcttgccagccagctccttgatgaccttggtcagacgctcggcgtcgacctcaacgcccacagagctgaggatcttctccagatcgctgttggcgggcgagtccttgccaccgaggacggccagaaggtaagcagccacgtaacgcatgtttaagtcttgggttcttgacacgaaacgtgaattggcaaaatgtacgaaaaacacaactttcctttgcaagttgtcgtcgaaaaagaggcggaagtcagtgtggccgcgcggtcgaggctcgaaaataccagctcatacttatatataccaaagtataccacatccttatctagca

SEQ ID NO: 18110 - DNA, 1854 bp, DROSOPHILA
aaaagcgagggcttttctccgcacttgacccatttgcggacacacaaacgcttgccgagctcaaagaaatcatgtactgagaaccaaccgaggatgcggagcccagaaacggacagtgagcactcggaaacggactccgtcggctcctccacggacagtcagtcgagtggattgggcgcggtgcgccaccagcgacggagcgcccagcgcacggatgtcttcagcctcaaggccatggcgcctaggccaaatgccggacccggcggctggttatgtctactgctgccgctggccttgaccgtccgcctgttgcgccacgccacgccggcatgcaaggaccaggccaggatgcagtgtctcctcacggtggccgccggcggtatggcccttgaaacgctgtgtttcttcatctatgcctttgtgaagacgggcattttggttaaatgcctggtcagcctgctgcccggagtggccaccagtttgagcttctatctgctggtggacacctcactgaccttcgccatcatcgtgggattcgtgatgacctctgcttatcagcaaatctatatttacacgctacgtggcttccagagatccttcacgtatggcgaagcctcggttttcgtccagggactggtgctcttcgctttgagtgccatccatcgactaggtggattcttttgcggcggttcttggccaaccgaggaatttgatacgctcaacatgatcatggtgaatgccctattttgcctgctggtgttctgcgtggctctcgtcctctttccaacgctgaggaagccatgtcgcttctacttgtggacggtgatgctcctcttggctgtcacctgcatgccggtgacgcgacctcttcctctgctggcacttgtgcagttcctgctccgcgatcaggagagactggccatcttggtcttctatatgctgctggttgtgctaacctgcctcacagtcgcctggcaaattggaagctccgctaaggccaatacacgtgtgcgcaagatcttccacctgctcattgttatggtctatatacccggattgatcttcgagtgcgccctgctctacttggccactggcgtggcgttggctgctttcgtggtcctggagctgctgcgtctgctgaagataccgccattcgccgatagactagctgtggcctttagcacattcaaggacgaaaaggacgccggagagttggctctaactccgttctgcttgctcatcggctgctcaatgcccatttggatgacaccatgtccgtgctctggcgacaatactctggccttgctatcgggaattctagctgtcggcgtaggagacactgcagccagtgtagtgggatccaagctgggacgcaacaagtggggaagatcttcccgatccctggagggcaccattgcgttcgtggtgtccattctcatggccgtctggctcctggagatttccggcctggtggccatgagccaggccaagtggttcgccaccattttcgcagcactgaattcggctctggtggaggcgttcaccgaccaggtggacaacctggtactacccctgatattctataccattgtgggcctggcctaaatagaatgcatatttatgtaaattagttttagtgtacgcattcctcggtgtatttatatataaaactacttattaagaatgtttataaaactctatattccatattatattttgacgaacttttatgggactaaaaagaagtacttccctaaaaatgtatatgctacctttctaatccaacacaaagctataagtttgatattttgtttagtttagataatatttataaatacaagatttctagaaccg

SEQ ID NO: 18111 - protein, 503 aa, DROSOPHILA
MRSPETDSEHSETDSVGSSTDSQSSGLGAVRHQRRSAQRTDVFSLKAMAPRPNAGPGGWLCLLLPLALTVRLLRHATPACKDQARMQCLLTVAAGGMALETLCFFIYAFVKTGILVKCLVSLLPGVATSLSFYLLVDTSLTFAIIVGFVMTSAYQQIYIYTLRGFQRSFTYGEASVFVQGLVLFALSAIHRLGGFFCGGSWPTEEFDTLNMIMVNALFCLLVFCVALVLFPTLRKPCRFYLWTVMLLLAVTCMPVTRPLPLLALVQFLLRDQERLAILVFYMLLVVLTCLTVAWQIGSSAKANTRVRKIFHLLIVMVYIPGLIFECALLYLATGVALAAFVVLELLRLLKIPPFADRLAVAFSTFKDEKDAGELALTPFCLLIGCSMPIWMTPCPCSGDNTLALLSGILAVGVGDTAASVVGSKLGRNKWGRSSRSLEGTIAFVVSILMAVWLLEISGLVAMSQAKWFATIFAALNSALVEAFTDQVDNLVLPLIFYTIVGLA

SEQ ID NO: 18112 - DNA, 2958 bp, DROSOPHILA
tgatgatgaggactgtgcaagcatgcgaagcagttcgccgtcaacacaatccgagatgctagtggtaccgccactttcggtgcaacccacgcggaaaaacaaggccgttgtgggccgcatttagagctgatgatgatgatgactccacagtcaaattgtgtattccattttggaagtctctttttggagagactcgcttgcagtgctattccttgagcattggtcgcccatgtccgagtgcatatacaagcttcgaattcgtaatctcacaacacaaccagaaacaaattatcgagcgtccaatattgtttagattgtaaaatgtattgttaagttgcacctgtcgataggaaggctcgcaaatgttgaagcgtttgcccgagctgtcgattgatcatgattaacttgtaaatagttctccatatgtgtactcccgtgcccgtataattgtgtcgcgtcgctaaatgtaatcaactactcattgcagtgactagggatcgaattcacgcacgcaccgaacgatcgattcggatggttttcggtcggatgatcgccacaccgcaacaagctgtgaatgtttactgagtaaattttttaaaaaccctatcttaccatattgattataactcaacgattttgcttgagtaggcaattacgaccctaagtcgtaaggcgttcaaagcatgaagatgtttaagttaatatatgaacaatgattaaaggaaaacatttttaaatcaaagcattttttattcttagctttgaagctgcaaagtaggcaacgaattacacaaacttcgacagttaccacaatctcacccgaaaagatgcaattgttgcgcatagaaaattaggtttttaatttagtctatagaacaattttgtaggggcaattccaagtaaatattcatatacaccaagccaatcatatcttccacacttacgaatctggtgtacaaaaataaaaatatactaacgtagaggacctaaacaatcgctttcagagtgtataaaccgatttgacgcccgaattgaatttggacattgcatcggaatgaagttgatactgcaaactatgcgattgcaaatgaaggagtatcttcagcttctggccgatctccagaatggccatttcgttactcccgttggcagtccaaaccgctgtaatagatacagttttttatcaatgtgcagaacacatttgataaacttacagattttgttgctcttgttacgtatattgatgacagctccgcagatctcgtcggagtattcaaaattttggcccaccatcagcagtagaatgtccagccaaatttgatccaattccgctttggcactcttactcacggtgaccagccagcgaccacccttgatgttggcttcatcctcccacatgggtctttgggagtagaggatttaagttagcatctctcaatgaacaatgatttattcgtactttatgcccttcttgaacacggagtaatcgcatccaatcttcagctccgctggggtcttgatggtatggtacaagctccagaaggtctccacactgtcaatctcggtaatctcgtttagcatgtccttccagtgcttggtgcgatcgttttccaaataccacaaagtccacacatgctccaaaggatgcttgtactcgacttggtatatctcttcatcgataggttctgggctattgctctccagtggaacaccttcgtggtgatgatgatgcttatggatactattcagctgatgttgctgatcctgctgcttcataatatcaaaactttgcacttgtgcactggccatgttgttggttgacttgttttttttttttcgatacgaacaggtaaccttaatttatttgctgacggctgtgttctcaacgaattttgtcgcgattcgagtgggaattgcttactaataaccaaaaatactttagcacatttttctagacctaaacgaaacctgtcgaaaagaaggaaatgaaatgacaatgacacctgggtgtaagcatactatgctggttttttcttttaatataaattatttttattcatttataaatactgcaaaacttaagacaaatcaatttacatattgttaacatagaaatgcgcgcttggtccttaaaaaaaaaaataataacatacaaaatgaaaatgtatgcactctattccaatggtcaattaaacactaagcggaggcactagagaaaacaaatcgaaacagctacggggtgttcaaaataaaaaaaaacacggttttcgtaaccatatttgaaaagattctcaattcttttagaaatacgttaataaattatctcaaggctggttttgaatcatccacccgtctagacccataaaacagcggctgcatcctcgttggacaaagtggagaagcgctggtagcgattcgcattgcgataggttttcgagggcgatggagcggttgatatctgagcttgaacctgtacttgaacttgagtctgattttgcatgggcagccccaccatatttaatccggactttagtgtggagttcctgctgtccgaggacatggacaggcgtcgctggtttccattcatcaaggtggaactcaggggcaagccgacatcgtgaaaggagctaatcgaactgaagccactctcatcctcggtactggaaccgctctgcttattgctggtggttttgttattgctattgctgatggctgtgttgctggcggtggtctgtgtctgcgtctcctcatccgtttccactttcgaggaggaggatgccgtcgacgagatggtggaatgcacggaactgtcggtggagctgcgcaacgatagcctcgagtcgcgcatgttgttggcccgcagaaagatgagttccgcatttgatttcccgcccggtgatggagtctccagtgtggcactcatgatactggtggaattgtgcaatggtggcgtcagta

SEQ ID NO: 18113 - DNA, 848 bp, DROSOPHILA
ggtctagaaaaatgtgctaaagtatttttggttattagtaagcaattcccactcgaatcgcgacaaaattcgttgagaacacagccgtcagcaaataaattaaggttacctgttcgtatcgaaaaaaaaaaaacaagtcaaccaacaacatggccagtgcacaagtgcaaagttttgatattatgaagcagcaggatcagcaacatcagctgaatagtatccataagcatcatcatcaccacgaaggtgttccactggagagcaatagcccagaacctatcgatgaagagatataccaagtcgagtacaagcatcctttggagcatgtgtggactttgtggtatttggaaaacgatcgcaccaagcactggaaggacatgctaaacgagattaccgagattgacagtgtggagaccttctggagcttgtaccataccatcaagaccccagcggagctgaagattggatgcgattactccgtgttcaagaagggcataaaacccatgtgggaggatgaagccaacatcaagggtggtcgctggctggtcaccgtgagtaagagtgccaaagcggaattggatcaaatttggctggacattctactgctgatggtgggccaaaattttgaatactccgacgagatctgcggagctgtcatcaatatacgtaacaagagcaacaaaatctcggtttggactgccaacgggagtaacgaaatggccattctggagatcggccagaagctgaagatactccttcatttgcaatcgcatagtttgcagtatcaacttcattccgatgcaatgtccaaattcaattcgggcgtcaaatcggtttatacactctga

SEQ ID NO: 18114 - protein, 221 aa, DROSOPHILA
MKQQDQQHQLNSIHKHHHHHEGVPLESNSPEPIDEEIYQVEYKHPLEHVWTLWYLENDRTKHWKDMLNEITEIDSVETFWSLYHTIKTPAELKIGCDYSVFKKGIKPMWEDEANIKGGRWLVTVSKSAKAELDQIWLDILLLMVGQNFEYSDEICGAVINIRNKSNKISVWTANGSNEMAILEIGQKLKILLHLQSHSLQYQLHSDAMSKFNSGVKSVYTL

SEQ ID NO: 18115 - DNA, 3267 bp, DROSOPHILA
gactttagcccattggaattcacttatacaaaaataaatgctcttagttacgaaaggcaaccgtcggtagtttttcgcgtaccgcaaccgcacacacatttgtgcccgtgttaaaattactcacagagtaaacattagtgtatgagtaatttcccaatatctaatgttgctctgatcgaagaacgcaaattggccgtgtcgtgtcgcgcgtttcgcatcaattacgcgatattattcagcatcaattgcatatttcgtttcattgtattctaaatgcaccacaatatatatatattactttgactgttaaatctccgattagaaaaaaaaattaatgtaggtctgataaaaatacacaagttatctgaacgtgctgttaagtatattaactgtgctgttaagcgcatcaaataccctgtctccaccgcgacactaacatttgcaggagtgtccataagcttttgccgtgccatctacttctcatgcgttccaacaaccacctgttacttacttgttcgcatttcaacgcattactctctcccattctctaactttaattgacagaaatgattgggaaacaaaatgaaagcgctaaaacttctttgatagatatcaaatgtttattaagcgtctaaagtttgcagcatgcatagcttagcacgaattgtgaatcatctattttgtcaatgaacaacattgcgcgtcgttacatagagaggggtgaattcattaccaaaatgtattacaaatgttacaaatttattaaaaactacaatttctgatttacatagttgcgataataatcacatcatgtttccactactccaattataagagcatgtggaatcgaaattgaccagaaataatcgatggtcaagcagccgtgccccaaatatcgctgatatcgatactgtggccgatgttttgacagctcttttggttattctgcaccggctcgcttttatgctttgttaaattatattatataagtatgatgcggagcgttattaatcaattactgggtctccggtgggtacacttatcgttgctatagtggccatttagtaaattctggtttctccattcaggctcagtggaaatagcagtgttttggttacgcaggtgcgcgataagggccatttgagcagacctcgactgcggaatccccaatggtttctgcgcaaggaaattacagtatgtgacatatatctttttatctataaacaaactactcatttgcgttttattgcaacagaaatacaacgatttgatgacggcggagaacaagcagttcgtcaacgaagtgggcaccaataactttggcgttccggcagttattaaggatagtttggtcaagaccgcgggcccaaccgccaatgaggctgtgtggactccgaatttgcgaagatgcggcgttatagcgcgcaaaattggccagtacccgctgtggctaaagaatggcgagcggattcgcaccacgctgctgcaaatcgtcgacaatcatgtcattaaatacattcccccggaagagtatttacctgcccaagttcccacggtagccaacctgcacaagcgcggctgcattctcgttggctccgagaccacgaacccagctctgttgaccaaagagtacgcgggcatattccgcaactcgggtgtgctccccaagaagaacctggcccgattcatcgtctctccagaagcccaactggcgccaggcactccactaaatgtcaaccactttcgcgttggtgacttcgtcgatgttcgcggcaaaacgtaagtacatacgtctaagcgctggttatacgtactctacttatattttgcagagttgaccatggcttccaaggtgttgtcaagcgacacggatttaagggcatgccagcatcgcacggtgtgacgaaaactcatcgacgtgccggcaacattggcggtggtggcgagaagggtcgcgtctggccaggcacaaagatgccgggacacatgggaaaccggtggcgcatcatcaagggtctgcgcgtgtggcgcattaacaccaaatataatgttatgtgggtgcaagggagctcggtggccggccccaccggcggtctggtctacatatacgataccatcttgccaacgcgaaagaataaggaagccccaccgttcccaacgttttacggcgagccgcagcaagatggggatgatgtgtggtacgaacaggtgcacaacttcaaaagcgagtcaataacgtatgaaaacgaataactttagtgcttaaggtattatagaaacctaattgtttgttttgaaataaaagaaataactaattttatatatgcagagtagttttaaaagttggttgtaacttatttaagaggttttattcaaacctaaatcgaataagacctcagatggttaggtttcttatttgtttcattatattcatataggaattttaatgagcttctttttaaggggaagctcatttaaaataaaacctattggatttttgaatgcccctctgtgcagttattattcttattggcgtaaagcggctccaatccgttgttccgccacgcacgtgggtcacactgccatcgtatatcgatacatcctcgatgtggcaatcggggatggagccgcgaagcggtcacactaaatccaacttctaaaaaatcgtgccggttatttatttatttgtattattattacattaattatttaagcgggcacgattgtccaattggaaccatgccgaaggagcagtttcgcgcatctgcgctgaacaaaaagatgtgagttgcgcccccaaccaaaacaaataacagaaattaaccgaaacaacttcagttcacatgtgcaattcggaatcagcggcgccgatgaaatccaacaggaggctctggtgcggattatctcgaagaatctgtaccaggcccagcggcagccggtgccttacggcgtcctggatcgccggatgggcatcagtaccaaggatgccatgtgcgagacctgcggacagggcttgaacgagtgcatcggccactttggctacttggatctggcgctgccggtctttcacatcggccactttcgttccaccatcaacatactgcaaatgatctgcaaggtctgtgcccatgtgatgctcaagccagaggaccggcagttgtacgaaaagaagctgcacaacccgaacttctcgtatttgggcaagaaggcgctgcatgtgcagatgttggccaaggccaagaaggtaaccaaatgcccgcattgtgg

SEQ ID NO: 18116 - DNA, 1094 bp, DROSOPHILA
agcgttattaatcaattactgggtctccggctcagtggaaatagcagtgttttggttacgcaggtgcgcgataagggccatttgagcagacctcgactgcggaatccccaatggtttctgcgcaaggaaattacaaaatacaacgatttgatgacggcggagaacaagcagttcgtcaacgaagtgggcaccaataactttggcgttccggcagttattaaggatagtttggtcaagaccgcgggcccaaccgccaatgaggctgtgtggactccgaatttgcgaagatgcggcgttatagcgcgcaaaattggccagtacccgctgtggctaaagaatggcgagcggattcgcaccacgctgctgcaaatcgtcgacaatcatgtcattaaatacattcccccggaagagtatttacctgcccaagttcccacggtagccaacctgcacaagcgcggctgcattctcgttggctccgagaccacgaacccagctctgttgaccaaagagtacgcgggcatattccgcaactcgggtgtgctccccaagaagaacctggcccgattcatcgtctctccagaagcccaactggcgccaggcactccactaaatgtcaaccactttcgcgttggtgacttcgtcgatgttcgcggcaaaacagttgaccatggcttccaaggtgttgtcaagcgacacggatttaagggcatgccagcatcgcacggtgtgacgaaaactcatcgacgtgccggcaacattggcggtggtggcgagaagggtcgcgtctggccaggcacaaagatgccgggacacatgggaaaccggtggcgcatcatcaagggtctgcgcgtgtggcgcattaacaccaaatataatgttatgtgggtgcaagggagctcggtggccggccccaccggcggtctggtctacatatacgataccatcttgccaacgcgaaagaataaggaagccccaccgttcccaacgttttacggcgagccgcagcaagatggggatgatgtgtggtacgaacaggtgcacaacttcaaaagcgagtcaataacgtatgaaaacgaataactttagtgcttaag

SEQ ID NO: 18117 - protein, 309 aa, DROSOPHILA
MTAENKQFVNEVGTNNFGVPAVIKDSLVKTAGPTANEAVWTPNLRRCGVIARKIGQYPLWLKNGERIRTTLLQIVDNHVIKYIPPEEYLPAQVPTVANLHKRGCILVGSETTNPALLTKEYAGIFRNSGVLPKKNLARFIVSPEAQLAPGTPLNVNHFRVGDFVDVRGKTVDHGFQGVVKRHGFKGMPASHGVTKTHRRAGNIGGGGEKGRVWPGTKMPGHMGNRWRIIKGLRVWRINTKYNVMWVQGSSVAGPTGGLVYIYDTILPTRKNKEAPPFPTFYGEPQQDGDDVWYEQVHNFKSESITYENE

SEQ ID NO: 18118 - DNA, 4340 bp, DROSOPHILA
cgagttcacggcggagaacaagaagcgcgtggaggccatactcagcatctatccggaggggcacaagcgcggcgccatgatcccgctgcttgatctggcacagcgccagtacggctggctgccaatctctgccatgcacaaggtggccgagattctccagttgcccaatatgcgcgtctacgaggtggccactttctatacgatgttcatgcgcaagcccactggcaagtatcacatccaggtgtgcaccaccacaccatgctggctccgcggatcggacgacatcctggagacctgcaagaagcagctgggcatcggcgtcggcgacaccaccaaggacaggaagttcaccatctcggaggtcgagtgcttgggcgcctgtgtcaatgcgccaatggtggcgatcaacgatgactactatgtaagcaattctaattgctaaatgtgtttcctggtcatttgtttgtaggaaacgccagtttcactctcagcctcgtccagcgtttcaatcttaatgcgctgaaatcgactctatattgtgcaaacattgctaacgttttttttttactttgcaggaggatctgacatccaaggacatgcaggacatcctgaacgacctgaaggcggataagatatcgccccctgggccacgcaacggacgctttgccagcgagccaaagggcgagcccacttccctgagcgaggagcccaagggtcctggctttggtctgcaggccggtctgtagaggatgagcaaggagcagaacctatcactgattgtcgaacgaaagttaaataaatgttaagcaacttatagaggtcattgataaaggatttttggatttttttttaaaaatatgctcactttccattggaaagtttccattttgaaaggttacacataaaataataactcccaacgaactcgagaatactagtacattcaattagatgtggaagatcgccagaaccccaatgcaagccaaatgtgcgtttttcatatcttgaccaataaatgattttattttgtagtggaaacggcaggttcccattgctaattataatggatgtttactattgcatacgtacgcatgttccattactaattataatgttcgctcattataattgtatgtacaatggcgtacgtacgtaagaacgaatattatgaattaagatgattggaagagtagttgagaggctattttcagctgtggcaattgaccaatacaaacatcaattactcaaaggataaaactaaagctacagaaatgatgccttacattctacgctggttgagtgcaattaaccagatataatactacatgtatgtacgcactgtgatgcagtcgattgcctgtcctttttacttatgtactaaaatccgaatttaatatttagttatttgtgttgcccgtaaagttgtccgccaatagtcaggattgtggacatgatgtggattggctccgcccgcgagcttttttaaaaccaataacgataagggaaattttccgttaaaatctaactggagccgccatgggtcacctttccgcgtacttcggtccgcatgtgttgtaatattatatgtaaaaaaaaaaaagtgtactaaattcctacatggatttccttccttgttgcccttcctcactcctcgccgtagaaaatgctgaaagtataaaggtttattgacatatgagtaacatggttgagtgtggatatcaaaactataaacaaaataatgaagaaatcagacacaatgcgtgaaattaagcaacgaaacgggcaaatataaactgaaagtatcaactgaggaataactgaatttaatacttcacagctgtgtcgttattctaaccttattgtgtatatagagatattaaacgcaccggtttttggcggaagagcgcttcgaggagcgttcaatacgattgtgcagatttgtcctgggatagcattcatcgacgaggcgctcggtcttcttgggcgattcgcgcagctccttaacgtccacgttctcctgggttgcttgtttccgcataaacttttcgataagcgcatcgcacgccagattcttactcggctcccaggaatcatccttcggtccatacttcttccatcggatcttaaacatgtcgccctccttggtggcaacgtgatcaagaattttttcgacttcccattgcttttctgggtcgattgaatcgtcggctttcttggtgccggcgttccgtcgaccacgtcccttagccttcttagcgtttggcgaggacttcgatttagctgcaaccttctgcaaagcagcaaagataaaaaagttggacttcattgatcaaaatactgtcctataaataaaatgaatcttaaagtatgaggcatttttggccaagataaccgccatataacgaaattactctcaactgactacactttctcatcagcgtttcagtgtaatgttttaaaagcatacatttttatatgtacgccagttagcgctaatgatttcgaataatagtacagtcatcataatctaaccttttcgaaaggttttgagtctcaatgttttgtaattgctgactagaatttcgtagaatttactgagggttcaatatctaattgggtctagtattttttgatttctcgaattgatgtctcacctggggttgagctgatttctcatcctctgttccagcatcgacatcggattccgaatccttttcagcaaccttcttgccatttttgacggaagaagtcgaagccctgctcagcttgcgcttcttgatcggacttgatgcatgtgcagaggctttggaggtggagggcagttcattgctatcttccgtttcaccgcgcacggatcgccgtgtctggcgtttgatatttggcttccttggcgaactgtcggcactagggtctacatcggaatgattagcatcatcatccgaatcctctataacgatttttttgccatttttgcggggcgaagtggtggcgttcctggccttgcccaccttgcgcttgttccttgcagctggtacatccacgttggaggtagaggtctggcaatcgctgtcttcgctgtcagaggccacagtcagtttggcctttcgtttgttcggcgtcttcctggacgatcgacctgtcccattggacttttgctggtcaatctcctcgttttcgctctcgttggcgactccgttcctgcgcttactttctgccaccttcttactcgccttggccataatgcacttgtttatccggttgtgtgacaacgtccaatttgctctacggtggcgatttcaattgccgcgtaccagcaaaacaaattctttatagagttttttgacgactgtacacttggcagtgttaccagactgcaagaaacaaaaaatcacgaagtcgggatatgcagttttataaatatatatatatttatatttcctgggaatatttatttaatgtttatcaatcgagatcccgagatcgaatcgaagtaagaaagtaagaaaattaattctttccaaatttctagaaacggtaatacaaattagtggtcgatacattcgacttgaaatgcgaattaatcgattgaataatcgtttcttctctcatccctaattccaaccgcgtgcgaatttcaatacgtttcgaaacgaccgcattttggtcaataaacagagggtatgcagcgccagaaacccaagggacccggcaaaccgggttcgcgtttcaagccgggatccggcacgttcaaaggagctggtggtggccggaaaagcggcgacaacagccagaagcgtccgcgccaggagatcaacaagtcgcgactggccgccaccgaagcggagatccaggacctcaagaccaaatacgcagagatcgatgctactgccattaagaagttcgcccagtttccgctgtccaagaagacccaaaaggcactggcggagtccaaattcgtgcatcccacgcaggtgcagcgggacagcattggacccgcactgcagggcaaggatgtgctgggcgcggccatcacaggcagtggcaagacactggcctttctcatacccgtaagttggtcctcgtcccttcttcgaaagaaattgccggctgtaagttatatatgcaatggtccatttattgcaggttctggagcatctgttcatgaacaaatggtcgcgcaccgatggcgttggcgctatcatcatctcgcccacccgcgagctagcctaccagatcttcgagaccctaaagaaggtgggaaagcaccacgacttctccgccggcctcatcatcggaggcaagaacctgaagttcgagcgcactcgcatggaccagtgcaa

SEQ ID NO: 18119 - DNA, 1756 bp, DROSOPHILA
aaaaactctataaagaatttgttttgctggtacgcggcaattgaaatcgccaccgtagagcaaattggacgttgtcacacaaccggataaacaagtgcattatggccaaggcgagtaagaaggtggcagaaagtaagcgcaggaacggagtcgccaacgagagcgaaaacgaggagattgaccagcaaaagtccaatgggacaggtcgatcgtccaggaagacgccgaacaaacgaaaggccaaactgactgtggcctctgacagcgaagacagcgattgccagacctctacctccaacgtggatgtaccagctgcaaggaacaagcgcaaggtgggcaaggccaggaacgccaccacttcgccccgcaaaaatggcaaaaaaatcgttatagaggattcggatgatgatgctaatcattccgatgtagaccctagtgccgacagttcgccaaggaagccaaatatcaaacgccagacacggcgatccgtgcgcggtgaaacggaagatagcaatgaactgccctccacctccaaagcctctgcacatgcatcaagtccgatcaagaagcgcaagctgagcagggcttcgacttcttccgtcaaaaatggcaagaaggttgctgaaaaggattcggaatccgatgtcgatgctggaacagaggatgagaaatcagctcaaccccagaaggttgcagctaaatcgaagtcctcgccaaacgctaagaaggctaagggacgtggtcgacggaacgccggcaccaagaaagccgacgattcaatcgacccagaaaagcaatgggaagtcgaaaaaattcttgatcacgttgccaccaaggagggcgacatgtttaagatccgatggaagaagtatggaccgaaggatgattcctgggagccgagtaagaatctggcgtgcgatgcgcttatcgaaaagtttatgcggaaacaagcaacccaggagaacgtggacgttaaggagctgcgcgaatcgcccaagaagaccgagcgcctcgtcgatgaatgctatcccaggacaaatctgcacaatcgtattgaacgctcctcgaagcgctcttccgccaaaaaccgcattttctacggcgaggagtgaggaagggcaacaaggaaggaaatccatgtaggaatttagtacacttttttttttttacatataatattacaacacatgcggaccgaagtacgcggaaaggtgacccatggcggctccagttagattttaacggaaaatttcccttatcgttattggttttaaaaaagctcgcgggcggagccaatccacatcatgtccacaatcctgactattggcggacaactttacgggcaacacaaataactaaatattaaattcggattttagtacataagtaaaaaggacaggcaatcgactgcatcacagtgcgtacatacatgtagtattatatctggttaattgcactcaaccagcgtagaatgtaaggcatcatttctgtagctttagttttatcctttgagtaattgatgtttgtattggtcaattgccacagctgaaaatagcctctcaactactcttccaatcatcttaattcataatattcgttcttacgtacgtacgccattgtacatacaattataatgagcgaacattataattagtaatggaacatgcgtacgtatgcaatagtaaacatccattataattagcaatgggaacctgccgtttccactacaaaataaaatcatttattggtcaagata

SEQ ID NO: 18120 - protein, 336 aa, DROSOPHILA
MAKASKKVAESKRRNGVANESENEEIDQQKSNGTGRSSRKTPNKRKAKLTVASDSEDSDCQTSTSNVDVPAARNKRKVGKARNATTSPRKNGKKIVIEDSDDDANHSDVDPSADSSPRKPNIKRQTRRSVRGETEDSNELPSTSKASAHASSPIKKRKLSRASTSSVKNGKKVAEKDSESDVDAGTEDEKSAQPQKVAAKSKSSPNAKKAKGRGRRNAGTKKADDSIDPEKQWEVEKILDHVATKEGDMFKIRWKKYGPKDDSWEPSKNLACDALIEKFMRKQATQENVDVKELRESPKKTERLVDECYPRTNLHNRIERSSKRSSAKNRIFYGEE

SEQ ID NO: 18121 - DNA, 8877 bp, DROSOPHILA
gacctttaagcagactaaggggttgaggcaatccttttttcccaactcgtgtcaattaactcattaaacttcccaccgttttgtggagcgtcggacccaattagctttcaattataccgtctatgggctggtttttcataatcaagcaaaatttcaattaattaaaatgtaaccgagctaaaatggaggtgtgagaaagagcctttattacgaaggactctattacacattaaagttttatggaaagaatgaatattctcagtgagcaagaccagataagctgccaacatattttctctatcctgtcagcttcataaaatgttggttttgatgatggaaacttttgcccatgaaactttttgttcgcagattatcgtgaaagagttttgagctccgtttcgctgtattgttggcttgccaaactgttgcatacttttaggaagttgcaaggagcggaacatgtgtttgccatgtcaactttttgccatatttgtagccataacagctacacatctccgaggaaggtattttaggaattttttttgagtacatcaaagccgataaagaaaatcccccagacaatggaagcttaccgaaagaaaaccgcaatgataattccccagagaaaaacgccgatcgagtacactgaagtaaatagaccatttatttagatgctagaatttcttgtttatacagagaattaatccatttgcacattgagttacattcaacagctacagttggagttcatagcatggagttggttggattgttaatggggctctcagctgctcacatatacgacatttaacagtttaaaacgattgacctaacttatgttgcttgtttgctccgcttggtacttggtttcgtcctttcatcgcactccagcctttaataattagtactagctaactaatcgcactcgcagatctgcgacacggaagtggaaagttcaatgaaagttcagtctcttaagatgcacttgctagggatttgtctacaccgagttctcctcgagtccttgctggaattcgagaatgattattggatggtctgtatgagtgagaagagctgaattctggttctcaccctcatcaggggactaatggcccggggcattacgctcagagtgctgccggaactcatggcatttgccgccaaagtgggcatcgtgtgcagggcattgttggagccccggtggagtgaaagtggggcatgctgacccaccagcgtggtggtggtggccgaacttacgcacgattcccgcttgccacgcccatagtagctggtcaaaggtctgcaacggagtggatgtcaagatatcccgtcacttcttagccacgattgccacataacttaccgcatactctcggctcggggggaaccaccgcctttcgagaagcttttcgtggtataactgccaagtttacgaagaaatgcgcagaaaaagttagtgtacaatagtgaaaatatttttaatagctgccattcctagtagcaatctagcattgccacactttatgataggtttaacattaaaggcatttgaggagaaatatgtacaacttagttgtttcctatataagtttgcagttttctcttctcgagtagtgtatttattcttaagtgtacttacaagcagacttaaaagtttggactacttaccgtcggttctggttaagctgaatggtgcgcgtgtcccgccacgtggaaatgtggtgtctcagtgcatttcgcacctccgagttgaggaaacagtagaacagcgacaccgagaatccctgtggcacacacacaaacagatctttagaaaaaaagtggctaagaggattgacaaacgaaacccacctgagtgctgagtaataccgctcgcaggacggcaaacatgtgtcccattaggccagattccgagggaccagccagcaccaccaggtaggtgatgccaaaaagtgggattagcaccagcagtgccttagcagctttcctatactgacgagtctccactgtattggccgagcgcagctttgtgattagaacctaaaagagaagcaacccgataatctggctcagtattttcggcaatttacagtcggaaaaatgtcggatgataaattgtaaattcatacaatagctttaaagtgtttcaagaaactaattgggtgattcataaatgtgagtttttgcatccatgttaacttgttcaatcttctctgatgttctttttttcgcatatcaatattttttctgtgtaaattccatacgcacccacatgatacgcagcagaaatgtgagattgattattagcaccgcacagacaggtccctggtatatccaatccacatgggtctcctgcatccaggggcagttgatttcgtactgtcggatgggaaacaaaaggaagactactctccaggggtctcttcaaatcccaaaatagacataccttttcgggggtgctgtaggtgaccgtcagactcttggccacagcccaggtgacaacaaacaaggccgggccacctgccagcaggagaaagacttaattggctggcacacacaatcgggcattcacacttaccccagcctatggaggcgtagatattaaagcgtaaattgtccccggagaaagtcttaaccaccagcatgtacaggtacaaaccctcgaccagcatccaaaagaagttggtcagggtgaagaagtggaacagggtgatcagagcaatgcagctgcccactccacttcggatggagatctgtagattaagtggtagccattagtcttaagctgtcagcgtctgtttatagtttcctttcactttggactagcacccctttcaggcacgagtatgatttaataagccagcaattgcaattatctggcagtctcataatgctcacctggacggataacaagagtatccagaacaaagccgacatgatgtacgtgaagaacaagttggcgtggatggtgttgcgcaggcaacgcagctccctggtgaacaaagacaaatacaaaggacggggggtaagtcgggggttaggcaaaaataaatgccatacccagggtatcggggtcaccagggagggggctggggtgggtacactcacttgaagtaggcgaaaacaatcagcgccagcgagagcgataccaggctgagggtgtatccaatgtagtagataatggtgggcagctccacgatgacctcgaactccggcacggattctggggcgggcaggtgggcgcaggcatcgtagttggtgtacttctcccaagttccattggcgtggcagaacctcgttgcattctctggtcaaatacaaaaacgcacgcagcgaaaaatgcaaacagtttttaaatagactagtcctatacacttggatctatattgggaatatgccttctctgtttggacatcgacttaaaaaattccaatttaaattcataacttagtgcaaagctaacagtttttttcaaacgcttagtttaaatataagtctaatgttaaagtataaggtcaaaggggtactcactgctgctatcgtaatgaattccctgcaactcgtccatgcactggagcaccgccagggtaccgcgagctgtcctcggccagcacaggatcgagtcgaactgggtgaggcagtggccactatcgttgccataggtggatgcctcgatgtgctcctgcaccaggcactgcaactccacgctctcaccgatgccatctaggttgtgcagatccaggagcggatcactcccgctggcgttcaccgaatcgatgtggttgtggtcactcattctacaacatcctggcacttggcatctctggtactgaaataagtcagtttaaagttgaggcaaagattgtaaaatacttgaagcagtgggaaaatttaaaatattttagaatcattatagagttttaatacatttcatttaagaaccgtcggacaataacgttttagaaaaatggtaagctttaatcggaaataaaatattatagactgatacgaaaatattgctgtcatttcctgaccatttccctacgaattgacaacgttcataatactccccagctgaattcgttcaatcagaaagttataatttcctcaattgttaggggattccccggcggttggctgaaactaagctgtcgggcaaagttcaattgccaacccttctgctcgctccaccgcagccagtggcatttcgcctgtgtgcgttaattgcattggccatgtttcaccgacaacgggccacgcccacatcgaactcggcttaaagatccatcaactcggcgggaagtatgctttaagccaaagaccatttctagggaaaacagggtggctagagataagtaaatgcacaggcccagtgccataaaaattcattagttttgccatcaaaggcggacagaagcgtcagcaaatcagagaagcggcaggcaaccttttattctgatatgtgcccataaaaagcacgtcaaaggacccaagtctggggtgatggtgatagaaattagaaaagctaacttccggccaaagattgtggcctttgtggcctggttctgcctggttctgcctcagagacgaaatctcgcatttatgttctgataataaatggcataaatgatgcatcgttacattaatgcacgacataaaacggggcggcaagtaagacacacacacaaacaatacatattaaaaatgtagatgggcctgtttgtacagtgagctagaaaagtaaaagtgcgctctttaaaatttaagcggaagtggctttcactttctacttaacagtgaaataaattaggcaaacaagccagcttgaattccaaggagaagccataagccaaggcaggaatttaaatccactcggagtgaaaatggttatctcttaagtgatgcccaacccgaaccaattactttctgtggaatttccgattttctcggacggcacattccccaggcgattttctaattggcacaggaatttctaaccacaagccatgaaatattaaacccgaagggaaattgaaaattctgccccaaggcttgggtgctccacttctggctgccactgtatgctcggcttcgtatttttctttccattgtttctgctgtttgtttttctcgtaaattaacgcaatgcatgtacataaaacaaaggctggctgattattactgcacggcacatgcctgcacgtcctttccggagtttgccaaggtcctgggtcctggttcattagccgctcgcttacttataacacatacgccccgttgccttcattttccagcttcgcacgctcacagcaacgcagatgagttaagacagcaatatacgcgccgcaattttaagttgaaaagcatattatttgcaaaaaagggaaagaacggcgaaggaccgcctctaattacctcataaataacgtcgcacgaaattagctggcctaaattatggccataactgctaattgcatatttgatttcaattagttcagctgacaggggcccaaaaacccaagaaggacacatttgaaatcagcgtgcgaatgcaaatacgttctgacagctcgcttggacaaatctcatttatggccagccaatttgacgaatgtccgcccgccggggaaacaggcaaaacaaattcagcttggccgaatcatcgccggcataaaaaggacattaccagaaatacatacatatacggaggcataagaaatggttggtcctggacgaagaccaacggacaaatcgcacatcgtcctttctgctcctctgcctctttgcagcatgctattatagaagattgtatgtaatctcgtacgattgcacacaatggatttgccaaaggcgacacaaaaaaaaaaaaaaaaaaaaaaataggggattgcgtggggggagtttgcttgtgggtcctttactttttttctcccccatgtgagaggttctgcaatttcctgctgctataatgcttataaatgttcacccgcaatcgccggggatttctttagggaattgaaaacataataacagtgcgaatagtggcaagcattcgcattttccacttatccaactaaatatgcagactaaaaattaaattccagttttttcaagccctcgaaggggatttttattttacgcccttatatgtgtacctatgcaaaaattccgcaattccgcgggacaccggggaaaagtgctattttcggttctcattaatgtagctcattaaattttatatgcataagctgccagctgcaaacaaaaaatgtaagcatttaaaatttataagcgtgccacacaagagaccaacagcacattacgtatacgcagcatggacaaagccagcttggaaagccagcacgcaggcataagcgtatagaaagtttgtaattaaattgctcatttaagcgtggaaacaatgaattcgatcgggaatacagggagtggggagtgttctgaggaaatatgtaatattcagcgtgtaatccgaagaaaatatattactaattttattcatccgccttgggcgcttaaattttattgttcggacttttgtggactctcctcggaggccgataaggaaaagccagtctagacaagccaacatcataatttgcaggcacgcactgccatttccatttccgcccaagcttgagcctgatctgctggccactttccatgcttaagtcagcacatatcctttagcaggaagatggaatgggatgggatggggctgacacttcagcgattgccaacaagtgttgcgttttattgtctggcctttaacagctctcctttgccatccgcccattgtgtgtgcggcacgtgcaggcgcctgcatttggagctacgtgagggatctccactcctgtggatagtccgagcataaaaccataaaaatccgccgcaaaaaaagaaacgaacctggccaccaaatctgttatttattggcccaataaaaatttggtttaatgcattacaagttgccgaaatgccacggagattgccggagatttacttggcttgcaaagggaagtccttaaggccatggcaacaagtccttcctggttagcagttagtttattagagtggtcaagtgcatggagtggggggcatttcggatttcgggctgaaattttcccaatcgatactgcaaacacgcaaaacaatgcctctgctgccaactaatatccatactctcggctcattcagccacagagttttcgttttagtaaccgctggcattgttttcagcaggtgagcgtgtgtatgcactggcattttaattaaccacaatttgtttctgcattccaaacgccctgaaaacgcttaccttctactcctagccaagtttctatctgcagaatgagattcctttcgccactcacactcacaatttgcgttggaattcttgggattacttgcgtttagcactcggactacggaccgcaaaagcgccaggaggcgggtcctttgtcctttcgaccacctacttgacccgtcctaaatgcgtttaacgccttccaagctgcgaaatgattatgttaaagcggtttttgctggagcggttatttttgctagttgccttggttattgacacacgcccatttacgtgggcaaaactttattgagttcacatttatatgcgggattatttgttatagcgacccttgaacttattcgaagcactcaaagccaacgactagaaaagttattcgacattaatgcgcggcacttatttgttatttcttttgcgtttgctaattaaaattttcatttttctcttcgcacattatttaaaaattagtttccactttaacggctctgaggaggacaataggttttcgcaagttttgaaattccgaaacgaaccgcactcgtacacatcccgctgataactgcggggatacccgaaggatgtgtcttaacaaggctcgccttcttaccaaaaggcgccaattctgggttccacaaagtgaaaagctcgcaaagctgcattccacaagctgttgaaaaagctttccgccgggcaacaggtggaacatcctgacgggaggttgggtaaaaggaccccaaacagaaaccgattcgattgcacttctaatgcctgaaaatctgcctatttgatttatgcaaatatgtgccggagtctcatgtttgcccagcaattcgctggctgtttgtttagggcatgcggcaaaagggataccccggactcaacaggattcggcaggattcgccaggatattgtttgtgaaactccttgcaggccgtctttgaagtcgcaacctgatttaattgtgattttcggagcccgttcaaaacacctctcacgtgggcctaatcaaattaaactgaagtggcagcgcctcgggtctgacagttattgaaatatcaatatggctaggctccgggaaaatggtttcccggaaaatgtgcgaaattaaattgtagagaaaacaagggcaacatttttactcactggcatcttttctcatgcctgccaaattttatatcacaatgataaacatttagacggatgtcctggctgcttggaatgcgtgcgacacatgagggttgcctgtgtggatttttgggcgcaaggatatgggcggggtggtgggggcgatatctccaaccaaactgtttgatttttaaacaaatgctaatgtcaactgccactcagaggcatttaaattccaatttaaaaatgctttctctcgatgccaaaagcaaagacatgttcgttgtcctgtttcgagtccatccactcgttctttttctctcagattctccgattctctgacccgtttctccagttttctgctcgcattaaagcgttcgtcctgtctcatgcatatttaatgtcacacg

SEQ ID NO: 18122 - DNA, 2089 bp, DROSOPHILA
cggttcgtttcggaatttcaaaacttgcgaaaacctattgtcctcctcagagccgttaaagtggaaactaatttttaaataatgtgcgaagagaaaaatgaaaattttaattagcaaacgcaaaagaaataacaaataagtgccgcgcattaatgtcgaataacttttctagtcgttggctttgagtgcttcgaataagttcaagggtcgctataacaaataatcccgcatataaatgtgaactcaataaagttttgcccacgtaaatgggcgtgtgtcaataaccaaggcaactagcaaaaataaccgctccagcaaaaaccgctttaacataatcatttcgcagcttggaaggcgttaaacgcatttaggacgggtcaagtaggtggtcgaaaggacaaaggacccgcctcctggcgcttttgcggtccgtagtccgagtgctaaacgcaagtaatcccaagaattccaacgcaaattgtgagtgtgagtggcgaaaggaatctcattctgcagatagaaacttggctaggagtagaagtaccagagatgccaagtgccaggatgttgtagaatgagtgaccacaaccacatcgattcggtgaacgccagcgggagtgatccgctcctggatctgcacaacctagatggcatcggtgagagcgtggagttgcagtgcctggtgcaggagcacatcgaggcatccacctatggcaacgatagtggccactgcctcacccagttcgactcgatcctgtgctggccgaggacagctcgcggtaccctggcggtgctccagtgcatggacgagttgcagggaattcattacgatagcagcaagaatgcaacgaggttctgccacgccaatggaacttgggagaagtacaccaactacgatgcctgcgcccacctgcccgccccagaatccgtgccggagttcgaggtcatcgtggagctgcccaccattatctactacattggatacaccctcagcctggtatcgctctcgctggcgctgattgttttcgcctacttcaaggagctgcgttgcctgcgcaacaccatccacgccaacttgttcttcacgtacatcatgtcggctttgttctggatactcttgttatccgtccagatctccatccgaagtggagtgggcagctgcattgctctgatcaccctgttccacttcttcaccctgaccaacttcttttggatgctggtcgagggtttgtacctgtacatgctggtggttaagactttctccggggacaatttacgctttaatatctacgcctccataggctggggtggcccggccttgtttgttgtcacctgggctgtggccaagagtctgacggtcacctacagcacccccgaaaagtacgaaatcaactgcccctggatgcaggagacccatgtggattggatataccagggacctgtctgtgcggtgctaataatcaatctcacatttctgctgcgtatcatgtgggttctaatcacaaagctgcgctcggccaatacagtggagactcgtcagtataggaaagctgctaaggcactgctggtgctaatcccactttttggcatcacctacctggtggtgctggctggtccctcggaatctggcctaatgggacacatgtttgccgtcctgcgagcggtattactcagcactcagggattctcggtgtcgctgttctactgtttcctcaactcggaggtgcgaaatgcactgagacaccacatttccacgtggcgggacacgcgcaccattcagcttaaccagaaccgacgttataccacgaaaagcttctcgaaaggcggtggttccccccgagccgagagtatgcgacctttgaccagctactatgggcgtggcaagcgggaatcgtgcgtaagttcggccaccaccaccacgctggtgggtcagcatgccccactttcactccaccggggctccaacaatgccctgcacacgatgcccactttggcggcaaatgccatgagttccggcagcactctgagcgtaatgccccgggccattagtcccctgatgaggcaaggactcgaggagaactcggtgtag

SEQ ID NO: 18123 - protein, 504 aa, DROSOPHILA
MSDHNHIDSVNASGSDPLLDLHNLDGIGESVELQCLVQEHIEASTYGNDSGHCLTQFDSILCWPRTARGTLAVLQCMDELQGIHYDSSKNATRFCHANGTWEKYTNYDACAHLPAPESVPEFEVIVELPTIIYYIGYTLSLVSLSLALIVFAYFKELRCLRNTIHANLFFTYIMSALFWILLLSVQISIRSGVGSCIALITLFHFFTLTNFFWMLVEGLYLYMLVVKTFSGDNLRFNIYASIGWGGPALFVVTWAVAKSLTVTYSTPEKYEINCPWMQETHVDWIYQGPVCAVLIINLTFLLRIMWVLITKLRSANTVETRQYRKAAKALLVLIPLFGITYLVVLAGPSESGLMGHMFAVLRAVLLSTQGFSVSLFYCFLNSEVRNALRHHISTWRDTRTIQLNQNRRYTTKSFSKGGGSPRAESMRPLTSYYGRGKRESCVSSATTTTLVGQHAPLSLHRGSNNALHTMPTLAANAMSSGSTLSVMPRAISPLMRQGLEENSV

SEQ ID NO: 18124 - DNA, 6782 bp, DROSOPHILA
aaagtttagttgtaaaatcatctgatgtgggcgtgcaagaagtcctggataatatccagcgctactgcaatcaggtgaaggatatgaatggtcagatgtcggctgaactgcccagtctcgaggacatcttgatacccaagaaaaattcaaacggtggactttgtcagccagcagccatgagctctaggaccctcgcaggtagtcagaaaaataaaaaggttgacgacacggagatcgaaacgcccaacgatagtacggatgagacctacaccgaagtggatgacttccagctctcctcggacatctcgaccggcagcgaggacgatgactgtggcctcaagtatccaagtggagcaactacgagccggcccaaccgcaaattaaatcgaaggggagccaaccaaggcgccggagatggtcagtaaagccactggagtgaagataaaggagcattcaaactgaaggggaacccattcctagaaatcgccttaatacttatttaaatattacttttggcatgacctaaattatttctgataatgtaaagccaaaaaaaattggatcaaatgtttcgacaaattaactataacttatcgtacctggcgtacatgtattcatttaattcatttttaggatcacaattaaactatgttcaaaatttaaaactggctttcatattcttatttatgttatgtgaacagcttacattgagcataaaactgacctatttggcccttggcaatcccgattctcgctgagtaatgcccattggtgtcactaataagtgcatattatattgactgcaaagcaagaatcaactgagctggccaaaacaaggcatcacccccatccggcaaccgggtaaaactgagtcgagtggaaaataaggcctaagaccacccccactagccctaacctgcagctgcatttttatgggcttacgagtgtcgcggctctgcaagttcttccgctagttcagttggccaaaacagtttaaacgtggacgtggtccgtcggtaagatattggtgcgtctattcaaagtaaaatgagtatttaaataaaaagccaaacagcttaataaggccatatagttgctttttgggcaattaaagttaaaccccctaaaggaattgagctctaaattaaacttatgcaacgtggccaaatgaaaatgcttacttttcaactgatgttgcgtttgacgtgaattaaaagtgttatgcaaagccccaaaacccggaaaagtgccatacgaatgtcaaagcccaaggcacgagtgtcggttctgttttcaaggatattccactgaacagtttgcattggatagccataaaataaaataaaacattttgataaaccaacgaggatagcaaacattgtgcaagctatccacaagtgccgaactgtaagactggccaaattgcaattactgatcggcacctttgacaggccaccctattccaccctgaaacccgaaacccttttgcccagcaagttggctaattgcaatgaccaatatttgaactggcttcggggtgtacatatttatttgtataattatgggaaattgtacactcgacgtggaaagcactcaatttcgtgagtgactgtttgagccaataaccataacaaccagcgagtgccgggcctcagccaagttagtcaaaacaaaacggccaaaacaggtgcaaaacattgccacatcagtgttccgccttcggttttccagggggtgggttcgaaaacggaaaaactaaaataaaataaactgaaatagagacaaaaaaaaaatcgaatagaacataattgcattgtgcgggcaactgcaatgctgcacccgttaacacaggggcttaccaaatcaaattggttgttcgtgggccaacaataaatatatatgtacggtttgagtgctgcgtacatcactggacaaatataaaacgagaaacgtttaattgaccctaaaatcactgaggcgttcaatttgtgttcccttgttgttttttctttgttttttttttttgccaattgctgttgcccaaaactattgtggctctgactgtcagtgggtctagtgcgtgaatctgtgcaataagtgtgtgcagtgccataaattccagaattcggcttccacaaaaaacctctattgattttcccgaagtgagagaatatgcgaaacagaaattttttccaccgtattactttgcactgatagtgggcaaaatcacgaagaaacagacatggaaaagtggaaactatgccaagccaacaaagtctgtgttagtgtgacaatttttaatgcgattaaagtgcagcactctccacgcagtcggcaaaatggttgaagtggccggcaaaaaataaaaaatacaattctgcacactggctaatatccaacttaccattttctttcttccttctagctatcaaaataaaaataaaatgatatcaattatcagtacatgttgaaggaaagactgctgcattgcttaattatcaacggacattttttgtatttaattgtaaaacctttaaaactttagaaatgaaggtcatggacgctttgcaatctggacggagaaagccattaccagtgggtgagtgctgagtaaatgtcgtaaggcagaagtgaagtgcaatggaatgaatggcaacttgaggggatttctttttccgggaatatttcaagacctgtatttttctcaaaatgccattcaagcttgagtttgtgtagaaaattccattgcaaatatggtttaagtgaattcctttattgagtaattcaatcaattaactagtcaatcaaccatgctaaccagaacaaagttactttaaatttaaggacgacgatattttccatcttatacgaataagatttaattcattgttgtcctctgcagctcttctatgcatcctagtcactgtgttctgcgtcttggagtgccatggagctgacctgacatcacccaccaagaagtccgctccccttcgaataaccaaaccacagcccacaagtcagcaggccaagcccatcagtattaccacaagggccccaacaacggtggcatcaaccaccgatgatgaagtctccagctccgtcgatggtcagctggccccgctcatctcatccacaaccgagggacccagcagtggaacaactgccagcttagtgccggaaatatgtctcaatggtctgcagttgacggtcaatagtgcggatgagggaacggttatacggaagcaggaggagtttgtcaagatactcgaaggagatgtggtgctcagtgtcttgaccaaggaccccgactccgcgttgttcgtaatcaatcgtgtgaaccaggcgaatcttataatggcagactttgaaattggtttgtaaaattccgctatttatatgcacctaaatcaaatccttcttattgaattccaggaattcgcgccatcagcatcgacaacgccagcttggcagagaacttgcttattcaagaagttcagtttctgcagcagtgcacgacgtactcgatgggcatattcgttgactgggagctgtacaaacaactggagtctgttatcaaggacttggaatacaatatctggccaataccgggaacgcgggcgcacctctttcccaaagttgcgcacttgctgcatcaaatgccttggggcgaaaaaatcgcatccgtggaaatagcaaccgaaacgctggagatgtacaatgaattcatggaagccgctcgccaggagcacatgtgcctcatgcacttcaaaagtgacgataatgtttacataatgtttggcaataagctagctagtcacttcaaggaaaacggcactctgttttccgtgcccaccgatagaacggacgatgaatttctggcaggtgggtaataactacaacgaacaggattactaaagttgtgggtccttttgatttattgtttaagttaaggattaagactgatacattttacttacgcattaatttcttcttttctttttagacttaccaaacagagcttttgtcctaatggaaaacgaaattgacctgagcaccgccgttgaattggacgccacgcccaccgctttggacgagatcctgatcgggaagagtgtgttaccatcgcgagtcctgagctttgccggctccataatcgacctgatgaactggctgcgcggatccctgtccaagcactgtaagcgtggtgaggagcacgacttgtatgtgctggagagctgtttcaacttcctgaacttcatcgaggactggcgaacctcggagtaccgacaagcccatgatacggctgagatcctgtcgctgctgctgatgcgcaagttgggcaccgccatgaactttcagatgtaccagaagaaagtgttgacgctggacaagatcacaggtgaatcgcgtaccgaactgcgcgagattgcgtcgcagaactttgtgaccaatgtgaccacgtactatcactataatcgggacaatcacaccagtttggagctgaagaccaagtttggtcaggtgttcaactgccagtacagtgctggtgacaataggagatatccattccttttcgatggtgaatccgttatgttctggcgcatcaagatggacacatgggtggcaactgggctgacggctgctatcctgggcctgattgccacgctcgccatcctggtgttcattgtggtgcgcatctcgttgggcgatgtcttcgagggaaatccgaccacctcgattctccttctactctccctcatcttagtgttttgctcctttgtgccctattcgattgaatacgtgggtgagcagcgcaattcgcatgtgaccttcgaggatgcccagactctgaataccctgtgcgcggtgagggtgttcatcatgactctggtctactgttttgttttttccctgctcctctgtcgcgccgtgatgttggcttcaattggttccgaaggtggcttcctatcccatgtgaatggatatattcaggcagtgatttgcgcctttagtgttgtggcccaagtgggcatgtccgtgcaacttctggtggtgatgcacgtcgcctcggagactgtgtcctgtgagaatatttactatggtcgatggttgtggggactgttggcctacgactttgctctactgtgctgtgtgggcgccttgataccctctatatacagatcccaacgaaactatcgcgagggaatactcattgtcattggatcggttttaattatggtaatttgggtggcctggatagcgctatccttattcggggacgagtggagggatgcggccattccattgggattgcaggcctctggttgggcggtactggtgggcattctgataccacgcaccttcctcatcgtaaggggtatcgagcggtcggatattgcccaagctctgccttcactcacttcgctggcttttgcccagaacaatcaatactcctcggaacaggtgggttcctagaaaattagcaagaaacttttctgattaactttaaaatctattcttacagagtgtttacgagtgcgtgaatcccgccatgcgccattgttcccaggatgaggtgaaccaccagtcgcctagtgagattcccacgttaccccttcgaggaggtggcccacgtcgccagcagttctttgccaatctccgccaggccaatgccaacattaatccacaacgtcctccacctcgaccccagcagagtccctcccgatcctcggtgtcctcgctgccgccctcgcccgatcacaacaagatcacccggttttagcccacgagtgtacaatgtggcacttctagtcaacgctcccagtacgtgaattcagctaagaactgtccaacattttgaatcactgacgaaccaagaacttattgaagttgataaaataaataataaatcgatacaaattaatataatcacaagaaccttttttctgcccacaatctgaagcgagccgctcctgtaattttttcatcgcaacagatatttttatcagaacggtttgtgcgcctgctaaatgaaagctgcgaaagctcagcgactttctcctcttgctcctgcttaatcggcctataactctaattggctgggcaaacacgtgacagggcggcaaacagcgaaagctagacgagctataggaaaactcatctaaggcgaaacaacgacggcaatcacaggacccgatatccttgtgcgtcacgcgacattggacgcccatttgtttggccttggaggagtgggtgtgtggaagggggccccaggaggacgctgacgtcagggtgacactggccggggcaagaacattgaccatggtacatggacaaatgcgcaacaagatatgctatcaagccgccacaaaggccggcaaaaaaaaagcgaggttgccacaaactaccgactacacgcgaccatttcaaatggcgccgactttgctgacaatgccacgcgcaaaacattagagggttaaggttggtgacaggtgggaggtagatcctgtagggatccaggccaacctcaataaagttatgctttaccatgtaatctcgcccgaaatccccccgaaaaatcctcacaatctgtggtttgtggatggcatactttttggggcaacgcgaaaagcgctttgttttccgcgcttttccctgcactggccgctggcataatttgcacttcatttgccgacacacaaaaaggaaatgtcttgggcagggactgggataaggataaggattcgttcgtgggcggttggctctgattgccgggcggcgat

SEQ ID NO: 18125 - DNA, 2840 bp, DROSOPHILA
tggacgtggtccgtcggtaagatattgctatcaaaataaaaataaaatgatatcaattatcagtacatgttgaaggaaagactgctgcattgcttaattatcaacggacattttttgtatttaattgtaaaacctttaaaactttagaaatgaaggtcatggacgctttgcaatctggacggagaaagccattaccagtggctcttctatgcatcctagtcactgtgttctgcgtcttggagtgccatggagctgacctgacatcacccaccaagaagtccgctccccttcgaataaccaaaccacagcccacaagtcagcaggccaagcccatcagtattaccacaagggccccaacaacggtggcatcaaccaccgatgatgaagtctccagctccgtcgatggtcagctggccccgctcatctcatccacaaccgagggacccagcagtggaacaactgccagcttagtgccggaaatatgtctcaatggtctgcagttgacggtcaatagtgcggatgagggaacggttatacggaagcaggaggagtttgtcaagatactcgaaggagatgtggtgctcagtgtcttgaccaaggaccccgactccgcgttgttcgtaatcaatcgtgtgaaccaggcgaatcttataatggcagactttgaaattggaattcgcgccatcagcatcgacaacgccagcttggcagagaacttgcttattcaagaagttcagtttctgcagcagtgcacgacgtactcgatgggcatattcgttgactgggagctgtacaaacaactggagtctgttatcaaggacttggaatacaatatctggccaataccgggaacgcgggcgcacctctttcccaaagttgcgcacttgctgcatcaaatgccttggggcgaaaaaatcgcatccgtggaaatagcaaccgaaacgctggagatgtacaatgaattcatggaagccgctcgccaggagcacatgtgcctcatgcacttcaaaagtgacgataatgtttacataatgtttggcaataagctagctagtcacttcaaggaaaacggcactctgttttccgtgcccaccgatagaacggacgatgaatttctggcagacttaccaaacagagcttttgtcctaatggaaaacgaaattgacctgagcaccgccgttgaattggacgccacgcccaccgctttggacgagatcctgatcgggaagagtgtgttaccatcgcgagtcctgagctttgccggctccataatcgacctgatgaactggctgcgcggatccctgtccaagcactgtaagcgtggtgaggagcacgacttgtatgtgctggagagctgtttcaacttcctgaacttcatcgaggactggcgaacctcggagtaccgacaagcccatgatacggctgagatcctgtcgctgctgctgatgcgcaagttgggcaccgccatgaactttcagatgtaccagaagaaagtgttgacgctggacaagatcacaggtgaatcgcgtaccgaactgcgcgagattgcgtcgcagaactttgtgaccaatgtgaccacgtactatcactataatcgggacaatcacaccagtttggagctgaagaccaagtttggtcaggtgttcaactgccagtacagtgctggtgacaataggagatatccattccttttcgatggtgaatccgttatgttctggcgcatcaagatggacacatgggtggcaactgggctgacggctgctatcctgggcctgattgccacgctcgccatcctggtgttcattgtggtgcgcatctcgttgggcgatgtcttcgagggaaatccgaccacctcgattctccttctactctccctcatcttagtgttttgctcctttgtgccctattcgattgaatacgtgggtgagcagcgcaattcgcatgtgaccttcgaggatgcccagactctgaataccctgtgcgcggtgagggtgttcatcatgactctggtctactgttttgttttttccctgctcctctgtcgcgccgtgatgttggcttcaattggttccgaaggtggcttcctatcccatgtgaatggatatattcaggcagtgatttgcgcctttagtgttgtggcccaagtgggcatgtccgtgcaacttctggtggtgatgcacgtcgcctcggagactgtgtcctgtgagaatatttactatggtcgatggttgtggggactgttggcctacgactttgctctactgtgctgtgtgggcgccttgataccctctatatacagatcccaacgaaactatcgcgagggaatactcattgtcattggatcggttttaattatggtaatttgggtggcctggatagcgctatccttattcggggacgagtggagggatgcggccattccattgggattgcaggcctctggttgggcggtactggtgggcattctgataccacgcaccttcctcatcgtaaggggtatcgagcggtcggatattgcccaagctctgccttcactcacttcgctggcttttgcccagaacaatcaatactcctcggaacagagtgtttacgagtgcgtgaatcccgccatgcgccattgttcccaggatgaggtgaaccaccagtcgcctagtgagattcccacgttaccccttcgaggaggtggcccacgtcgccagcagttctttgccaatctccgccaggccaatgccaacattaatccacaacgtcctccacctcgaccccagcagagtccctcccgatcctcggtgtcctcgctgccgccctcgcccgatcacaacaagatcacccggttttag

SEQ ID NO: 18126 - protein, 896 aa, DROSOPHILA
MKVMDALQSGRRKPLPVALLCILVTVFCVLECHGADLTSPTKKSAPLRITKPQPTSQQAKPISITTRAPTTVASTTDDEVSSSVDGQLAPLISSTTEGPSSGTTASLVPEICLNGLQLTVNSADEGTVIRKQEEFVKILEGDVVLSVLTKDPDSALFVINRVNQANLIMADFEIGIRAISIDNASLAENLLIQEVQFLQQCTTYSMGIFVDWELYKQLESVIKDLEYNIWPIPGTRAHLFPKVAHLLHQMPWGEKIASVEIATETLEMYNEFMEAARQEHMCLMHFKSDDNVYIMFGNKLASHFKENGTLFSVPTDRTDDEFLADLPNRAFVLMENEIDLSTAVELDATPTALDEILIGKSVLPSRVLSFAGSIIDLMNWLRGSLSKHCKRGEEHDLYVLESCFNFLNFIEDWRTSEYRQAHDTAEILSLLLMRKLGTAMNFQMYQKKVLTLDKITGESRTELREIASQNFVTNVTTYYHYNRDNHTSLELKTKFGQVFNCQYSAGDNRRYPFLFDGESVMFWRIKMDTWVATGLTAAILGLIATLAILVFIVVRISLGDVFEGNPTTSILLLLSLILVFCSFVPYSIEYVGEQRNSHVTFEDAQTLNTLCAVRVFIMTLVYCFVFSLLLCRAVMLASIGSEGGFLSHVNGYIQAVICAFSVVAQVGMSVQLLVVMHVASETVSCENIYYGRWLWGLLAYDFALLCCVGALIPSIYRSQRNYREGILIVIGSVLIMVIWVAWIALSLFGDEWRDAAIPLGLQASGWAVLVGILIPRTFLIVRGIERSDIAQALPSLTSLAFAQNNQYSSEQSVYECVNPAMRHCSQDEVNHQSPSEIPTLPLRGGGPRRQQFFANLRQANANINPQRPPPRPQQSPSRSSVSSLPPSPDHNKITRF

SEQ ID NO: 18127 - DNA, 5378 bp, DROSOPHILA
ggcctttggcgtccactaccagtgtgagttgtttcgctttatggagcccttctatgtgtcctccctctgccgaccggtgcagttcaacaatatgaaggagctgctcctgctgggcggtgccaccctgaccgagaaccgcttcaaggccaagtacatcatcggggacaagcggcgcgccgaggacgatcgcgtctatctcgatccttactgggtgctggacagcatcacgaatatgcaaattcagcgctttggcaaatatcttatgaagagcgccattatctcggccgatgggatccggtacgaggatcctagggatcgcgatgaggacaaaacacaaagaaggcaccttcacgacttcgtcgatccaccgtttgtgctggacaaatagagatcagtgggtgcatccacttcactttactaaatatttaagctaggacacacagagtaccattttcccacactgtttcacctttttgtgcaaattactccaatgtaaatatagttatatttaaatccatatatgtattttacgatcttagtttattttctagtacattttttaatttgtttttatacagattttacgaaggaaataatatatcccataactttaaacagaaattataaaaaaacacttgttccaacttcgttcgttattatttaaataaataaatcaatgcatttttctctatttgcgatgagaaataaaagcccccccccccccctcaaatacaataaaaaatattcattattcttcagatgcaattgcttgctttatttaaacgattgaggtatttgttgtcagattcaattgttgtactcttcgactagctcttgtttgtactttgtggcatcgacgataagtgaacttggagttagggacgatcgatcatggcgctgaaaatcgggaggcaacaagcaaagagagtgctcttttacgggctgggtggtaaaaacaaaagaaatacaaaaatagggtttttattttttttgtaaatatagttatcgcttctattctggttcttttcttgtgtacaaagtagtgtgtgcaaaagtagggtaagataaatgatacatatcaaagtataaaggttaatttaaacgatatcataaatgctacagaggattcctatatatgatatgataaaacgaagtcaactccgtgcatcataccatatttagtaaactaaagatcgacggggaagtggatgaggagtggatgcataaatgcaagtgttttcccagtgtgcactcttatccttgggatccaccgtttcccaatttaggcggcctcgtctgcatttagcattcgtatccgtcgaaactcctttcgatggaagaaattaaacttatgcttctgctgaaacatcatcttatcggtcatcttgcgcaggacaggtgttggtgttatactactattgtgttcgctgctgctgttgctggtattattgagtggtgttgttggctgcattatgatgttggttatatgcttgttgttgctgctactactgcgtgttgttgttgttgttgagtggaagcaaaccagctacttcttgcccttggtggccttctcggcggccttggtgaccttgccaccggaggcatccttgaagttgacagccttaatgacaccgacagccacggtctgcctcatgtcacgcacagcgaagcgacccagaggggggaactcctggaaggcctccacgcacaggggcttagagggcaccaggttgacgatggcagcatcgccagacttgatgaacttggggttctcctcggtggtcttgccggaacgacggtcgaccttctccttgatctcagcgaacttgcaagcaatgtgagcggtgtggcaatccaacacgggggtgtagccgttggcaatctgaccggggtggttcagcacgatgacctgggcggtgaagtcggcggctcccttgggggggttagccttggagtcaccggcaacgtagccacgacgcagctccttcacggacacgttcttgacgttgaagccaacgttgtctccgggaacggcctcctgcagggcctcgtggtgcatctccacggacttgacctcagtggtgatgttagcaggggcgaagaccacaacggtaccgggcttcagcacaccagtctccacacgacccacgggtactgttccaataccgccaattttgtacacatcctgcaggggcagacgcagggccttgtcggtgggacgggctgggggaaggatggcatcgagggcatcgatcagggtcttgccgtcagcgttaccctccttgcgctccaccttccatcccttgaaccagggcatgttggtagagggttccaacatgttgtcgccgtgccatccggaaatgggcacgaaggcaacggcggctgggttgtagccgatcttcttgatgtaagaggacacttccttcttgatttcctcataacgggcctcgctgtatggtggctcggaggagtccatcttgttcacaccaacgatcagctgcttcacacccagggtgaaggcgagcagggcgtgctcgcgggtctggccgttcttcgagatacctgcctcgaattctccggttccggcggcgacaatcagcacggcgcaatcggcctgcgaggtaccagtgatcatgttcttgatgaaatccctgtgtccgggggcatcaatgatggtcacgtagtacttggcagtttcgaacttccacagggcgatatcgatggtgataccacgctcgcgctcagccttcaacttatccaaaacccaggcgtacttgaaggatccctttcccatctcctgggcctccttctcgaacttctcgatggtacgcttgtcgataccaccgcacttgtagatcaagtgtccggtggtggtcgacttaccggaatcgacgtgtccgatcacgacaatgttaatgtgaatcttttccttgcccatgttggatgattacactatggctgttgtgtgtattcgagtgttggattgacggaacgttggaacattggaaggttgcagggttcggcgggttggcgagcaagagaggttggaataaacaaagggtaaaacaattcgttagcattcggtgggattacaactacaattattagtgggtataacactttctcatttccctagcgtacgttcgacttttgtttgcatgcgcgagcacaacctaacctcaaactcttgcagccgtacaaaacgtgttttttgaggttaggtccagtgcccgcatgtaagggtgtgggtaaaacgagtggggcgcaactacagaaaagagcgtgcaaataaaattccatatggaaactcgattttgtttcagtgattttggtatttttgctttcgtcaactgtcttcagtagcagaactgaaaaatcatcatcatgttaaatcgaagagtccaaaggaaaattccagcaaatttaattcgcaaatacacatgtgcttatctgcctatgcgtgtgtatatctatgcctgtgtatttgtgtgacgctgttgccggccggaggaaaagtaagagaggaatagagagagagagagaccaaaatggcggatgtgcattagtgtgcgtgtgtgacttgtacaaatgcaagcgatctcgccgcggtggcacaattggtaattggaaagaaatgaaaaagagaggggcacacaacgaattattcaagaacgtagtgcagcggcagccattttaccaaaaccaattatggagtcggttggaaatggcgaaatagctgatgcgagtgccatttcaccagatatgctaatgggctggaaacccaaaaaagcacattttttcgcttgttgccaggcgaatttttttcgcccacttgactcacgccactgggtcgccattttagaattccatgccgcaaaaagaaagaataaggaatatctataggtcatgacaaaggcaagagagaaagcacgtttttttttctcggttaatgagcacatctggtggatgacctctgtgtccggcgtgggcgtggcaaagtaattacacactaagtgcaccatattgcagggcgaaaatgcggccggaaaagccggaaaattattttgagaatgctgggaactttaactgggaacgccagttaaaatttttgcctttgcagacttgccacgtgtttgcttctatggccacctttcactttggaaaaccgcagttagaggttatctccgggtttattacacacacacaggaaaaacactggaaatatgcacaaattcggcgtctcagctgcatatttgtttataaattgttttctggctgcagtcccgttgcagaaattacttaattatagcctcgcaggtaaaacttactctcgaataagctgaatgagaaatcacgaagtctaagcggcgacggattcgaacaaagtgaacgagcgttcggcagagctcagcacaggaagcctcgtttgacacatggtgtgaccgaagctacgcaactgtcaaaagagcagaaaccgtgttctcactgcggtgtttccactacgcgcgaatgaagcacttcattttattgaaatttaagtgattgaaagtggcaaaatacaataacctaacgattgagggatttaaaaaaccttgtttgctcgacattgtttttatatgaaaaactaaataatcagtgattccaaaaatattttctacaaaacgatgtctataatttctatacgtaatattggaacacatatctcttaatatttaaaaactataacaattgcattagtagtccgcattttgaacttttagactagaacctgaactttaatttgtatgtgaaccctaacgtaatagaactttaaataacaatagaagcttgagatcgtttaaatttatgtaatacgtttcatttatttatacattttttggcgtccgttgctacaactaaaatatgctacaaataaaactataagtaatttggtattgtatcaatttatacaatattgtaaaaatttataacttaagatctcacgttttaatactttttcttctggaattcatcagaatgctaatatttatttgaatttgtaacttactgcttaatattttttgttagactattttttcactcagttttcacttgtactcaataaatttattcattgtgcatagaacaaaagttgttagcctgccccttatataggacgcaattaaaagttcctaagtgttttcctaattttgtgaaattaattaattagttattaataatatgattattgttatgcttgcgaaatcagttaacaataaatgcaattaccatcttttatgaaatgataatttgacaaaattttattataaatcggtatcaattaaattaatttaaatctagatctcaacttttctgtgtgactggaaagaattatagct

SEQ ID NO: 18128 - DNA, 1988 bp, DROSOPHILA
gaatccgtcgccgcttagacttcgtgatttctcattcagcttattcgagaatgggcaaggaaaagattcacattaacattgtcgtgatcggacacgtcgattccggtaagtcgaccaccaccggacacttgatctacaagtgcggtggtatcgacaagcgtaccatcgagaagttcgagaaggaggcccaggagatgggaaagggatccttcaagtacgcctgggttttggataagttgaaggctgagcgcgagcgtggtatcaccatcgatatcgccctgtggaagttcgaaactgccaagtactacgtgaccatcattgatgcccccggacacagggatttcatcaagaacatgatcactggtacctcgcaggccgattgcgccgtgctgattgtcgccgccggaaccggagaattcgaggcaggtatctcgaagaacggccagacccgcgagcacgccctgctcgccttcaccctgggtgtgaagcagctgatcgttggtgtgaacaagatggactcctccgagccaccatacagcgaggcccgttatgaggaaatcaagaaggaagtgtcctcttacatcaagaagatcggctacaacccagccgccgttgccttcgtgcccatttccggatggcacggcgacaacatgttggaaccctctaccaacatgccctggttcaagggatggaaggtggagcgcaaggagggtaacgctgacggcaagaccctgatcgatgccctcgatgccatccttcccccagcccgtcccaccgacaaggccctgcgtctgcccctgcaggatgtgtacaaaattggcggtattggaacagtacccgtgggtcgtgtggagactggtgtgctgaagcccggtaccgttgtggtcttcgcccctgctaacatcaccactgaggtcaagtccgtggagatgcaccacgaggccctgcaggaggccgttcccggagacaacgttggcttcaacgtcaagaacgtgtccgtgaaggagctgcgtcgtggctacgttgccggtgactccaaggctaacccccccaagggagccgccgacttcaccgcccaggtcatcgtgctgaaccaccccggtcagattgccaacggctacacccccgtgttggattgccacaccgctcacattgcttgcaagttcgctgagatcaaggagaaggtcgaccgtcgttccggcaagaccaccgaggagaaccccaagttcatcaagtctggcgatgctgccatcgtcaacctggtgccctctaagcccctgtgcgtggaggccttccaggagttcccccctctgggtcgcttcgctgtgcgtgacatgaggcagaccgtggctgtcggtgtcattaaggctgtcaacttcaaggatgcctccggtggcaaggtcaccaaggccgccgagaaggccaccaagggcaagaagtagctggtttgcttccactcaacaacaacaacaacacgcagtagtagcagcaacaacaagcatataaccaacatcataatgcagccaacaacaccactcaataataccagcaacagcagcagcgaacacaatagtagtataacaccaacacctgtcctgcgcaagatgaccgataagatgatgtttcagcagaagcataagtttaatttcttccatcgaaaggagtttcgacggatacgaatgctaaatgcagacgaggccgcctaaattgggaaacggtggatcccaaggataagagtgcacactgggaaaacacttgcatttatgcatccactcctcatccacttccccgtcgatctttagtttactaaatatggtatgatgcacggagttgacttcgttttatcatatcatatataggaatcctctgtagcatttatgatatcgtttaaattaacctttatactttgatatgtatcatttatcttaccctacttttgcacacactactttgtacacaagaaaagaaccagaatagaagcgataact

SEQ ID NO: 18129 - protein, 463 aa, DROSOPHILA
MGKEKIHINIVVIGHVDSGKSTTTGHLIYKCGGIDKRTIEKFEKEAQEMGKGSFKYAWVLDKLKAERERGITIDIALWKFETAKYYVTIIDAPGHRDFIKNMITGTSQADCAVLIVAAGTGEFEAGISKNGQTREHALLAFTLGVKQLIVGVNKMDSSEPPYSEARYEEIKKEVSSYIKKIGYNPAAVAFVPISGWHGDNMLEPSTNMPWFKGWKVERKEGNADGKTLIDALDAILPPARPTDKALRLPLQDVYKIGGIGTVPVGRVETGVLKPGTVVVFAPANITTEVKSVEMHHEALQEAVPGDNVGFNVKNVSVKELRRGYVAGDSKANPPKGAADFTAQVIVLNHPGQIANGYTPVLDCHTAHIACKFAEIKEKVDRRSGKTTEENPKFIKSGDAAIVNLVPSKPLCVEAFQEFPPLGRFAVRDMRQTVAVGVIKAVNFKDASGGKVTKAAEKATKGKK

SEQ ID NO: 18130 - DNA, 6695 bp, DROSOPHILA
ggtgactgggggcatgggcatggcgctcctgcaaaagatgggctggaaaccgggcgagggactgggcagatgtaaaactggatcattgcaaccacttttgctggacgtcaaattggacaagcgtggcctggtgtcgcgcgatgacttaaggccaccgcaaatgcgtgcgccggctgcccagcgaagaaataaaaacatggcgggaccaattggagctggcccctgtccagcagttcagggtgcgggacctggaccgttggcgtccacgccgctggtcacccaggataagcatcccgtgtgtgtgctcaacgaactgacctcgaagaacaagtggatgccgccgcagtataagctacgtcaggatatcgggcccgctcacaaccgttcctttctcttttcggtcgagattaacggacagacctttacgccggatcgaggaagcaacaacaagaaggaggcgaaactcaatgcggccgccttatgtctgcgatctttaggcattcttccgcccagctagtgatcgaacgttgaataggctaatttctagatagtgaatataatagaatccccacactgtacataaaattagccctatatttaagttgtaaaatcttgttcgtctcctttggagcgatgacaaatatagtgctaacatcaaaaatgattgttagtttgactaaaattactgatatttgatgtacccctaacgttatcatttctattatttatacactacttactttaatgctgtccttaatatcagttataaattacctgtttacttctagttccttttagaaatgcaagtttcgtatttgaagtgtatttccttcccttattaaattgaatattttaatttaatttttgacacacacatttttccaagtgtaatgcccgttatttgggagaggagctttaacgcgcgagctttgctcactcgccaaacggggcttttgcgcaagtacacaaacaaagtcagctgttccatccgagtgggttaaacaagagtgggccgtgtggacagagactggcagtggttgtggtggtgggagtggaagtggaagtgggagcatcggcgctgcaagttccaaaagattgctcctcgacgaaggtcagttcacgcggaagctcgaacttcgtcggatggcgagcacggaccattggattggctagcaggcgcagcagaaggggcaacaaggagcggagcagaggtcgtcacccggatacagacaaaacttttccgagtgccccagtcctcgtcgcccaattccccaacagcagcagctgcagcatcatcatcactcagcatccaaaaatgcctcaaaaacgtgcacaataatatttgttgtgaaaatatccaatgctagcgtgtaaatgcttttgagccactgcgtcttggcattcggtggatgtggctgcggatttggatgtggttatcgtatcgacgcacgcaatcacagcccgcgtagctcgtaaagttgcataattaccgcacatgaatggctggcgagtcgaatttgggcgttgcagttgcagttgcattggccacatatcgccatcgttgtcatcgccattgatgcactgccgcattttcgctggccactttgtttgcggccaacgtcatggaaacgtgccgcacctgtgcgatttccatgttcgtgtgcgatttcgaaaatggcagcaataacagccacttcctggacctccatcatcccaactgctggcccagcgaaatggcccagattcgcctccagttcgccaactggaatctaaaggtgagtgaagtgattcgggcttaatgggatgatttcagttcggaaaaactacatatcctagtatttattgtctcaaaagattcccaatctttaaattaatgtaacttaccttcccaatttctatctctttgcccagctagttgcttggtatttctctcactgtaacaattgcatcttttcgcaagtgaaagttgtgtgttagccatgttttcacaatcgagccacttggggcttaattatgcatagtatggttattttcctgccaaccacaaagctttggggaaattgtcaatctaaagttttccggaatcatcaattttttaaaaacactgttcctagtacatgaataactttcaatatttattttccatattgacattcaaagacacatgcctaggatatagtataatatatcttgaccatcgctcgatcgatttcataggcaatccaatgagtttccagtagataatcaccttcaggaaagggtagaatattcgtaactctgtggttaacaaagtctattggaatcttatccacaataagatcgtgctatagtataaaatactataaaattaattttaataatacacaagaatatactcacattaaaggggcaggaatggttaagatttgagtaggaattaaagaattcgtaaaagtattttgctattggtttcgaatcagtgttttttaaaaatctacacgcatccaatgttatgttgaacatgaagggtctgtagccgttaaatcgcttgtatagtataccagtgaactagaaataattatagataattgtaaatgtgtgtaatttgtttaatttgcacataccttgacctttgtaactggcgttttgaataggttcacttttagcgttaagtacttatagctccgatttgcagaccttatgtaacaatattcaaaatcatcgaaacttttgtcgaacgatgtgcactggaggttggtgaactcaaatttcgaggaggcctgtacgaaaaatcgattagtttaatacagttgatgcaaattcgaagtagcaacccatttagccatgagaagaattactaaaatgactactatgtggcagcgcgtattcttcaacatcgtgcaataaatgtcacagcataaactaaactgtattcgtttaaaaaaatatatcgctaaataagcatgcccaagaattaaatcaaattgtttcataataatactgcaattatactaggtagtttggcaacgcatagcgattcgattaatgggttggtttctataataagacagtcaatttgttccatgatttaaatatgcagctgactaaaaccagggaattcatttcagatatctcccaacgatggactgccccagaagatctgcagcgactgcttcaccaagttctgctcgatcaacgcattccgcttggcctgccaggaggcacagctgaagctgtcccacatctacgacaagatcgatgccagcagcctggaagatgatgagattggacaggaggacttggagccagcggaagagcatcaggaaacggaaactaccaaaccaacaacgacggtttcagccgaaacacaaccaaacaacactgccagtgatcccatagagattttcgtggatgccgtagacatcgacgaggcggaggaggaggaggaggaggaggagcagcagcagcagtatgatgaggaggtggaggaaccaatcacggatgagtctgctcccccacaactgaccattagctatgcctgcaagttctgtctgcgcccgcaggagaactaccagctgcagcaactcttgttggagcacatcaacgctagccacgatccggagcaaccgtacaattgtccggagtgcgaggcacgctttcaggacgccgcatcgcgcacagttcacctgaaaagcagccacgtggagaagcaacatgcctgcggcgtgtgcggcaagaagtacggcgacaggcacaatctgcgccaccacgttgagaagtaccattcggagacggactttgagtgcgcgctatgcgagaagcgcttctacacccgcaagagcctcaactatcacatgaagtggcacaatccggatcgccagttcaagtgtcgccacagcggatgcgagcgactcttcatcagccagcggcatctcatgtgccacgaggccacccactcgggcaccagttccaggaagagcgaacactgcggcttctgcggcaagagtaagaatcaccaattcagcaaaaacttgcgctctaaactcaatgagattaatattgcgcatacgccatgttgatcactgttaattatactatccctcctatacaatctattagtaaacattattaagtttagatacacttttatctacgcagcattcatccatctgaagacccttcgctggcacatttaccggcagcatggcggggagaagccctacaagtgtgccaattgcacggagggtaagtcaagttggatcctctaatccggggacacctacataggatcttcggtacttggtattggaagattcgtcgatttgaacaactcacaaacatatgagcattaaccatcatatatcaatctgttgcatcatatatcaacattctcacatccaacgagcgctttaagaacatagaaactgggccaagatcggctgcttctgccgccttatatagtgtgttagtcaagccaaaagcaacggtaaagataatggctaacccagctctattttgtacacctttttagccatcgcatgcgattaacgaacggcaaacgttttgtactttgatatccacttagccacctagctagcgttttaaccaattaaaccaatcgaacccaatcaaccaaatgcataaccaactccatacacagtaagaatccctggagagcagcatgccagcaatcacatagttaatcgtcctgaatctaaggaatttcatccattacgttaccacagttttatttttcttcaccaactttacttcctaccttcaggacgatacatttttccgagttttctacttcatgacaccctctacgactagccatccgttatctatgtgccaatggatgctaaacccatttttgtccaatcccaacagtctttgcatcctatgcggagaaaaggattcacatgctggagcggcacagggagaacctgactgccatcgagcggagtgagtgcatgctgtgccgccagcccttctccagcgaaccggatttgatccaccacatgtccgcggagcacttgcagcgtcctggcgctcccatcatagcgaacaacaaacgggtgctgcaacagaagcgggaacgccagtactccggactctttcagtgcggcagctgcagccagaggttcaacatgaagtccgctctggagcggcacgctgccgtgcattccgagaaggatcgaccgcacgcctgcccgcactgttccaagcggttcaagcgcgcccaggacatgaagtggcacatcaagacccacgagaaggagaagcccaatgtgtgcgatgtttgcggcaaggcattcgccctcaagtatgtgctcacccagcatcgcttgagtcacgagggtaaggatgtccacatgtacatatgtattattagaaacatgtaatacatcaatcttttacagtcttggagaagaacttcaagtgcaacgtttgcggtcgagcctatctgtttgagaagtcattgcggctgcatcagcgaactcacacgggcaaaacctactacaaatgcgatctctgtcaggaaagatttgtcacgcacattaagctcaagagtatgtatgcgaaatcactcaatgatgcccttccatatagatgaacatcacttccagctcacatgcaaaaggcacacgccgcctctcagccgcactcggcggaccagcctctggacgatctgatcaacattgtgatttcctaaccaagtggaacagcaaacagcatagatttctgttgtagccaagcacagtgcagaaactgcaatgcattggagcgtagctcccgaaactcaagcttacatagaccatatacatacatgtaccctccatccaattacacttactagaccatatgcacacacgcagcgatctctggaacgtgaaagtgcttagagctttatttagtggatattccgtagggcataaaccatatagctatatctctgtccatttcttcgatcggtccctaaggcactccagccgcatatctctttctaactctgagccatattaatctcacagaacgcctttaaacactaccagcacatacatacatatatccatttgaccacttagcgataagaaataagcaatgagaacatacaagatgttatacgagcaatctaagcttcgcggcgaacttttaatgctcaagaaatgcatttatttccagatgaaaccgataagtatttacaataattaccgaaaatgtataagaatatttaaaatatcaatatactatggattttattatgtgtagttgcagatatatttaccaaattcatgttccgaataaacattcatgtgaccaaagtttgaattgccgttacttttttagttgggcggcagaaatcgattggtttagacagctttttgcaatgattgcagaactagctttaaaatagcgtcaaaaagctagttctactttaatgacttgtgtagtgcgatctaaataatttacttcatttattatgaaatttcttttgatcagttgtagctagacaacagccaaaagctgccagcactgccgtcgcccacatccgatagttgcgactcgtgactgcgtgaagaaccagtgacttgtatcacctgcggccaaaattcgcccatccctagagaacgtgaacacgtcagtttttagtttataatatttataagcgaaaagttcagtgcacagcggtcgcgattccgaactagaagtgg

SEQ ID NO: 18131 - DNA, 2446 bp, DROSOPHILA
aacaagagtgggccgtgtggacagagactggcagtggttgtggtggtgggagtggaagtggaagtgggagcatcggcgctgcaagttccaaaagattgctcctcgacgaaggtcagttcacgcggaagctcgaacttcgtcggatggcgagcacggaccattggattggctagcaggcgcagcagaaggggcaacaaggagcggagcagaggtcgtcacccggatacagacaaaacttttccgagtgccccagtcctcgtcgcccaattccccaacagcagcagctgcagcatcatcatcactcagcatccaaaaatgcctcaaaaacgtgcacaataatatttgttgtgaaaatatccaatgctagcgtgtaaatgcttttgagccactgcgtcttggcattcggtggatgtggctgcggatttggatgtggttatcgtatcgacgcacgcaatcacagcccgcgtagctcgtaaagttgcataattaccgcacatgaatggctggcgagtcgaatttgggcgttgcagttgcagttgcattggccacatatcgccatcgttgtcatcgccattgatgcactgccgcattttcgctggccactttgtttgcggccaacgtcatggaaacgtgccgcacctgtgcgatttccatgttcgtgtgcgatttcgaaaatggcagcaataacagccacttcctggacctccatcatcccaactgctggcccagcgaaatggcccagattcgcctccagttcgccaactggaatctaaagatatctcccaacgatggactgccccagaagatctgcagcgactgcttcaccaagttctgctcgatcaacgcattccgcttggcctgccaggaggcacagctgaagctgtcccacatctacgacaagatcgatgccagcagcctggaagatgatgagattggacaggaggacttggagccagcggaagagcatcaggaaacggaaactaccaaaccaacaacgacggtttcagccgaaacacaaccaaacaacactgccagtgatcccatagagattttcgtggatgccgtagacatcgacgaggcggaggaggaggaggaggaggaggagcagcagcagcagtatgatgaggaggtggaggaaccaatcacggatgagtctgctcccccacaactgaccattagctatgcctgcaagttctgtctgcgcccgcaggagaactaccagctgcagcaactcttgttggagcacatcaacgctagccacgatccggagcaaccgtacaattgtccggagtgcgaggcacgctttcaggacgccgcatcgcgcacagttcacctgaaaagcagccacgtggagaagcaacatgcctgcggcgtgtgcggcaagaagtacggcgacaggcacaatctgcgccaccacgttgagaagtaccattcggagacggactttgagtgcgcgctatgcgagaagcgcttctacacccgcaagagcctcaactatcacatgaagtggcacaatccggatcgccagttcaagtgtcgccacagcggatgcgagcgactcttcatcagccagcggcatctcatgtgccacgaggccacccactcgggcaccagttccaggaagagcgaacactgcggcttctgcggcaagacattcatccatctgaagacccttcgctggcacatttaccggcagcatggcggggagaagccctacaagtgtgccaattgcacggaggtctttgcatcctatgcggagaaaaggattcacatgctggagcggcacagggagaacctgactgccatcgagcggagtgagtgcatgctgtgccgccagcccttctccagcgaaccggatttgatccaccacatgtccgcggagcacttgcagcgtcctggcgctcccatcatagcgaacaacaaacgggtgctgcaacagaagcgggaacgccagtactccggactctttcagtgcggcagctgcagccagaggttcaacatgaagtccgctctggagcggcacgctgccgtgcattccgagaaggatcgaccgcacgcctgcccgcactgttccaagcggttcaagcgcgcccaggacatgaagtggcacatcaagacccacgagaaggagaagcccaatgtgtgcgatgtttgcggcaaggcattcgccctcaagtatgtgctcacccagcatcgcttgagtcacgaggtcttggagaagaacttcaagtgcaacgtttgcggtcgagcctatctgtttgagaagtcattgcggctgcatcagcgaactcacacgggcaaaacctactacaaatgcgatctctgtcaggaaagatttgtcacgcacattaagctcaagactcacatgcaaaaggcacacgccgcctctcagccgcactcggcggaccagcctctggacgatctgatcaacattgtgatttcctaa

SEQ ID NO: 18132 - protein, 607 aa, DROSOPHILA
METCRTCAISMFVCDFENGSNNSHFLDLHHPNCWPSEMAQIRLQFANWNLKISPNDGLPQKICSDCFTKFCSINAFRLACQEAQLKLSHIYDKIDASSLEDDEIGQEDLEPAEEHQETETTKPTTTVSAETQPNNTASDPIEIFVDAVDIDEAEEEEEEEEQQQQYDEEVEEPITDESAPPQLTISYACKFCLRPQENYQLQQLLLEHINASHDPEQPYNCPECEARFQDAASRTVHLKSSHVEKQHACGVCGKKYGDRHNLRHHVEKYHSETDFECALCEKRFYTRKSLNYHMKWHNPDRQFKCRHSGCERLFISQRHLMCHEATHSGTSSRKSEHCGFCGKTFIHLKTLRWHIYRQHGGEKPYKCANCTEVFASYAEKRIHMLERHRENLTAIERSECMLCRQPFSSEPDLIHHMSAEHLQRPGAPIIANNKRVLQQKRERQYSGLFQCGSCSQRFNMKSALERHAAVHSEKDRPHACPHCSKRFKRAQDMKWHIKTHEKEKPNVCDVCGKAFALKYVLTQHRLSHEVLEKNFKCNVCGRAYLFEKSLRLHQRTHTGKTYYKCDLCQERFVTHIKLKTHMQKAHAASQPHSADQPLDDLINIVIS

SEQ ID NO: 18133 - DNA, 3191 bp, DROSOPHILA
agcgagcacaactacggcgacagcgtgggaacgacgcattcggactcccgcacctactattacacgcgggaatggcgtgataagatcgtggactcgcgaaacttctacaaccgccacggacacacgaatcccagtcactttcccatcgaaagccacgttcaggtggcggatgccgtcttcattggacgctatgaactgggtgcggaggtgaaggagaagtttaacaactaccaggagctcacttcggacattcggccagaggatagtggcgtcaagctgcatctgggcatatattatcacaccaatgatgtgttcaatccggaggtgggtgacctgcgcctgctcttcagcttcgcgggaatggagggcgaggtgttcagcgtggtgggcaagctgtcgggcaacaaactggtgccgtacataacctcccgtggcgttccagtgctgctcgtctatccgggtgggctcagtgtccaggaagtgttccggttggaggctcgtgcccaggtcttgcacacctggtggtggcgcttcgtcggctggctgctgatcttcttcggcgtcacctgcaacaccaaaatccttcgtctgctgtgtgagtcctgtattttctaaaaaaattgatctcttgtactaaatggttatatctcctccagttgtacgggtgccgctattggtggccttggcacccgatcctcagttcccggttacgggcaacctactcatcgcattttcgctagctctgaccattgcggcagtcgcctggatcctgcatcgtcctgtgatcggcgcctgcctcttactggctggcgcatcgccttacgtctggttcacccgcaatctggtcgactaccatcgcctggactaatccatttcagagtcatctcaatattatttacaggtttatttattgttgattttcattgttgagccaaattgatcgcatttgccatttatccctcggccaataaaaacttaacacttagtaactaaactaaagttagaactccctgatgcccgcactggtggtggtgctgcccggtggcccacctcctcccccgcttccgctcgctcccgacacattgggcttggattcgctggaggtgtgcacactggggctctgtgatttgtcctgctcctcgtgaccatttggcgtttcttcgtagcgaacgtagggttcgaagctgttgttgatttgcacagatccgcgatgcagattgttggactcggcctcgaagagaatctcgttgatgaaacgttcggccagaagacgctgctcgcgcggcagtcgcttcagtttgtgcgtccaggtgcgggcgatggactcctcctccggatatgtgccagccaaatactcgcaggctatgttgagtagttcgtcggtgttgtgggcggtgcctgttgccccaggaccgccagtagatccggctcctgctcccgtacatggcggcgtttgcctggctcgcttgctgctcccataatccacatggttggttgctggcggtggcggtggcggagctccaaatgatttgtgaaacatctcggaaatgttgggcgtctgaccaccagcgcgtggtgctggataatggagggctgctccctggctctccagaaacgcactcgggcaattgctgctctcaccgaaggcgaagttgggctcgttcttaaaggcgggattgacggctagaaacttctccgagttgcgcagaaagtccagctcctgaaaggtccagcagcgtggactgtggaggctgcccgatcgcagggcactctccaccaccttcagctccttgcggtagttcgtgcgcagtgtgttgatcttctttttcacatcctccacggtggcgtcccgcttgagataatggtatatgggcaccaggcgcaaataggcctccgcccgcttctcccgattggtgtagtcccgcagcgatgtgtcccacagcacgggcagatccctgtatgtctggatgaaggcgcgcagatagtgtcggttctcctccgctcccgacatcaccttcaatccgtgcggcggcgtttgtggcagcattttgcgcggatctctggattaccctctgccaatccacgccagctgcagtccttggctatcttcaccacttcagcgaatcctggatggacctattgaccaactgtcaatgcgaacgaactgtgtttgttgtaattgcgcgtttgacagattgtttgccatattgacgtaatggttgtgtgcgagtgtgcgtgagcgtgaagatacagcaacaagtgcggacgtagtggcaatgcttgtcactggtatcgatacttcgccagcagtatttatcggtcaactcgttgttatcaagcgcgtatatttaaacaaagtagcacaaaagcaagtagttttaggcattcatttattaaatatatgagcaagcatacataaaattaactgtagcttatatagcttgcatgaaaaatatgattggaggctacaactgcaacaatagtaggatattaccaaatttaatttatcgacaggccaaaaacaacttaaacgaagaaaacagttctaattgattgttaatatagtgcagcttacaactattttatagccatagtcgtttaatttagttatatagcattacagggaataccttcaaccccttgcaagtgtgaccattatttagcgccgattgattctggtatttcgttcatcacatttgcgcgtatttcttggcgcccccgcgacggttacactgcgcggcacactacagcgaaaaaaattcgaaacagacgcgtttgtccgttgagttttgatttgtgattccgacgcgcagccgttgagcgcaattcgcttacattgttgatcattttgttggttaaattgctaaagcaggtacgcggtatcgctaacaagaggacgaagaaccgggcgacgctgcctatgcgcgtctgtgtgtgtgtgttttcgtgagccgccgctttttaattaaataataaataaattgtaacaaaaagtagaaaaacaaacaaacatggaaatgatgcgcgctaaatgcatgaaaacagcgtccagttaatgaaagtaaacgaatcgagtacaaacgaattatttgtctccttgtgcgttcgttctattgtgtttcgagttctgttggtgtgtgtttttgtgtatgttccacgagttgttcgccttaaaaaagtaactgcagaag

SEQ ID NO: 18134 - DNA, 1191 bp, DROSOPHILA
tcaaacgcgcaattacaacaaacacagttcgttcgcattgacagttggtcaataggtccatccaggattcgctgaagtggtgaagatagccaaggactgcagctggcgtggattggcagagggtaatccagagatccgcgcaaaatgctgccacaaacgccgccgcacggattgaaggtgatgtcgggagcggaggagaaccgacactatctgcgcgccttcatccagacatacagggatctgcccgtgctgtgggacacatcgctgcgggactacaccaatcgggagaagcgggcggaggcctatttgcgcctggtgcccatataccattatctcaagcgggacgccaccgtggaggatgtgaaaaagaagatcaacacactgcgcacgaactaccgcaaggagctgaaggtggtggagagtgccctgcgatcgggcagcctccacagtccacgctgctggacctttcaggagctggactttctgcgcaactcggagaagtttctagccgtcaatcccgcctttaagaacgagcccaacttcgccttcggtgagagcagcaattgcccgagtgcgtttctggagagccagggagcagccctccattatccagcaccacgcgctggtggtcagacgcccaacatttccgagatgtttcacaaatcatttggagctccgccaccgccaccgccagcaaccaaccatgtggattatgggagcagcaagcgagccaggcaaacgccgccatgtacgggagcaggagccggatctactggcggtcctggggcaacaggcaccgcccacaacaccgacgaactactcaacatagcctgcgagtatttggctggcacatatccggaggaggagtccatcgcccgcacctggacgcacaaactgaagcgactgccgcgcgagcagcgtcttctggccgaacgtttcatcaacgagattctcttcgaggccgagtccaacaatctgcatcgcggatctgtgcaaatcaacaacagcttcgaaccctacgttcgctacgaagaaacgccaaatggtcacgaggagcaggacaaatcacagagccccagtgtgcacacctccagcgaatccaagcccaatgtgtcgggagcgagcggaagcgggggaggaggtgggccaccgggcagcaccaccaccagtgcgggcatcagggagttctaa

SEQ ID NO: 18135 - protein, 348 aa, DROSOPHILA
MLPQTPPHGLKVMSGAEENRHYLRAFIQTYRDLPVLWDTSLRDYTNREKRAEAYLRLVPIYHYLKRDATVEDVKKKINTLRTNYRKELKVVESALRSGSLHSPRCWTFQELDFLRNSEKFLAVNPAFKNEPNFAFGESSNCPSAFLESQGAALHYPAPRAGGQTPNISEMFHKSFGAPPPPPPATNHVDYGSSKRARQTPPCTGAGAGSTGGPGATGTAHNTDELLNIACEYLAGTYPEEESIARTWTHKLKRLPREQRLLAERFINEILFEAESNNLHRGSVQINNSFEPYVRYEETPNGHEEQDKSQSPSVHTSSESKPNVSGASGSGGGGGPPGSTTTSAGIREF

SEQ ID NO: 18136 - DNA, 4326 bp, DROSOPHILA
tcacatgcaaaaggcacacgccgcctctcagccgcactcggcggaccagcctctggacgatctgatcaacattgtgatttcctaaccaagtggaacagcaaacagcatagatttctgttgtagccaagcacagtgcagaaactgcaatgcattggagcgtagctcccgaaactcaagcttacatagaccatatacatacatgtaccctccatccaattacacttactagaccatatgcacacacgcagcgatctctggaacgtgaaagtgcttagagctttatttagtggatattccgtagggcataaaccatatagctatatctctgtccatttcttcgatcggtccctaaggcactccagccgcatatctctttctaactctgagccatattaatctcacagaacgcctttaaacactaccagcacatacatacatatatccatttgaccacttagcgataagaaataagcaatgagaacatacaagatgttatacgagcaatctaagcttcgcggcgaacttttaatgctcaagaaatgcatttatttccagatgaaaccgataagtatttacaataattaccgaaaatgtataagaatatttaaaatatcaatatactatggattttattatgtgtagttgcagatatatttaccaaattcatgttccgaataaacattcatgtgaccaaagtttgaattgccgttacttttttagttgggcggcagaaatcgattggtttagacagctttttgcaatgattgcagaactagctttaaaatagcgtcaaaaagctagttctactttaatgacttgtgtagtgcgatctaaataatttacttcatttattatgaaatttcttttgatcagttgtagctagacaacagccaaaagctgccagcactgccgtcgcccacatccgatagttgcgactcgtgactgcgtgaagaaccagtgacttgtatcacctgcggccaaaattcgcccatccctagagaacgtgaacacgtcagtttttagtttataatatttataagcgaaaagttcagtgcacagcggtcgcgattccgaactagaagtggctgcaatgcccatggggagtaccatctaaactccataacacacagacagtcaaaacaatcagctgaccaagtcagaaattaccgaataatcatcgcagacggcgccgcaagtttaccaaaaacggacgcaaaatccataacagcgagctgaaaataaagccgccagtgaaagttgatgtgcaggaggggaagcggtgcgaccgtagagattagaagctgccacgccaagcagattcgacgtgcgtgtcgattgggaatcaactccaaatcacgcccacactggttttttgcgggggcatctaagtacacgtagccatcgtcatggccttgccattgagtgacctgctcatgatcggcggcggcgagaagaaattggctgcctgcctggtgctgctcctgctggagctcttcctggaaggtacgtacttcaaatccttatcttcgaaggcatctgaaatacacgtcattgtttctcgctcaggcgccgagtcgacggccagtccagcggatattgagaaccatctggagctgggcaaggagttcctcgcccgcggacagctgtcggatgcactgacgcactaccatgcagctgttggtaaatataactggcttgtacacacgaaagaatcggaatatctatgacaatacatttatattctttaattcacgtgaatttacataacatcgcgttcaaaagtgtccattggcaacgaatctaaatattttataaagattttaattatttttgattaacaaatcatagaatcgtatggtttaaaacataaccatgttttgcaaatgccaaggtcaataaacaaacttgtatcttttgtcttgaatttgatgataacattaatttggtaaacttttgtttaggactacattcatttgtgctaggatattttttagcctttctatgccctcgtcattgatttaaccattatcattttcacagagggcgatgccaacaactatctgacgcttttcaagcgcggcaccgtctatttggcgctgggcaagacgcgctttgccgtccaggatttcagcagggtgctggaactgaagccagactttatggccgcccgaatccagcggggtgttgtgcacatgaagagcggagagtacgagcaagcgatccaggactttgatcaagtccttcaagaggaacccaacaacggcttggtgctggagcactattcccgcttggcacccgcccaggagcagtgggtccttgtacagcagctgatccaatacagtgatcaccaaaacgccatccccatgatcacacagttgctagagatctcgccgtgggctgtgcccttccggcaggctcgctctgatgcctacattgcaatcaatgatccactgttagccattgctgacttgcgacaggtgaaccgactcacccaggacagcactgagggtcactacaagattgcacagctgctgtacacaattggccacgccacaaatgccttaaaagagatccgcgagtgcctgaagttcgacccggaacacaagctctgcttccccttctacaagaaactacgaaaggtggaaaagcagctggttaacgcagagcaagcgcgtgaggagaagcattttgccgagtgcatagccgccggagaggcagtcctgcgtaacgagccggaggagacgatgatccggtatgagggacacaaggtgctctgcacttgctacacgggcgacgagcagtttggcaaggctttgcaacagtgcaaggaggcactggatattatgaaggatgctcaggtctactgtgatcgtgctgacgcattgctgggcaccgaaatgtacgacgatgccatacactccttccaagcagctctcgacctggaagagagcaacacccgcgctaaagaaggcatccagagggcaaagaagctgcagaagcagtcagagcgcagggattactataagatattaggcgttaagcgtagcgccagcaaacaggagattgtgaaggcctacaggaaggcggcgcaaaagtggcatccggacaacttccgcgacgaggaaaagaaggtggccgagaaaaagtttattgacattgccgcagccaaggaggttctcacggatcccgagaagcgtcgtcaattcgacaacggcgaggatccattagatcctgagagcaatcagcgtggcggcttccatggcgaacatccgtttggacacttccaacacgggtcgccgttccagttcaagttccacttcaattagtcagccagcagccatttgctttgtgatgtcctagccgcgatccccgatatcctttaacgattttacactgttttgttcatttaaatggcgtgtaaatagtagcataaagcataaataaacccatggtccgttgtcagagagtaccacaaacaaacacaaatcgcaacaaaacacactgagcacttacatttaattagtttatttaatacaatacaataattataatgtagtacatttttctaattatgtataaaaagaaacaatatgcgagaacaagcaattaaagacttggcaaattgagttgaatatttgttagttttgaacatgtttggaattgaagtagtagtcttaaggtgcaaagtcgtcataaatattccttcgctgtagtctgtggttgaaatgcgtggagtaaccaaaaccaaatgtattccgcgatatgaacgcttctcaggcgttgggtgtcaataccacgtacaccatggtggccagcatcactgacactaccaatattaagtagaatttgagattatatttttgatccaatgacaccgccagtgcacggaactgcgccataggcgaaacctgatcgtggtgtcttaccagaggttttctagccagcggcgagaagcgattcttttggaaatggctattgatgggtacttcctcgacttcggactcgctctccgtctccatgggttcgcctgcgtcattcggctgatcgtagaattcatttagttgtggatatagagtgtttactgcggtggtcggctggagcaggcgaccacgggccagattggatccactaactggaacactctgtcgctggcgaatgggtgctggagctggtgctgggccaccaaaaggcctagcggatccgctgaaagtgtttcttggcgaaatgggtgaaagttttggattgtacgtagatgactcctcgtagctggttgagtttaagttggtttgagtcagcaggggacgcgaaaaacccaaatctgtgggt

SEQ ID NO: 18137 - DNA, 1903 bp, DROSOPHILA
aacgtgaacacgtcagtttttagtttataatatttataagcgaaaagttcagtgcacagcggtcgcgattccgaactagaagtggctgcaatgcccatggggagtaccatctaaactccataacacacagacagtcaaaacaatcagctgaccaagtcagaaattaccgaataatcatcgcagacggcgccgcaagtttaccaaaaacggacgcaaaatccataacagcgagctgaaaataaagccgccagtgaaagttgatgtgcaggaggggaagcggtgcgaccgtagagattagaagctgccacgccaagcagattcgacgtgcgtgtcgattgggaatcaactccaaatcacgcccacactggttttttgcgggggcatctaagtacacgtagccatcgtcatggccttgccattgagtgacctgctcatgatcggcggcggcgagaagaaattggctgcctgcctggtgctgctcctgctggagctcttcctggaaggcgccgagtcgacggccagtccagcggatattgagaaccatctggagctgggcaaggagttcctcgcccgcggacagctgtcggatgcactgacgcactaccatgcagctgttgagggcgatgccaacaactatctgacgcttttcaagcgcggcaccgtctatttggcgctgggcaagacgcgctttgccgtccaggatttcagcagggtgctggaactgaagccagactttatggccgcccgaatccagcggggtgttgtgcacatgaagagcggagagtacgagcaagcgatccaggactttgatcaagtccttcaagaggaacccaacaacggcttggtgctggagcactattcccgcttggcacccgcccaggagcagtgggtccttgtacagcagctgatccaatacagtgatcaccaaaacgccatccccatgatcacacagttgctagagatctcgccgtgggctgtgcccttccggcaggctcgctctgatgcctacattgcaatcaatgatccactgttagccattgctgacttgcgacaggtgaaccgactcacccaggacagcactgagggtcactacaagattgcacagctgctgtacacaattggccacgccacaaatgccttaaaagagatccgcgagtgcctgaagttcgacccggaacacaagctctgcttccccttctacaagaaactacgaaaggtggaaaagcagctggttaacgcagagcaagcgcgtgaggagaagcattttgccgagtgcatagccgccggagaggcagtcctgcgtaacgagccggaggagacgatgatccggtatgagggacacaaggtgctctgcacttgctacacgggcgacgagcagtttggcaaggctttgcaacagtgcaaggaggcactggatattatgaaggatgctcaggtctactgtgatcgtgctgacgcattgctgggcaccgaaatgtacgacgatgccatacactccttccaagcagctctcgacctggaagagagcaacacccgcgctaaagaaggcatccagagggcaaagaagctgcagaagcagtcagagcgcagggattactataagatattaggcgttaagcgtagcgccagcaaacaggagattgtgaaggcctacaggaaggcggcgcaaaagtggcatccggacaacttccgcgacgaggaaaagaaggtggccgagaaaaagtttattgacattgccgcagccaaggaggttctcacggatcccgagaagcgtcgtcaattcgacaacggcgaggatccattagatcctgagagcaatcagcgtggcggcttccatggcgaacatccgtttggacacttccaacacgggtcgccgttccagttcaagttccacttcaattag

SEQ ID NO: 18138 - protein, 498 aa, DROSOPHILA
MALPLSDLLMIGGGEKKLAACLVLLLLELFLEGAESTASPADIENHLELGKEFLARGQLSDALTHYHAAVEGDANNYLTLFKRGTVYLALGKTRFAVQDFSRVLELKPDFMAARIQRGVVHMKSGEYEQAIQDFDQVLQEEPNNGLVLEHYSRLAPAQEQWVLVQQLIQYSDHQNAIPMITQLLEISPWAVPFRQARSDAYIAINDPLLAIADLRQVNRLTQDSTEGHYKIAQLLYTIGHATNALKEIRECLKFDPEHKLCFPFYKKLRKVEKQLVNAEQAREEKHFAECIAAGEAVLRNEPEETMIRYEGHKVLCTCYTGDEQFGKALQQCKEALDIMKDAQVYCDRADALLGTEMYDDAIHSFQAALDLEESNTRAKEGIQRAKKLQKQSERRDYYKILGVKRSASKQEIVKAYRKAAQKWHPDNFRDEEKKVAEKKFIDIAAAKEVLTDPEKRRQFDNGEDPLDPESNQRGGFHGEHPFGHFQHGSPFQFKFHFN

SEQ ID NO: 18139 - DNA, 6656 bp, DROSOPHILA
tggcaattaaaatttcatacttttaatttcgatttaaatgccaaacgtattgcgtatgaatatctttatgtctataatccccaacagctgaagaatcttcacaaatcacatacaaatttgacaatcgccttaacgacgcgatgaatgatggacacaattagaacacattccgattccagtcagtcaacacaggggaaatctaaataaaagcacaaaaggggaacaaactttgcactttgatttgagtgccttatcgtgtgggagccccacttcacttttctttttcttactcactatttgcatttttcatagtcggttcagcatcctgatttgtttcataatcactcggcaattgtctagtatccggttagtatccattggcatcccttgtggttcgatgtcgtcgttaagaggagtcttgggcaactaaaattccaattccacatgaccgaattagatttagaatgctttctttcatttaaacctatttgcggttgaatgttctggcgttttggcctttcaaatgactcttctatttttcatttaattgctgctcggtgcacaactcactcaagttgagcggtaggaacaaactgaagatgcggcgcactttctaaaatggaataagcgacatgcgtgcgtgcatcgccaaatttatataaatagaaggaatcacaaatctatatttgaagttgggagcaatttcaaaaaaccgctcgccggtcaagagtgacgtcatggagccatcgataactttttcgataacaactaccagctgcatatcatattagtttaaaatgttcatcaaaaagtgtggaaactagctttgtaccataaagttaaaaaatcgcaagatagaaataaatagatagttttttatgagttaggatttcaaatttcattgtaaagtgcgactaagtccccaaacgttcacactggctgcaagcatcgattaaatacaaaataacaacgattaatcgattggcccattactcatcgcggaaaacgtgaacgaaaagcaagttgccgcctgtctgctaggaactttattgttttaaactgtaatacgtgctaaaggccaaccccatcacataaatatggtaagtccggctggaaataatccgaggctaaccaagtgaatcccaatcatggactcgtccgcgagcggcatgagattgtaaacataacctgcaaagaagcttctcgcaagccgacgacatctgctgactaattggagacttttactatatattcgccttatatccgtatgatccgcagcaaccgcaaatcgtgctcctcaaagaaggcactgactcgtcgcagggcaagccgcaactggtgtccaacatcaatgcctgccagtcgatcgtggacgcagtgcggaccactctgggtccccgcggcatggacaagctgattgtggatgcccacggcaaggcgacgatttccaacgatggagccaccatcatgaagctgctggagatcatccacccggcggccaagaccctggtggacattgccaagtcacaagacgccgaggtaagtgattggcacccctgagacgcacgtgacactgctaaagctttgattcgacttctccttcaggtgggtgacggcaccacgtccgtggttctgctggccggcgagttccttaagcaggtgaaacccttcgtggaggagggagtgcacccacgagtcatcattaaggccatccgcaaggccctgcagctctgcatggaaaagatcaacgaaatggccgtccaaattgtcgaacagtccaaggaccagcagcgtgctctccttgagaagtgcgcagccactgccatgtcctccaagttgattcaccagcagaaggacttcttctcccgcattgtagtcgatgctgtgctctccctggatgagctgctgcccctcaacatgattggaattaagaaggtgaccggtggctcgctggaggagtcacagctagtgtcgggtgtggccttcaagaagaccttttcctatgccggctttgaaatggcccccaaatcctatgacaactgcaaaattgccctgctcaacatcgaattggagcttaaggctgagcgcgataacgccgagatccgcgtagacaacgtcaaggagtaccaaaaggtggtcgacgccgagtggcagatcctctacaacaagctggctaagatccacgagtccggcgccaatgttgtcctctccaagctgcccatcggtgatgtggccacacagtatttcgccgaccgcgacatattctgcgccggccgcgttcccgaagaagatcttaagcgcaccatgaaggcttgcggtggagccgtaatgacgacggccaacgacattaagcccaatgtactcggcctgtgcgaacatttcgaggagcgccaagtgggcggcgaacgtttcaacctcttccaaggtaagaatcttattcgtatacttaattgaaggactcgttttaacaaccacttgttattttccattttaaataggctgccccaatgccaagacgagcacccttattctgcgtggcggtgccgaacagtttctggaggagactgagcgatccctccacgacgcaattatgatcgtgcggcgcaccatcaagcacgattccgttgtggccggcggcggtgccattgaaatggagttgtccaagctgctgcgggactattcgcgcaccattgccggtaaggagcagctgctgattgctgccatcgccaagggcctggagatcattcctcgccagctgtgcgacaacgccggtttcgatgccaccaacattctcaacaagttgcgccagaagcacgcccagggtgagtgtccaatggtatttgtccatacaaagccaccttaacgatgagtgaatttgaaatttatatttgaaagggggaaggataagtttttattttaaagaacttgtgtgtgaaactttaaacaaaaaacatttgttcctcttaacgaatgataatccatttttattcacttcgtccaattgtctgtctgattacttttttgagctgctcatgccagagaaggaagcagggttcctggcatagacccggcttatcgggacaggtgttgcacatgtacctgctgaactgcagcattccgcctttgtggcaatagcggcagtttttcttggccggcttcccgttctgctggataagcatgggttcgtgtagaatggtcttcaacctgggctcgggcaccggcttgttctttgaccgttcatatgtctctggcttctggatactagttaccggttcgttcgtcacttcttctcttagaagcgactttatgatgatcacccggaactccgagtaacttttaagatgtccgactcgcgcattctggccattagcaaagtatagcaaataggcattgtacacgaggatgttgagtaggaaaatggtcaactttatgtttgccttcagctccttgcaggcagcttggtagtggatcaggtggtggcgaccgtcgtttccaggtcgtagttgaaactcgagctcctggatcaacttaggttttgcatttgtcttttgcatggccatctccttggaataaatggccaagcagtcagagctgaagcagtacaagctctttgcccgtcgtcgccatttggccatcatcagagaagtggcatagctggtggagatgctgttggaatccaaccgctggtgcaccagtgccttactgttgccatatctattcctgtccagcagaccagtgcaataggtgcttttcttggccaactcctgagccaggccgtagcttccatagaactttgaggtgtacacagtgcgtcctccatggtaaccctccattagtttcaggacaatcttgtttcggtgctccaccaactgccgggaattgcgtacccatgccggtgcgtcttccttccgcacaatctccggtagaatcttcaccaccaaaccgctctgctcagttagcatatgcagcagtagtgcgttggtgcggaatttgtttggaagttcatcctggtatcttaatgcacccttccacagagtgataggttcattgagcaccagttgctggccacaaatgtatatctcttccatacgctcgttgataaagtctagcagtagagagttcttcactttggctctgcccgcttgtagctgcggtgcatcaaagttaaggcagtgcagcagctgctgataccgttccagaggaatcttcccagagaatccgacgagaccgtaaaacatgttagtgctccagtaatccgataggtgctccagcttcaggtcacacataagcagggaaagcgccataaagatttccatttcttcggcagttgtgggattggacttgagctctcctccctttaggttgcagctttgggccagggaactgaagaacttggagcgatttcccagcacttggttgaagtagtgctgtggtccctggaagcgttgtccgaatttcaggccactctgctggatgggaaatttgaagagcagtcgggaacccgtctgctggctggaccaatctggatcgtagtcatccatatcgtctgggtttaaaaaggataattttataagtggggtcttgaaatgacgggaggagcacccttcttaccctgacagaagacatcttcagcttggtaatcgagctctgagtagccatcctcgtcggaatcactctcttgctgttccaattccaagcgaatggtgttgctggccgcctgctgctccgccaccagctgcaattggagttcagtgagatccggcttgatatcggccgtacttaaatcgtagtctgctagcgccggatagccgtccaagggttccgacttgatgtccacactgcgtcgcttcaccggcgaccggtgatcgtcctgacgcggcttaagttgctgcttgcgctttcttccggagctggacatttcgtttggctgcgttttctcttccaaataatgtaaatacagaggaaattttagccgcagcaacgcgtgtttttcttcgacctcactgtcactcgtcctctctcactcgagtcacatgtgctgtatgttgtgctctttcgcaccttctcaattcgtttattgcgcgggctgtaagcggcgttgccacctgaacgaaatgttacctgcaaaaatcgttggcgaattcaaatcggtcgtgtaattttgaactctaattaataattattataattttatacatttacctttttacaggaggacagtggtacggcgtcgacatcaacaaggaagacatttcggacaactatgagcagtgcgtctgggagccgtccatcattaagatcaatgcactgacggcggccgccgaggcagcctgcatgatcctttccgtcgatgagacaataaagagtcccaaggccggagaacccccgatggccggcggtggcatgggaatgggccgcggaatgggcaggcccatgtaaatagaatcattcagaaatccagagaacactacaccctaatcatcaaaactcacttgcatttctctcctaatttaacacgtacacgtattactcggtcataccttcgcatttcgcacgcttcgaagcaagaacaacagcaacaataatccactgacctatctgtatatgtttaataataaaacacaaaattgaaatttgtattttcataacatcagaacgtttttagtttaaatgcggggcgaggtggcaactctgcggggagtgctgttaagcagctgcccgtggtgctgttaaacgcaagcaacatattgtcaatccaatccaacccttaaataaacaataaataatgggcaatcataaagttcttcgatcggcaggaagcaatttgcgctattcgatgtacgagttcattgacgcggtacacaaacgttctattatatgggaacgaagccacccaaacttccataaccgcgaactcagagatgaggcctggcagcaaattggccacgagctttgctcgaattttgacgactccagcgagccggagaagcaggaaataggtaggtggtggctacctttttgagtctatatcatacataacttccaattccagttaaaacactgctcaaacgttggaaaaacacgagggacagctacctacgggtcaaccgactacgtcaaagtggcgaggaggtggccagagcttcctacatctacgaaaaggaactgagtttcctgctgaacgtgaaagcagagtcggaggacgatgtagaatccttgaaggagcaacccaagccccaggccaaacggaagcgagtgagcactgccgcacagagatctgcaaagactccacgaaagagaaactccgaccaagaatcgaatattgagcctgccatccgcaatccagccataccaagcaacataaatacggttctgggagatctgggctgcgccaaggaggacaccgccactccggaaatcgcatatattccacagttaccatcagatccaccctgcagtacaaataccgcctacttgtccgccgatcctgatcaggccttcttcgacaccattaagcctcacatgcagcagatgtgcgccgatcgcaagcttgactttcagatcgaggtcctgaaaatcctacgaaacttcaagccgaattgaatattcactacagaagtcaaatcatttacaaatgcatttacaagaagggcaaa

SEQ ID NO: 18140 - DNA, 1949 bp, DROSOPHILA
ggaaaacgtgaacgaaaagcaagttgccgcctgtctgctaggaactttattgttttaaactgtaatacgtgctaaaggccaaccccatcacataaatatgcaaccgcaaatcgtgctcctcaaagaaggcactgactcgtcgcagggcaagccgcaactggtgtccaacatcaatgcctgccagtcgatcgtggacgcagtgcggaccactctgggtccccgcggcatggacaagctgattgtggatgcccacggcaaggcgacgatttccaacgatggagccaccatcatgaagctgctggagatcatccacccggcggccaagaccctggtggacattgccaagtcacaagacgccgaggtgggtgacggcaccacgtccgtggttctgctggccggcgagttccttaagcaggtgaaacccttcgtggaggagggagtgcacccacgagtcatcattaaggccatccgcaaggccctgcagctctgcatggaaaagatcaacgaaatggccgtccaaattgtcgaacagtccaaggaccagcagcgtgctctccttgagaagtgcgcagccactgccatgtcctccaagttgattcaccagcagaaggacttcttctcccgcattgtagtcgatgctgtgctctccctggatgagctgctgcccctcaacatgattggaattaagaaggtgaccggtggctcgctggaggagtcacagctagtgtcgggtgtggccttcaagaagaccttttcctatgccggctttgaaatggcccccaaatcctatgacaactgcaaaattgccctgctcaacatcgaattggagcttaaggctgagcgcgataacgccgagatccgcgtagacaacgtcaaggagtaccaaaaggtggtcgacgccgagtggcagatcctctacaacaagctggctaagatccacgagtccggcgccaatgttgtcctctccaagctgcccatcggtgatgtggccacacagtatttcgccgaccgcgacatattctgcgccggccgcgttcccgaagaagatcttaagcgcaccatgaaggcttgcggtggagccgtaatgacgacggccaacgacattaagcccaatgtactcggcctgtgcgaacatttcgaggagcgccaagtgggcggcgaacgtttcaacctcttccaaggctgccccaatgccaagacgagcacccttattctgcgtggcggtgccgaacagtttctggaggagactgagcgatccctccacgacgcaattatgatcgtgcggcgcaccatcaagcacgattccgttgtggccggcggcggtgccattgaaatggagttgtccaagctgctgcgggactattcgcgcaccattgccggtaaggagcagctgctgattgctgccatcgccaagggcctggagatcattcctcgccagctgtgcgacaacgccggtttcgatgccaccaacattctcaacaagttgcgccagaagcacgcccagggaggacagtggtacggcgtcgacatcaacaaggaagacatttcggacaactatgagcagtgcgtctgggagccgtccatcattaagatcaatgcactgacggcggccgccgaggcagcctgcatgatcctttccgtcgatgagacaataaagagtcccaaggccggagaacccccgatggccggcggtggcatgggaatgggccgcggaatgggcaggcccatgtaaatagaatcattcagaaatccagagaacactacaccctaatcatcaaaactcacttgcatttctctcctaatttaacacgtacacgtattactcggtcataccttcgcatttcgcacgcttcgaagcaagaacaacagcaacaataatccactgacctatctgtatatgtttaataataaaacacaaaattgaaatttgtattttcataacatcagaa

SEQ ID NO: 18141 - protein, 501 aa, DROSOPHILA
MDKLIVDAHGKATISNDGATIMKLLEIIHPAAKTLVDIAKSQDAEVGDGTTSVVLLAGEFLKQVKPFVEEGVHPRVIIKAIRKALQLCMEKINEMAVQIVEQSKDQQRALLEKCAATAMSSKLIHQQKDFFSRIVVDAVLSLDELLPLNMIGIKKVTGGSLEESQLVSGVAFKKTFSYAGFEMAPKSYDNCKIALLNIELELKAERDNAEIRVDNVKEYQKVVDAEWQILYNKLAKIHESGANVVLSKLPIGDVATQYFADRDIFCAGRVPEEDLKRTMKACGGAVMTTANDIKPNVLGLCEHFEERQVGGERFNLFQGCPNAKTSTLILRGGAEQFLEETERSLHDAIMIVRRTIKHDSVVAGGGAIEMELSKLLRDYSRTIAGKEQLLIAAIAKGLEIIPRQLCDNAGFDATNILNKLRQKHAQGGQWYGVDINKEDISDNYEQCVWEPSIIKINALTAAAEAACMILSVDETIKSPKAGEPPMAGGGMGMGRGMGRPM

SEQ ID NO: 18142 - DNA, 8399 bp, DROSOPHILA
gggcgccaagtacccgaaatacctatccggtaccggctatctgatgtccatcgatgtggttaagcggttgtacgcggaagccctaaccacatctctcgtccatctggaagatgtcttcgtcactggcatctgtgcgaagaaagctggaatccggcgacgtcatcaaccactttttaactatgttcacgggaagccactttgcatctttaagggaaccattacaatgcatcctgtacctttgcacagtatgctggacgcctgggctttcgtttccaactatagcattaaatgtctgccgccaaggaagcattttgtcaaaacagaattatcaaagaaatcacactgttaagattttcattacacagctttaatgctaaatcttaagaattttccctcgtcatgggataagcttagaactacacatttatattaattttaatcaatagcttaagtactatttcatattcaaacggtatatttccacacaattcggttttgctcattagaaatgaacattaaagaagtcggaaaatgtttttttaaatcttaaattgctttacaagtttcgtgggcgttatctttaggctttttaagcggttcggaaacataacaatatgcttagaatacaatttagaatacaaatagaaagtcaacaattgtcttttgtttactctgtgccgtatttttgtttttattttgtttgtacaaaagaattttacaatctgaaaaatattaacgaacttatacgagctacgtgcccgacttatattcacaggaatacgcgattcagttaatataatggtgttaatgtcgaaaaaacaattccttaagcattaaacaatattgtttaaactataaacagatcaaagtatttacataaaatgttgcgctatttttgttttttgtttggttttaaattctagtacaaatactaaatggcacgttttgagggccacagctaccaatcttcttcggcgggacctcaaatgatcaccataaactagccaacaatctcagccgtggcgaactcgtctggcgcagagtcactggcttcaagtgtggattccatttctgtgtcaccattttcggcggggctgggtgctcctacttgtgaaatccctgttgtcttttccaccttgcactcatcctccttcaagagaatctcaggtggctccgttgtttcgagtgggagatttccaataaaatcgtttgcatccaaatcagtctcattatcctttgtattttgggaaggcaggacgctggggctgcccaaggcttttatcagatcttctgtatcatcacttagttcgatgccctccatgggaattacttcgtctaaggcgcaatctagtagttctttgggcttttcatcaagttcggtaacgtccattctttcaatgagttcccctacggaagactgatcattttcattggaagcggccacggggggttcaactgtgtttgaagcgtcttgggtcgaattttttagccccgcacgtgcgttcttaagtttatcggaatcttgacctttaccttgggtcgttggggaatcttttccaacatcttttgatggttccacttccttgtcaaatttttccgagctctcttcttttccctctttgagaagatttttttcgatttctccaattaaagtgggtctttcggaagatgtttcatcttccatattttcagtatcaccttgttccttttcggacccgccatatcctttttccgatagcatctcagtctcctcttctatttctgtacattcagaatccgggccttttttacaatcggatttctgatcagtttttgattcatccttactttctccctttacattgttttcttttgttaaatgttgttttttgtctgatcctttttctgttcctgattttttatttgtttctggttcagtggatgtcaatgtttccttgtccaattccttatctttttctgttagaagttcatccactggcagctgtacatcttcagccatgagtttctcgttttcaccaattttggcttttatggccgccttcaatatatctccaattttttccttattcttggtattttccttatcaccctcaccgtgttgctttgtgctctcttttttggctgacgatcctttttcagaaattttcagattttcacttggtttttgagttttgtttgatggtgttgcggctttggagtcctttattttggtggccaattcctgtccctgtttcatgtcctcgacccattttcgcgccacctcgaactcatcctcagctcgcttcagcttgaccatgaccttcattttcagcttggcatcggattttttcatgtcctccatgcgttggcgttccaattgcaagagtgctggatttggcttatttgtagttttcttgcgcggctgcttcttttggccaggagatacgggcttgggctcactggcgccttcgttgacctccacctccagcaggctggccaatatcgtggaactgaatgcagccacgtcgatgtcggcctggttgttctcttgcagttcctttttcgacgcctccgatgtcacggatgtaatcttcataatggccgtttcctgaggctgttcttgttgtgttgccgtcgaggtggatggcatgtcatcttcgttgtccgaatcaatggtaatggtgtctgttttgggctccacaatctcgatttcattatcttcgtcatcactagcttgtttatctaaaagacaaaggtaaatgttaattaaactcaattaaatatacaattttaaaattgcataaggacccattgagtgaacagcaatgtcgacagattaaaaatgcatttatattttaatataagctcctagaaaagttggcaaatacagattagttacgcttaaactataatctcaaagtacaaatacttagcctaaaacgagactggaatgtcaagactaaatgttgaggaagcgcatctcctcgagcggaaagttggagcgcaacttctgcaactttcgttcgttgacacgcggatggcgctccatctcgcgtaggtaacactcgtaagcgaacttggccatctgccagcgaagcttacaggcctgagcgtcccgcttgaatcggggtaaccgcctggccacttccggccataagcgctccctggctcccacatcgctgtagtcaacatgtcgtggattccaaagtgttggatatgcacgcatagccaaaaccagttgctgacagaactgcttgtcatcgggcatatcttttaggtttccagcggagtcagtgccgctcgggacacagtcctgcagcggttcaaactcatcgcgcaggtcctgctcatcgatcttgtacaagaaatacaagctggccaagtactttgagtactttagctccagattcgcaaagattcccttatctttaatactcttcaggcggaaggacttgtacatctcgtacatctgctgccagcgctccacaagatactcgcaagcataatctggaaaaatatatatatttttaaaataaataaataaagaggttttaggtaactgttgttatagatcttgattttaacgtactgggcgctgacttccaaaagttttgccacagcgactttctagtttgctcgtcaatactgttgaattcgggatcagcggatttgcgccataatactggatggcttttagcgaaagttatgatgcgttgatcaatgggacgcacctcgagtggtcgcgtcggtattctagatccaccttttaggttgattttaactgctggctgcttatgagctttttgctccatcttattctctattacgtcgaggtgcttgcgctcaaagccatcgccgtcatcttcgccacagtccaccgccaaccactcgctcctcgggcgatccctgttctccaaatagtttgtcgctttgtcgaagtagcctttaaaacgctttccctgctttaagcgcctctcaatccgaacgtatcgcttccttacgttcttccagcgcagcttaatgtcatcaccgcgtggaaaatgactggcaatcacccgccactgcttattagtgacctctttcttgccgtaatcgggatgacgggtgcaccacaacgaaggatactcgcggagaaggcgtgtcaactttcgatcgtaggcgtgagcttgttcattccgattcatgctctcttcggtgcccagttctccacactcctcgttgtccaagtcatcatcatccaaatcatcatccaaatcctctggctcatcataatcgaattcggccgcatcttcgtggtctttttcggtgtcatcctgctgcggttccggtaccgtttccggttcctcgggctcatcgatgggatcaccttcggctcgaactcccagcggcatcagcggaggcaatggctcgcagtcctcgccatccttaagattggcatgcaaactcttgcggtattcatagacctgattgtgaaagctattgcagcctgtgttgaagagatccacgtcgtccagttggccgtaacacacataatccacggctgcaataagcgagagatgtaaagcgttagactcacaggaaaaactgctgctgggttctattccattgcctgttctggatggtattttgcaaacacatggaccacgcttaaattaatatctattaatcgcagccaaggaaatggaactcgcagagtttttcataaacacagcatacttacatgcttttccttcaattcttcatcgccatccgctcaaaataaacacacgcgcaaaacgaaacccgaaaattaaagtacaacgcccgtccatgtgtcgaaaatacgctccaaagacagtaatatgatattttggcctccaagtggagacagctttttgttagctccacctgaatcttaatctaacatattattgttttagcaaatatatttctatacgctttccaaacattaataatattaaatattatattaaataaattgtagatctgacatatttccccttatgtccatatatacaataattcttcttaaaaacatagtaaatttcgtaactcaccagcagctagttgaccattctccagactgttggcgtcattcttgaagcccttctctcgcatgtccaccaaacacttctcctgcaggttcttaaaccgcccaatcgcataggtcatcaaataggacatgtgaatgtatagctccttcagttccagatagctccgaacctggttgtaggcgttcgagtgggtaagggataccactttgcccgtaagatgagtgcagatgtccatggcgctaaagatttgctcctgcagctgcgcccgtgcctgacccatcggcgtgttggggaaggtgagacgcaccaaagttggaaccttaggcgctggttgtggtgctggagtaatcatgagagtttgaccgccattggcattgggcggaagtccttgcagcggtggaggcgctggattggcgtttccaactcgcacttgcggagcccgctgctgttggttcgtctgcgggttatagatacccatgttagaaccgtacgtgctgatatgcagtgaaggtctattagtcgtaattggagctcgaggtcggataaccacacccggacccacttgaggaacgaccaaagcaggcggtgttggtggtgttggtactgttgatgccggctgaattgtctgtggtacctgacgttttacctgaattagtctaccattgggcaggcgataggaatcctgttgtgcagcgctatttaaatctactttgaacccattgattgtgtgaaagactggcccagtggtttttacagagttgggaaccacagtacgacgtaccacaccagagaccccaccaggggcattctggcggtagcggattccagatccactgagaaccaagggaggtggcaggctactacgtgtcggtggcactgatgaagaaccacttacgcttccgttgctgccgctgttgctggaactttgtcccggttggtagttctgttggacggtgacaatcctcggagtggtgatatttgccgctgtcaccgtctgacgtccagtaggcttgggcgtcacagagagctggcaatccggctccagcatgctgagcagatccggtgtgcagaccacttcgttgttggaagctttagcgcgcttggatggtggtcccggaggaatggtttttggcatggatccccgtttactcgagcccgctgagctgccctggctgcgtttggagacattggactccaagctttccatcgagtcggataagctgctggttttcgacttcgccaagcgacagcaattgctgttatccttaagcatttgacgtcgggcctccacctcgggaagctgaagggtttgtagggccctgcattacattaaataagaaaagtcaatttagaaagagattaatcactatgataagtgaatgaatgaaaagacttaaagatgccataagcatagacaagtaggactaaaaaccgcaccttttctgcgtctgaagatagttgaccagcgcccagtgttgggctcgtagtggccacaggatcttggaggtgcagctgaagcagttccagttctcgttttgctcgatgtccacgatgacgcccttggagaggttcttcacgatgcacgacttgcagaagacgtaggggcaagtggagcagcagtatacctcgccgccctgtccgcaccagcggcagtacagctcagagccatcctcgcccttggagaactcgccgctgttgtaaaaatcgtggcacttgacgcagtgcgtcacccgcagtatgggatgcatcttgatgttgctctcggcggcgggtgctgtgcccaggtgaagcttgcacacggtgcagtgcacctttcgctggttcaccagatctacgttggggtacatcttcaggtagaagcggcgctcctcgtctgaaagcgaggggtgcatctcgaacttggagcctgcgttgcgggtatatgcaatttatatgcaattttccacttggctgatgcccagtactcactcgtgaaatccgcatccaatttggccagtggcgatggcgacggcgtcgctacctttgccaggccactttcgctacccggagcactgttactcatgacttctgttccgtatccgggcctcttggactagagcactgcgatccgcaccaatttttgttctaaaacgcgaaaaattcacgattttctgctgccgccgcagaaaaaagcggcgcgcttatcacttttatgtttggcaacacaataacaacagggctgcaagggacgcgtgtttacaattatttattagttgggcaaaccgggaaaaaatattattgggagatcctgtactgaatgcttcgcagcaagtctcctcgaaaatgtgtcagattttttcacccgagaaagacagctgaatattccgcatcaaattcaatatggctgccccttcgggttccagccgaagtaggctctacgaagtctatataacaagttcggaccgatactctaaaattttcttaggaaaacatggctaaaattttgatcaaaaagaatatttctttttttttggcatcagaggatcattaaattagctataatatcactctaatatcacaacatttattgtaaattttttttaatcatttctatcgttttaaaggctgataaatatattttatattttaaagaatgttttcgtattcgttagtctttgcaagccttggcaaccctaaacttactagtcatctcttttacactcatcgtccgtccataagaatccgaacgcgttaagaaagagacagcatatatgtgttatttacgaaaaacaagaattttttaaacaaatcaatattccaaattgctttatatttttaacgttttaatttctcccgcataagaaatatttgagatatctaaagcatttggcgaactggttccaggcaatcgatatatgtgagaccgtataaacatatcgagttaacagaattagtaaatcatgacttcacataaaatcattaaaacaagttttcagaacgcaacaactgatcttcagacaacttttaaaaataaatcaagtaagattttggaaacataaattccacaatgtcaaaatatcagtaaaaataacttaaagtaactcgaataacttgaacgaggaaatcttaatgaatagttgatcaaaataatcagtcagaaatagggaattttataattgtacacatattagtaagtcgtaaggtttcgtattatgaacatgtagatgttgtactaagcatttcctattactattttaaatatataaatatataaatagacatttatatataagaatttctttattacaaagtcaattgatagtcgctcatcgtttctatgttacaattactgtttacttttcttgacttcttcaaaatatttaaaat

SEQ ID NO: 18143 - DNA, 5137 bp, DROSOPHILA
cggaatattcagctgtctttctcgggtgaaaaaatctgacacattttcgaggagacttgctgcgaagcattcagtacaggatctcccaataatattttttcccggtttgcccaactaataaataattgtaaacacgcgtcccttgcagccctgttgttattgtgttgccaaacataaaagtgataagcgcgccgcttttttctgcggcggcagcagaaaatcgtgaatttttcgcgttttagaacaaaaattggtgcggatcgcagtgctctagtccaagaggcccggatacggaacagaagtcatgagtaacagtgctccgggtagcgaaagtggcctggcaaaggtagcgacgccgtcgccatcgccactggccaaattggatgcggatttcacgagctccaagttcgagatgcacccctcgctttcagacgaggagcgccgcttctacctgaagatgtaccccaacgtagatctggtgaaccagcgaaaggtgcactgcaccgtgtgcaagcttcacctgggcacagcacccgccgccgagagcaacatcaagatgcatcccatactgcgggtgacgcactgcgtcaagtgccacgatttttacaacagcggcgagttctccaagggcgaggatggctctgagctgtactgccgctggtgcggacagggcggcgaggtatactgctgctccacttgcccctacgtcttctgcaagtcgtgcatcgtgaagaacctctccaagggcgtcatcgtggacatcgagcaaaacgagaactggaactgcttcagctgcacctccaagatcctgtggccactacgagcccaacactgggcgctggtcaactatcttcagacgcagaaaagggccctacaaacccttcagcttcccgaggtggaggcccgacgtcaaatgcttaaggataacagcaattgctgtcgcttggcgaagtcgaaaaccagcagcttatccgactcgatggaaagcttggagtccaatgtctccaaacgcagccagggcagctcagcgggctcgagtaaacggggatccatgccaaaaaccattcctccgggaccaccatccaagcgcgctaaagcttccaacaacgaagtggtctgcacaccggatctgctcagcatgctggagccggattgccagctctctgtgacgcccaagcctactggacgtcagacggtgacagcggcaaatatcaccactccgaggattgtcaccgtccaacagaactaccaaccgggacaaagttccagcaacagcggcagcaacggaagcgtaagtggttcttcatcagtgccaccgacacgtagtagcctgccacctcccttggttctcagtggatctggaatccgctaccgccagaatgcccctggtggggtctctggtgtggtacgtcgtactgtggttcccaactctgtaaaaaccactgggccagtctttcacacaatcaatgggttcaaagtagatttaaatagcgctgcacaacaggattcctatcgcctgcccaatggtagactaattcaggtaaaacgtcaggtaccacagacaattcagccggcatcaacagtaccaacaccaccaacaccgcctgctttggtcgttcctcaagtgggtccgggtgtggttatccgacctcgagctccaattacgactaatagaccttcactgcatatcagcacgtacggttctaacatgggtatctataacccgcagacgaaccaacagcagcgggctccgcaagtgcgagttggaaacgccaatccagcgcctccaccgctgcaaggacttccgcccaatgccaatggcggtcaaactctcatgattactccagcaccacaaccagcgcctaaggttccaactttggtgcgtctcaccttccccaacacgccgatgggtcaggcacgggcgcagctgcaggagcaaatctttagcgccatggacatctgcactcatcttacgggcaaagtggtatcccttacccactcgaacgcctacaaccaggttcggagctatctggaactgaaggagctatacattcacatgtcctatttgatgacctatgcgattgggcggtttaagaacctgcaggagaagtgtttggtggacatgcgagagaagggcttcaagaatgacgccaacagtctggagaatggtcaactagctgctgccgtggattatgtgtgttacggccaactggacgacgtggatctcttcaacacaggctgcaatagctttcacaatcaggtctatgaataccgcaagagtttgcatgccaatcttaaggatggcgaggactgcgagccattgcctccgctgatgccgctgggagttcgagccgaaggtgatcccatcgatgagcccgaggaaccggaaacggtaccggaaccgcagcaggatgacaccgaaaaagaccacgaagatgcggccgaattcgattatgatgagccagaggatttggatgatgatttggatgatgatgacttggacaacgaggagtgtggagaactgggcaccgaagagagcatgaatcggaatgaacaagctcacgcctacgatcgaaagttgacacgccttctccgcgagtatccttcgttgtggtgcacccgtcatcccgattacggcaagaaagaggtcactaataagcagtggcgggtgattgccagtcattttccacgcggtgatgacattaagctgcgctggaagaacgtaaggaagcgatacgttcggattgagaggcgcttaaagcagggaaagcgttttaaaggctacttcgacaaagcgacaaactatttggagaacagggatcgcccgaggagcgagtggttggcggtggactgtggcgaagatgacggcgatggctttgagcgcaagcacctcgacgtaatagagaataagatggagcaaaaagctcataagcagccagcagttaaaatcaacctaaaaggtggatctagaataccgacgcgaccactcgaggtgcgtcccattgatcaacgcatcataactttcgctaaaagccatccagtattatggcgcaaatccgctgatcccgaattcaacagtattgacgagcaaactagaaagtcgctgtggcaaaacttttggaagtcagcgcccaattatgcttgcgagtatcttgtggagcgctggcagcagatgtacgagatgtacaagtccttccgcctgaagagtattaaagataagggaatctttgcgaatctggagctaaagtactcaaagtacttggccagcttgtatttcttgtacaagatcgatgagcaggacctgcgcgatgagtttgaaccgctgcaggactgtgtcccgagcggcactgactccgctggaaacctaaaagatatgcccgatgacaagcagttctgtcagcaactggttttggctatgcgtgcatatccaacactttggaatccacgacatgttgactacagcgatgtgggagccagggagcgcttatggccggaagtggccaggcggttaccccgattcaagcgggacgctcaggcctgtaagcttcgctggcagatggccaagttcgcttacgagtgttacctacgcgagatggagcgccatccgcataaacaagctagtgatgacgaagataatgaaatcgagattgtggagcccaaaacagacaccattaccattgattcggacaacgaagatgacatgccatccacctcgacggcaacacaacaagaacagcctcaggaaacggccattatgaagattacatccgtgacatcggaggcgtcgaaaaaggaactgcaagagaacaaccaggccgacatcgacgtggctgcattcagttccacgatattggccagcctgctggaggtggaggtcaacgaaggcgccagtgagcccaagcccgtatctcctggccaaaagaagcagccgcgcaagaaaactacaaataagccaaatccagcactcttgcaattggaacgccaacgcatggaggacatgaaaaaatccgatgccaagctgaaaatgaaggtcatggtcaagctgaagcgagctgaggatgagttcgaggtggcgcgaaaatgggtcgaggacatgaaacagggacaggaattggccaccaaaataaaggactccaaagccgcaacaccatcaaacaaaactcaaaaaccaagtgaaaatctgaaaatttctgaaaaaggatcgtcagccaaaaaagagagcacaaagcaacacggtgagggtgataaggaaaataccaagaataaggaaaaaattggagatatattgaaggcggccataaaagccaaaattggtgaaaacgagaaactcatggctgaagatgtacagctgccagtggatgaacttctaacagaaaaagataaggaattggacaaggaaacattgacatccactgaaccagaaacaaataaaaaatcaggaacagaaaaaggatcagacaaaaaacaacatttaacaaaagaaaacaatgtaaagggagaaaaaatagaagaggagactgagatgctatcggaaaaaggatatggcgggtccgaaaaggaacaaggtgatactgaaaatatggaagatgaaacatcttccgaaagacccactttaattggagaaatcgaaaaaaatcttctcaaagagggaaaagaagagagctcggaaaaatttgacaaggaagtggaaccatcaaaagatgttggaaaagattccccaacgacccaaggggaactcattgaaagaatggacgttaccgaacttgatgaaaagcccaaagaactactagattgcgccttagacgaagtaattcccatggagggcatcgaactaagtgatgatacagaagatctgataaaagccttgggcagccccagcgtcctgccttcccaaaatacaaaggataatgagactgatttggatgcaaacgattttattggaaatctcccactcgaaacaacggagccacctgagattctcttgaaggaggatgagtgcaaggtggaaaagacaacagggatttcacaagtaggagcacccagccccgccgaaaatggtgacacagaaatggaatccacacttgaagccagtgactctgcgccagacgagttcgccacggctgagattgttggctag

SEQ ID NO: 18144 - protein, 1610 aa, DROSOPHILA
MSNSAPGSESGLAKVATPSPSPLAKLDADFTSSKFEMHPSLSDEERRFYLKMYPNVDLVNQRKVHCTVCKLHLGTAPAAESNIKMHPILRVTHCVKCHDFYNSGEFSKGEDGSELYCRWCGQGGEVYCCSTCPYVFCKSCIVKNLSKGVIVDIEQNENWNCFSCTSKILWPLRAQHWALVNYLQTQKRALQTLQLPEVEARRQMLKDNSNCCRLAKSKTSSLSDSMESLESNVSKRSQGSSAGSSKRGSMPKTIPPGPPSKRAKASNNEVVCTPDLLSMLEPDCQLSVTPKPTGRQTVTAANITTPRIVTVQQNYQPGQSSSNSGSNGSVSGSSSVPPTRSSLPPPLVLSGSGIRYRQNAPGGVSGVVRRTVVPNSVKTTGPVFHTINGFKVDLNSAAQQDSYRLPNGRLIQVKRQVPQTIQPASTVPTPPTPPALVVPQVGPGVVIRPRAPITTNRPSLHISTYGSNMGIYNPQTNQQQRAPQVRVGNANPAPPPLQGLPPNANGGQTLMITPAPQPAPKVPTLVRLTFPNTPMGQARAQLQEQIFSAMDICTHLTGKVVSLTHSNAYNQVRSYLELKELYIHMSYLMTYAIGRFKNLQEKCLVDMREKGFKNDANSLENGQLAAAVDYVCYGQLDDVDLFNTGCNSFHNQVYEYRKSLHANLKDGEDCEPLPPLMPLGVRAEGDPIDEPEEPETVPEPQQDDTEKDHEDAAEFDYDEPEDLDDDLDDDDLDNEECGELGTEESMNRNEQAHAYDRKLTRLLREYPSLWCTRHPDYGKKEVTNKQWRVIASHFPRGDDIKLRWKNVRKRYVRIERRLKQGKRFKGYFDKATNYLENRDRPRSEWLAVDCGEDDGDGFERKHLDVIENKMEQKAHKQPAVKINLKGGSRIPTRPLEVRPIDQRIITFAKSHPVLWRKSADPEFNSIDEQTRKSLWQNFWKSAPNYACEYLVERWQQMYEMYKSFRLKSIKDKGIFANLELKYSKYLASLYFLYKIDEQDLRDEFEPLQDCVPSGTDSAGNLKDMPDDKQFCQQLVLAMRAYPTLWNPRHVDYSDVGARERLWPEVARRLPRFKRDAQACKLRWQMAKFAYECYLREMERHPHKQASDDEDNEIEIVEPKTDTITIDSDNEDDMPSTSTATQQEQPQETAIMKITSVTSEASKKELQENNQADIDVAAFSSTILASLLEVEVNEGASEPKPVSPGQKKQPRKKTTNKPNPALLQLERQRMEDMKKSDAKLKMKVMVKLKRAEDEFEVARKWVEDMKQGQELATKIKDSKAATPSNKTQKPSENLKISEKGSSAKKESTKQHGEGDKENTKNKEKIGDILKAAIKAKIGENEKLMAEDVQLPVDELLTEKDKELDKETLTSTEPETNKKSGTEKGSDKKQHLTKENNVKGEKIEEETEMLSEKGYGGSEKEQGDTENMEDETSSERPTLIGEIEKNLLKEGKEESSEKFDKEVEPSKDVGKDSPTTQGELIERMDVTELDEKPKELLDCALDEVIPMEGIELSDDTEDLIKALGSPSVLPSQNTKDNETDLDANDFIGNLPLETTEPPEILLKEDECKVEKTTGISQVGAPSPAENGDTEMESTLEASDSAPDEFATAEIVG

SEQ ID NO: 18145 - DNA, 3043 bp, DROSOPHILA
aagttctgcaaaatgtccgaaaagcggaagctccttcagcgctacatgcggaacctgagcgacctacaggatgagctgaagcgaaaagagctggagaagaagatgaaggaactggaaatgttgcaggcgaagctagctcgtcgccaggagcaatctggcaccaagtgcgctggcggtaagatcaagaacttgcgccagaagaatcttcgaaaggtactgggaaagtatatgatgaccttggagggatttctatgcgagctagcacgcagggaggcgcgtctaaatggcgacaggggtcgggctagtgaatccgaaaacctgccacatccacagatgttggaggagtacacagtagcgttctgtgctgttggtaaggcttggctataatggtgaatcctctgccattggtaatcaaaccgtaatctccaggtgaggatggccgggagctgctagaggcggctctttctgcccgtcgatgtgcctatgcgccctacagcaaattcaaagtgggagcagccttccgtgcgaagtgcggcaggatctacgcgggctgcaacatcgagaacgtagctttcactccaggcaattgtgcggagcgttgtgccctggccaagggtatcagcgagggcgagaagaagtatacggcgggtgctgtggtagcctatcacccagatgggtttaccacaccttgcggagtctgccggcagttcattttggagttcatccaaaatgatattcctatctacattgccaaggctccgccgccggagcaagagaactgcattccttcaattccggacgaagctgaagtgctggtcacgtccgcctaccatctgcttccccacagctttaactcatttgaatgaaattttcatctaaataatatccagaatttatttaatgcaataaaattattcgttctaatgtcaataagtattgcaaataatttaagttagcgatctgattaacttgacaaaaagtcaaaacaatgtgtagagaactaaacgtatttgataactggttctcccgatccgtagatgccgtattcgcttttctccgcaaacggagtgacttcctcgtgcacgagtatgggcttaacttctggatcgaattcaacccttcgaaattgtggatccgtgaaattagcgcgcacctcggtgaccattcccgaatgcggcactcgtttggtgaggttttgaaactcacagcgtcgctttgggcaattatgcgtattaccctcgtcacacattgtaggatcctcttcgcgggacactttctggatgggcggcatcttctccgtccaattccagtatgtaatattgtcgtgggcagctactccgccacacaagtcctcgggaccccagcgcacatacgacagattgtatgtggtggaggagggatcaaggtacttgctaaaggacgcctccgaacggtcgatgactagcttggtggctaccaccggagtgggcattgttacaggcaatatttcctgttcctccggcagctccttaagtacatacgactcatgactgacactagaaatgggcttcatctttcgctttacaaagcgaagggaaccctcctcaaatggtttcatatactgtgttttcatgttgagcgagggatttctaagtgcgttgggatcgttatactggaacatcatggtcacgttttagtttggtgcaacatatctcagcatatcaatcaactcacctgccacacatagttggccatgcactcagaagtcggcttctcggacagcagcggatcttttacataaatacccttatccgtaaacttggcgttcagcttgttacccattctcaagtctgtaatgtggcgatgccctcgatagtacgaggtcctccaatcgggatctgtagcgctggcagggcgcttgtaatcgaagacgccgaactcatccatggcttatggactttgaaaatctatctaacactgacaacaaacacaattttcagcgacaatggaaatgtgcaccccttgagacgcttaatttggaaacccttgatgttgcccagttaccgaatagactccaaacaatgctagtatactgactgctcacaaacagccagccttctgtacaatatttctcgtttatattctgcttcaaatgcaagtgtttacaatatatgtagttgtagtttatgctgtagagaggaatgcttgtttgacaaatataaaagcgctctgttcacaaaacaaatgaatattcgttaatataatacgtgggctaagataataatgttgcactcgatttggcctgtgcaataataaactgtttgcttagcaattaaacaattgatttacttcgtctcccggatgtgtgtaatcgatgaggcttgcgtttcaatggggtgtgtaaacaatgtgcgggtgactcatccttctattccttgtctacttccggctccccgtctcaggcaatctctttgagcgctagcagtgattggcgcagatattcatactgcgtcttggcatgcttgatctccagctctgagagctcgacgaggctgtgtttagaaaagcgataataaaatgcagagcatagcaaaatgtttagcagctgctgactcacctcttcttgaaagcagctacccgtcggttgcggaaaccgatcaactcctcctttccacatgcagacatagattcgaatttttcacaggcctccgcctgggcagtctcggcctaattggaggataaacaaaaacgattatatacagggaacacaacaagtgggccacagcaagggcatgctaaagtgaatacaacagattgagcaacggtggagcgcatgcagcatttacgtggggtggcgacacatctactaaaccgacggttaaaacgttaaatgccaaatacctcttgcacctccaacggctgcagaaacagaaccacaaacacgcacaaaaagtgaagagggagggacaggcagatcagagagttgtgaggttgtgtacggtagcaataaaatacaagaacgcaaataatttgttatttgtaattagtgaagcgtgagaattaa

SEQ ID NO: 18146 - DNA, 981 bp, DROSOPHILA
gtaactgggcaacatcaagggtttccaaattaagcgtctcaaggggtgcacatttccattgtcgctgaaaattgtgtttgttgtcagtgttagatagattttcaaagtccataagccatggatgagttcggcgtcttcgattacaagcgccctgccagcgctacagatcccgattggaggacctcgtactatcgagggcatcgccacattacagacttgagaatgggtaacaagctgaacgccaagtttacggataagggtatttatgtaaaagatccgctgctgtccgagaagccgacttctgagtgcatggccaactatgtgtggcagtataacgatcccaacgcacttagaaatccctcgctcaacatgaaaacacagtatatgaaaccatttgaggagggttcccttcgctttgtaaagcgaaagatgaagcccatttctagtgtcagtcatgagtcgtatgtacttaaggagctgccggaggaacaggaaatattgcctgtaacaatgcccactccggtggtagccaccaagctagtcatcgaccgttcggaggcgtcctttagcaagtaccttgatccctcctccaccacatacaatctgtcgtatgtgcgctggggtcccgaggacttgtgtggcggagtagctgcccacgacaatattacatactggaattggacggagaagatgccgcccatccagaaagtgtcccgcgaagaggatcctacaatgtgtgacgagggtaatacgcataattgcccaaagcgacgctgtgagtttcaaaacctcaccaaacgagtgccgcattcgggaatggtcaccgaggtgcgcgctaatttcacggatccacaatttcgaagggttgaattcgatccagaagttaagcccatactcgtgcacgaggaagtcactccgtttgcggagaaaagcgaatacggcatctacggatcgggagaaccagttatcaaatacgtttag

SEQ ID NO: 18147 - protein, 287 aa, DROSOPHILA
MDEFGVFDYKRPASATDPDWRTSYYRGHRHITDLRMGNKLNAKFTDKGIYVKDPLLSEKPTSECMANYVWQYNDPNALRNPSLNMKTQYMKPFEEGSLRFVKRKMKPISSVSHESYVLKELPEEQEILPVTMPTPVVATKLVIDRSEASFSKYLDPSSTTYNLSYVRWGPEDLCGGVAAHDNITYWNWTEKMPPIQKVSREEDPTMCDEGNTHNCPKRRCEFQNLTKRVPHSGMVTEVRANFTDPQFRRVEFDPEVKPILVHEEVTPFAEKSEYGIYGSGEPVIKYV

SEQ ID NO: 18148 - DNA, 3104 bp, DROSOPHILA
tatattgctcatttaattgaaagaatttatttataaattataaatttatttataaatttatttatatttatttataaatttatattttcaataaatcgaatgaattattagcatttattgaagttcccgcaatatttaaattacgctccattaatttatgatgtgtaagccactgtaaatcctattattacatttttgttagcttaattgagaactaaatttgatgaaaattttcaagaacatttttatttacagcttactacccattttttttttttgtgctaagttaccccgatgcaactttcaattccacttgatgtttgctggcaaattcattgagacacttaataaatgttacatatacgcctttcaaccactttagacccccaactatgcccccttatcacccttatcaatgccaagtgaagtttactctccaatttcgacccacacacgacacttttcgcacataaatcaagttgaccttaaaaaaatcagtgaaacaaaaactttgtcatatcatggccagcaacaacaacaataataacaacaacaactgcaagacgccaaaggaggcgaggatttttgtgggcagaagagggggtagtggggttgttaaggggaggctgtcaaggctacgtgacaaacaacaaggtgacataaatatccagttgctccaaaaaggaaactgaacttttttctttaatgccaaggcaacatagcaaagtttaagggagccgggggatgtggggcagagtgagaggggagacggagacgcgttccaagcaaagaaagcataaagtgatacagtgggcactcgcgtaacagaacttcagggaattccaagtcaaagaaaagtgaacttgaattcagaaaaagttgttaattaaatatgtacatagtattaactgtttttaatattgtttgtaaataattttaacaaaatatttgaaaatcacgttgtttctataaatttcccttaacgcatatacatatgtacttaattttttttgtagcccaagcatttcctcataacgttaaatgttggcattactgcggaatttaaattccgagaattctcgtttggcgcaaagattactgtactaacctgctgctgtgttggctgatgtgtcggttgcattggccagacgagattgagattcctggcggattgtgccggtggttgtggatgctgagggggatggggcggctgggcggtgagcagctgattagaggcgccaaagtgtatcatgttggcggtgtgacgtcgtgctggcagagcggggggcggggtggcgcagggggaatcctgttcgttgtctctctctagcgattcctgattctccagctgctgctgttgttgttgttgttgtagtttggcctcgtttgttggcggcttcttgggcaatgtcaaggcattgttgttgttgttgttgttgttgttgttgttgttgttgttgttgagcgaaagcgaacgcgcaaaagaacttttgaaatagcgacacggcatctggaaatcaaagtcaagatccgttgtctgctgcatgtttgttgtggttttgtgcatttctattggctaaaacgggatttctttatttatatatttgaattttcccttgtgctgcctctttctctgctatttttttttgttggtctcttttaaattggcattgttgatgttttcctctttagcggtatttccctttggattattgcattttttcacgcacccataagttcactttcacacactcacgcacaaatcaattagtttttgacactcgaaggatttttttcaatacaatttaatagaaattcaatggaaatcaatttctgggatttattcgcgcgcgcataacacaaacaaaattcataaagccgcagctagttttcgtttgcgcccgaattgatgagttttactgtactaaaatccagaaaaattgggaaatattgattcgttgaaatgttgttgggtttgaattttagtgcgaactgttgttattaaatgttcaagaataatgttctactaataaatagcttgtttttcaactttacaacagtttgctgcttctcgtaattcacgcgacttttcccggccgaggtggaaacctaactggaagaccaactgtatgttaccgccaaattcgcagacagtttgtgcttgggtcaccctgcttgggttattatttcgatctccaatgttaatgttaatgttattaacagtaagctcgttctctctgaaataaatgaatgaagaagttaccaaggcaaccgaataaaacagagtctgcaaagaatgtcttaacagctagctattctcttaataacagtgcaacaacagtaaaaaaaatatgcttaaaagtatgctaagcattttgttaaacaatcgtttttatgtcataagatcagatcgtgaaacctaaatttaacaaattaaatgaaagaaacgtcttgaacgtatacatttaagtgattttatagagactttttttttagcttatagcatttagtcaatagcttagttaactgcacaagagtctataataataaaagtctataaatacattaaattcgttaacatgttttcaaatgtagaaatgttaatgatttggcgcgccaagaaatttgaaaaatgtagattgtattttacaagaaaatatgaaaaagtatattaaaaagataaagtttatttttgttcttcttttagttaaatagattgcatcttagtattcattataaatattattccaaatgtcttaaaattaattagtttttatattttatcatgagtaagaaaagggtttttttccagtgcaaattttgttcaacgaaactaataatatcggttgagaaatggaaattgttttaccattcccccttctaaggaggcattagcattcgttcctccgctgactaatccccggcctaattcccataccttatgtggtatctatattggggagacagcttgccaatcaatttgattgcgctgcgctgatgtttgcccctgtttatctagcttaggggaaggattttcaagcttttatcataacagaagtgctttaattccctttgatgaacatttgtacataacccccttttga

SEQ ID NO: 18149 - DNA, 1104 bp, DROSOPHILA
cacctcggccgggaaaagtcgcgtgaattacgagaagcagcaaactgttgtaaagttgaaaaacaagctatttattagtagaacattattcttgaacatttaataacaacagttcgcactaaaattcaaacccaacaacatttcaacgaatcaatatttcccaatttttctggattttagtacagtaaaactcatcaattcgggcgcaaacgaaaactagctgcggctttatgaattttgtttgtgttatgcgcgcgcgaataaatcccagaaattgatttccattgaatttctattaaattgtattgaaaaaaatccttcgagtgtcaaaaactaattgatttgtgcgtgagtgtgtgaaagtgaacttatgggtgcgtgaaaaaatgcaataatccaaagggaaataccgctaaagaggaaaacatcaacaatgccaatttaaaagagaccaacaaaaaaaaatagcagagaaagaggcagcacaagggaaaattcaaatatataaataaagaaatcccgttttagccaatagaaatgcacaaaaccacaacaaacatgcagcagacaacggatcttgactttgatttccagatgccgtgtcgctatttcaaaagttcttttgcgcgttcgctttcgctcaacaacaacaacaacaacaacaacaacaacaacaacaacaacaatgccttgacattgcccaagaagccgccaacaaacgaggccaaactacaacaacaacaacaacagcagcagctggagaatcaggaatcgctagagagagacaacgaacaggattccccctgcgccaccccgccccccgctctgccagcacgacgtcacaccgccaacatgatacactttggcgcctctaatcagctgctcaccgcccagccgccccatccccctcagcatccacaaccaccggcacaatccgccaggaatctcaatctcgtctggccaatgcaaccgacacatcagccaacacagcagcaggttagtacagtaatctttgcgccaaacgagaattctcggaatttaaattccgcagtaatgccaacatttaacgttatgaggaaatgcttgggctacaaaaaaaattaa

SEQ ID NO: 18150 - protein, 181 aa, DROSOPHILA
MQQTTDLDFDFQMPCRYFKSSFARSLSLNNNNNNNNNNNNNNNALTLPKKPPTNEAKLQQQQQQQQLENQESLERDNEQDSPCATPPPALPARRHTANMIHFGASNQLLTAQPPHPPQHPQPPAQSARNLNLVWPMQPTHQPTQQQVSTVIFAPNENSRNLNSAVMPTFNVMRKCLGYKKN

SEQ ID NO: 18151 - DNA, 3235 bp, DROSOPHILA
cgtccttgagcacctgccgcttgttggacttctcgcgcatgtaaagactctgacggacggatgactcttggctggtggcctccgcctggacaccatcgacgatatcctgcaccagattgtccagttcatcgtcggaattcagaatggccacgaccgttgccgttgtatccggatggaattcctcgctatccgagataatgccatcatccacgagcatctcctggtcaagatccagatcacgcagcgcattcgatggcctgccgcggcccgaatatctggctggctgtctggcgccactgtgacgccttgtgcgcttctcgatctcatccggagattcaaaatccaacaatttcgacgattttttgcgtacgcgtccgctgcgcgaaacacccgtcacctggaaatctaattgggaatttatgaccccgattccattgacggctgccgctttttccactcacccttggccaccaggtgcgaggttggggactccatgtttggatacctgctttggaagattgggatgcaatttgttgcaaaaagaacgaattaaacgaagcaaacaaaacagctgtttggtgtgaccagagctttaaaacgcgatgcattgcaagcgatggttaaatatggaacactagataaccattttagtttttgaatatattgctaagttaataaccattgcaccagtcaattgtacagagtaggaaaccattaaacttaattatttaataatataatattttttattgttatattatttaaattataagcacaggatgtgcacgcacaacttaatttttttattatattattaattatttttataaacaaaaacatttacgatatatacgactgcaatttcatttttattacaatacatctaaattaatatccagttagcttgcaaaaaccatcagctggtcacactgccgcacctttgttttgtttcgacttttttttttgctgtttgaaagcggcttttagtttatcgatttgctttgcacctaactgcgccaagcgccccatggcacgcgattctcgccgtttgtgagtcgtttcgccggtggcccccaacccaaggacattttggcccccagccggccgtatacgcatttggcgttgacccgcgtccgcttttttcatgaccaaaacggcggctgcgattcaaacgaagctcaagcgcaagcaaaaacattcgcgcagcgtcaatcaatcgaggcggtacttaatcgggtttagagctatccatagccatgtcagcggagaggaacaagagtggcgaagtacgcagtgcagctggaggattggaactggcatctgcgagtggagcaagtgcatccgagacggacaatgtgagcgcccttgaactgcagtccaacaagcgcatgctgtactttagcgacggcgtcatggaggagttgtcctcgggcagcgaggacgaggcggatgcggaaatgggcgacaaatgctacgacgtccatttaaacgaggtacatacattcagcaaggattatgggtggagtaatgcacttccggccatccatttagtacatggtcatgtagctgcattgcttgtttaccttttttaaagcgggattgtccggattaacacagttagttaaatttgctcaagattagcccagttctcctgatccagataataacttttcactttgagctcgagacgtgactaatgttcgaagcgaattatgataataatgtgagaaattttatatctttcaatgaaaatgtgtgttttgagctgtttaagtaaacaaacagggcccagggccacgaaaaagataagcagctgccaccccccgcccccctcctcattgaccatttagcgtgactcatttagcccgctttttttttttttgccaccttttagagcgaaatgccgctgggaccacgcctgcgttacaaggccagcaggatgggcaaccgattcctggccggcatcgactatgtgggcggtgggctggcccacctgcttggtatcaccagcagcaagtatgccagcgaattggagaactaccacagggccaaggagcacggcgacgaggaccttgacaattggcacccgcgggccatgtcgaccacgaccagtagcagcaacaacaacagcagcggcaacaacaatcgcaacgaaaccatcgtcctatgcgaaccaacacgcagcgaggcgaccttgccacccacacggcagtaggcgcccactgggccacccacttgccaggtgggttgtgcaaggtggcgattttcttggcaggaaggcgaaacaaaatgctcatggagtactggcgacacttggagactcttttacttggtaaaaaccatgcgaaacgaaatgaatcaaaacagatattaacttttcgacactttattcgctagcaaataagttatacatatacatatatgataataaaaaaaatacacatataaaatacaatacaatacaatacatatactgttagtcgcgggctccatacgattcgtattagcccgcaattgtataaaggttagttagtttcttagctagttagttggacatttagaagtaggactttttctgtgcgaaaatcagcagaagttgaaggaaaaccctcagtaattccgccaaagttcgttgctggaaaaggactcttttaaggtaatttcatgatattgactcgtttcagttaagtccctaaagctaatggcacactgaatacaattaggcattacggctacgattgcaattgcgtttttttttttcgattgttaagtacacttgtttcggcatcgggagaagacagcaaagttggaaacctagtttctggttcccatttttatttttttgtttttgaagacatgaacatgcgtatcacagtatttggttgctgcgcgtttctctctctctctaactcaaaaaaaaagaatttatataaaaatgctaaatatatatatgtatatatgtgttatgtacgcaaaggcgacacacattaagtcctaatgtctaaaaggcaagagcgattattgaatttggttacaccaaaatggtaaaaaggcaacgcaaggggcaactaattaggagcaacattaagtacacacaggaaaataggatatgaagcccatctagggcaattacaaatacattgtagatgacctatgacctcgcgataaaggcccaaactaaagcactaagagcacatttccggggttatatacacagtacatagatcggtttacc

SEQ ID NO: 18152 - DNA, 834 bp, DROSOPHILA
tttgcacctaactgcgccaagcgccccatggcacgcgattctcgccgtttgtgagtcgtttcgccggtggcccccaacccaaggacattttggcccccagccggccgtatacgcatttggcgttgacccgcgtccgcttttttcatgaccaaaacggcggctgcgattcaaacgaagctcaagcgcaagcaaaaacattcgcgcagcgtcaatcaatcgaggcggtacttaatcgggtttagagctatccatagccatgtcagcggagaggaacaagagtggcgaagtacgcagtgcagctggaggattggaactggcatctgcgagtggagcaagtgcatccgagacggacaatgtgagcgcccttgaactgcagtccaacaagcgcatgctgtactttagcgacggcgtcatggaggagttgtcctcgggcagcgaggacgaggcggatgcggaaatgggcgacaaatgctacgacgtccatttaaacgagagcgaaatgccgctgggaccacgcctgcgttacaaggccagcaggatgggcaaccgattcctggccggcatcgactatgtgggcggtgggctggcccacctgcttggtatcaccagcagcaagtatgccagcgaattggagaactaccacagggccaaggagcacggcgacgaggaccttgacaattggcacccgcgggccatgtcgaccacgaccagtagcagcaacaacaacagcagcggcaacaacaatcgcaacgaaaccatcgtcctatgcgaaccaacacgcagcgaggcgaccttgccacccacacggcagtaggcgcccactgggccacccac

SEQ ID NO: 18153 - protein, 185 aa, DROSOPHILA
MSAERNKSGEVRSAAGGLELASASGASASETDNVSALELQSNKRMLYFSDGVMEELSSGSEDEADAEMGDKCYDVHLNESEMPLGPRLRYKASRMGNRFLAGIDYVGGGLAHLLGITSSKYASELENYHRAKEHGDEDLDNWHPRAMSTTTSSSNNNSSGNNNRNETIVLCEPTRSEATLPPTRQ

SEQ ID NO: 18154 - DNA, 3783 bp, DROSOPHILA
aatgaaaagagaaaaaaacccactttaatagcaatttgtaatgcaattttcaacacaaacacaacaattcgaaaccacatattttgccatcatcatcgttatatattttttatggattaactattgtaattaaagtaaatgcaaactcagtagatgggaaatcgtcattgtgtaattatactaaataggagcataaaaaataacactaaataccgcaaaaaacaatacaaaagtacacaaatgcaatgcctttccttttgtatagtaagttctttgtttaaacaaactttttgccgttttctgattttacaagttaacacgaacgataaattcccagttgattggtgtaaacattggcctgctcttagagagaaatttagatttgtagattaacaccgtagaagatatacactcaaaacacacacactcacacaaacacacccacatgtacacccacacacacaacaacaaaaaattgtaattttacactgtgcaacaactttttgatgattctttattgtaagctcataaagaaaaaaaaaacgcaaaatacttgcaagttcaaaacaaaatctagtaaaattaagtaaaacaaaaaaatacaattgaaaagaacatagcaaataggcgttaaaaaataataaacaaccaaacaaacaacaaaaataaaactaaagaaaaaaatacaaaaaaaaatattacagaaaactaatgcaagaatgtgtttttactggatttgtggaaggattagatattgtcctataaaaagggaatattttctttttcgtactcgaatataattgttataggatctttagtttacttttactttaaatgcttaaaccaactttaattaactgaaatcctggtcttataaaccatatcctcatcccttgtccaaagaaactcataatgattcaaactcttggttaatttatttacacataattattggatattgtaatgactgaagtctggctgggattgttgggatgtgggcttagaactcatcgaagtcctcgtcgccgccctcctcggcattgtccagaccgacctcctcgaagtcccgttccagtacggcgatattctcgcgcgcctccgtgaactcgccctcctccatgccctcgcccacgtaccaatggacgaaggcccgcttcttgaacatcagatcgaacttgtaggagagattggagaaggccaccgagatggcggtggtgttggacagcatgcagcaggccctcgaggtcttggccaaatctccatccggcacaaaggctggcttctcgtagttgatgccaattttgaaaccagtgggacaccagtccacgaattgaatgtgccgcttggacttgatggccgagacagcggcatttacatccttgggcaccacatcacccctgtaaagcatgcaacaggccatgaatttgcccgcacgaggatcacacttgaccatcatgttggaggattcgaaacaggcattggtcaatgtggtaatcgcatgctgttcatgggccgatctctcggcggacatcagtggggcataggcaaccaggggaaagtggattctggggaagggtaccagattcgtctggaactcattcagatccacattcatggagccactgaaacgcagagaagccgttgtggagctcactatttgggcgatcaaacgattcagattcctataggcgggcctgtccacacccaagctattgttacatatatcgtagatggcctcgttgtccaccatgaacacacagtccgagtggtccatggtggagtgggtggtgagcagcgcgttatatggctccaccacggcggtggagaccttgggcgatggatagacggcaaagtccagcttgcacttcttgctgtaatcggtggacaagcgctccaccaacagggatgtgaatcccgaaccagtaccaccgcccagcgagtggaagatgaggaatccctgcaagctgtcacactgctctgcgatcttctgcagccgtgaggtcaccctatcgatcacctccttgccaatggagtaacgacctcgggcatagttattggccgcatcttcctttccagaaatcagttgctccggatgatagagctccctcatgcagccattccgaacatcatcgatgaccgtcggttccagatcgacgaaaatcgagcgtggcacttgttttccattgccggtctccgtgaagaaggtcctagcatcgttggccgaggtgtcgtgacccacactggcactgctcccgctggccgtcagctcctccttggtcttcaggctgccgtccaggttgatgccgtgctccagcaggtacagctcccagcaggcattgccgatctggatgccgcactggccaatctggatggagactacttcgcgctggcgggtgaaacaataaaagtggtgagctgggcaagagaaggcgccattgtttaaggttaggttaggtcctccctttgtaatttactttacaaacacattactaactaaaactaatattaagaacagtattatatgacgaaaaggtaatactcttttataattgggacattttatcaaactcaaaaaaaaatacaagtttaaatattctttaataaacttgattgtctgttataatacatacgaggaattcattttaaataaacaattctaagatcttaatatttttcaaggatttgtgagcagtaacagttaacagttaagtttcaaaaaattcgcaattagctgttcattttcaatgaacatttattcatgttcacttcccacaccttttcatttcacatcttcttacacatcttttctgattttaaatttcacttcccgctttcagcaattcttaaactaattagtttttcttcttctcaccattttattagtttttttttgctggactaaaattgggtgtatacaaattaaaatctaatgcgggaccttttttttataatttttttggtcgccacgcgaaaagtgcagcctcaggttagttggttcgctgattggggagtcactggaaaagcgccgttacagagcgccaaagaggaatgtcaaattgggagacagggctgctaaccaataatcattccaaggtttttccaacccatttctggcggcttatcgatactaatttgaaatagtatgtatgtatctcaggatttgctttacctttacttaaattattattaaaaactatataatatcatattgaaaatcttcaaaagtttaggtgtcttcaaaacttgtttatttttacaaattcatatattgacaaatgcactctacttgaataaatattttatggcatcttaagtgtgaatttctttttttaatttcgtgcgaattgaattctatctctctagacacctacaattgtgcttcaaaatctttacagacgaaataccttaacataaacataaagtgggacgaaaataaattcattgaacctgtgacacaataaataatcatctaggcatgctaatccttgcgaaatccggggggcagcgtcacatcgaaaacgatgggggcattgttgggtaggtagttgatgtcacacgttgaggcattcacaaagatgatcctgccatcgctggtgatgccgtagccttcgtgtacatgtccgaagacatggtatttcgggcgcactcgttgctgcactgtgctgagtagctccacacaaccggctcgtacgccggaacagcagagatcgccgtgacccacgggcggcgtgtgggtgaccaggatatcgatgccttccgggatttgattccacttatccaaac

SEQ ID NO: 18155 - DNA, 1425 bp, DROSOPHILA
atgaaaaggtctcaccacttttattgtttcacccgccagcgcgaagtagtctccatccagattggccagtgcggcatccagatcggcaatgcctgctgggagctgtacctgctggagcacggcatcaacctggacggcagcctgaagaccaaggaggagctgacggccagcgggagcagtgccagtgtgggtcacgacacctcggccaacgatgctaggaccttcttcacggagaccggcaatggaaaacaagtgccacgctcgattttcgtcgatctggaaccgacggtcatcgatgatgttcggaatggctgcatgagggagctctatcatccggagcaactgatttctggaaaggaagatgcggccaataactatgcccgaggtcgttactccattggcaaggaggtgatcgatagggtgacctcacggctgcagaagatcgcagagcagtgtgacagcttgcagggattcctcatcttccactcgctgggcggtggtactggttcgggattcacatccctgttggtggagcgcttgtccaccgattacagcaagaagtgcaagctggactttgccgtctatccatcgcccaaggtctccaccgccgtggtggagccatataacgcgctgctcaccacccactccaccatggaccactcggactgtgtgttcatggtggacaacgaggccatctacgatatatgtaacaatagcttgggtgtggacaggcccgcctataggaatctgaatcgtttgatcgcccaaatagtgagctccacaacggcttctctgcgtttcagtggctccatgaatgtggatctgaatgagttccagacgaatctggtacccttccccagaatccactttcccctggttgcctatgccccactgatgtccgccgagagatcggcccatgaacagcatgcgattaccacattgaccaatgcctgtttcgaatcctccaacatgatggtcaagtgtgatcctcgtgcgggcaaattcatggcctgttgcatgctttacaggggtgatgtggtgcccaaggatgtaaatgccgctgtctcggccatcaagtccaagcggcacattcaattcgtggactggtgtcccactggtttcaaaattggcatcaactacgagaagccagcctttgtgccggatggagatttggccaagacctcgagggcctgctgcatgctgtccaacaccaccgccatctcggtggccttctccaatctctcctacaagttcgatctgatgttcaagaagcgggccttcgtccattggtacgtgggcgagggcatggaggagggcgagttcacggaggcgcgcgagaatatcgccgtactggaacgggacttcgaggaggtcggtctggacaatgccgaggagggcggcgacgaggacttcgatgagttctaa

SEQ ID NO: 18156 - protein, 474 aa, DROSOPHILA
MKRSHHFYCFTRQREVVSIQIGQCGIQIGNACWELYLLEHGINLDGSLKTKEELTASGSSASVGHDTSANDARTFFTETGNGKQVPRSIFVDLEPTVIDDVRNGCMRELYHPEQLISGKEDAANNYARGRYSIGKEVIDRVTSRLQKIAEQCDSLQGFLIFHSLGGGTGSGFTSLLVERLSTDYSKKCKLDFAVYPSPKVSTAVVEPYNALLTTHSTMDHSDCVFMVDNEAIYDICNNSLGVDRPAYRNLNRLIAQIVSSTTASLRFSGSMNVDLNEFQTNLVPFPRIHFPLVAYAPLMSAERSAHEQHAITTLTNACFESSNMMVKCDPRAGKFMACCMLYRGDVVPKDVNAAVSAIKSKRHIQFVDWCPTGFKIGINYEKPAFVPDGDLAKTSRACCMLSNTTAISVAFSNLSYKFDLMFKKRAFVHWYVGEGMEEGEFTEARENIAVLERDFEEVGLDNAEEGGDEDFDEF

SEQ ID NO: 18157 - DNA, 12979 bp, DROSOPHILA
atagcaactatgtacgtgcatgtatacactccttaaaactgcaaagttaatagaaccctctaaaaatatcaataactgcatttaaatctatgagaaaaccgtacatatatcgaatgcaaagtaaaatcaaaaatatatacacaaaacagtttaagaaactctttccgcaagctcacaattttccacatatataaatttttcacctttttaaagcacttttttatttactttaattgattggataaagtacccaactcacttcccaaaaacggccaataagacgattgtaacataagcctatgcctaaactcaaatttttgtcagcttaagaagggttatttgaaaaataacgcaaacattttcaataaaaccaaatatatacatatatatacctatatgcgactgtacatgtgttttttagctagctaaactaactttataccgtaaaataatagaacaattgaataaatattaactaacgttggacgcaacactaaattacaacagatagaactcgatttgaacctattactgctcgaaatgctgaaacattataaacattaagtattgctggaaaatatgtataatttgcacagagccaaacaggcacactcaaacggaattaactcaaaacccaagctacaaaaccatctgaaatatttaatattgataatttgtaatgcattaacaacaacattaaataaactaataatacttactgaactgaatctgttttaaaaatcatttatatttctaattggaacacttagaccatataaaataatagcatcaaatgagatagaacgaaatgaaggccaaatatttttggaatttttaaacgctcctgtgagcgcgcgcatttacttgtggcttatggtcaccctaatgaattcagtactagttggtctgatgccatcactatttgaaaataagcgatatatcgataggatgtaattgttatcacttataaaagcgtttcggtattgtgaaagaaatggaaggcggtacacacacaatataaacatccaaataacagcctgtaagcccttagaaaattcccataaaaaaagaaacagtgcccgttttgtaaagccaaaccatccaaattgttggaagagaaggaagtgaacgtctcaggaactgaaaaaaacaccaaggataacgaacaaagatgccactcaaccaattgccactccccaagctcaacgaaaagctgccctatttagttgctgaaatgcagtaaaaaacgcataaacaactgttaaaacaccacaacaagatgacccagaagccaggcgagtgggctagcgcccttttggcacgtttcgaggatcaggcaagtgttttccaatcgcttttccgcagttgcgttttcgcaagcgaaaaaatgtacctgctgctctgcctcttcctcccccacacatgctcacagcgaccttgcgagtgtgcgtgcctcacccgctctgtcagtgtgagctctcaatcaaatgcgtgggagagcgagatagcaacaataacaaaaacaccggttcccgcatgaatgaagtggaattgagcaatcaatggtttactttttcagctgccaaacagaatcggtgcctatggcacgcaggccaggatgagccaggaccaattggtggcctgtctgatccacatatcgcgctaccgcttctcccttgtcatatccggtctcaccaagatgctgcagagggtcaatgaggcggtaagtactccattctctattgttaacccttaaactatgttgccttattttatggggctaggatacgattaaattacttaaacaaaaatttcattgcaggcccttcaaaatcgccatgagccagagcgttgctactttgagtcgctggtcatcatactgaccactctggaacgctgtctgaccaaccagaccaaggacacagcacgttttgaagaggccatgaatgtgaagcttctgctgcgcgagatctcccagtttgtcgacgtccagagcgacagcaatccgaatgccgcccagctcaaggccctggcatccaaggtgctctttgccttgtcccagaatcacttctcggcggtgttcaatcgcatatcggccaggattcaagagctgacatcctgttccgaggaaaacccggactacaacgacatagaattaattcaacacatcgatatggatatgataaagctaaccaagctgctacaaggtaaactaacttttttaatatttcggaaaggttaaacaacgttttacgtttccagaaaccatcacaaagtttcgatcgaagcgtgctccacctttgatcttgctttactcgctggagaaggctatttggaactggatcgagtaccatccacaagagttccaggacttgcaacgaggaaccaatcgagatatatcaacgtaagaggaattacaagcgtttttaaagtcacattaattgatcctgtttcgtttagctgctgggaacccctgatggactttgtagagtactttaaaaccgaaaacaagaaaagcaagactcttgtttggccgcttcaaatgctcttgctgatattgaatccctcttgccttgaggctgttgttaacgaacttcagcagtcggagaaagagaaggaaaaggacaaggaaaaggttgcctcgaagtcagcgcaatccacgtcccgggacaaggacttctcggccaagcagttcatcgagagtatcaagagaggcttgggccagcactcaccatccaaacaggtgaccgaatctgcggcaattgcctgtgtaaagctgtgcaaagcatccacctacatcaacaacaccgactccaataatgtggtcttcaagttggtgcaattctttatcaacgatctcaaggcactgctctttaatccagcaaagcccttttcgcgcggtcaggggtacaacttcgctgatatcgagctgatgattgactgctgggtgtcttgtttccggattaatcctcacaacatcgaggctctaaaggtttgcctgaatttgtcctcgccgcaggcttaccattttgtaattgtgtgctctctgctaaggtaatttacttgggtagctatataaaactcttgacttttacatgtatactttccattataggttggctcacatatacgttgacttccgtttgcagaacaagaacccctttcgaatagtaaaccaaccgagattgtcttggtggccgcaaacggatgtggttcactaccgttctgctgagctacgagctttgtttacggatacgctcaacaaggccacccagggttatatagcccatacgccactgcgctacataacctccctgacgctcaaatctaaagatacccagaaaggtttaacccgcgctgaagagggtcccgcccacaaaatgctattactgctactcgtacggctaattcatgcagatcccacgcttttgttgaatgtgagttatttgataatttgatcgataatagtctcatatttaacaattgttttgtaatatagacccaaggaaaagtggcacatgaagtgcagagctccacattggagctcatcaacggcttagttagtttggtgcatcaaactaccatgcccgatgtggcacaagaggctatggaggcgctgcttgctctgcacgccccggagaaaatagaggtttggaatccagaggctccgatcaatacgttctgggacgttagctcccaagtactgttttcaatctcgcaaaagctcattcaacaccaaattgccaattacactgatgtcttaaagtggctacgcgagatcctcatctgtcggaatacttttcttcagcgacacaaggattatgcacatgtgggaagtcagattgccatttgcaagcaggctcacattaagatggaagttgttttcttcatgtacctgtggagtgttgatttagatgcggtgctgacatcgctatcgtgttttggactactatgcgaggaggctgagatttgctgcagttctgatgaattgacagtcggatttattatgccgaattaccacatttaccaggagctggctcagttgtccacatgtgagtttggtaaattcatcatacatatttttattaataataatttcgttttagctgcaacggactctcgcatttgcttttttgacaacacgcacggcaatgtgctgagccgtcttacacttcaaaagcgcataatgaccctattgcgcaagatcgagcactgtgttcatggtgttcagcccgcctgggaggaaaccttccgcaactgggaagtatccagcaaggttttgcaaacgtaccccaaatgtaaaggagaagatggccaagcggaggttttccatcgtggcatgggcaagcggcgagcgagtcaccaaagctcagagcacgatttggaggaacaaattaatgaatgggccaatatgacatggtttctattagccttgggtggcgtctgccttcataaacgtagcagcagtcgtcaaatgctgctgcagcaatcacagaacaatgcttctttgggatcacttgctcaaaactctctttactcaagctccacaagttctggacatggctctctgcatcctagcacggtttcactatccactcttcccccagcaccgccacaagatgtcagctattgtcctgtaacacagtaaggttttatttattttaacatgtcccatatataacctataactttaatttagattcgtgggccaactattgcgcctgttagtttgcagcaacgaaaaaattggacttaatattcagaaaaatgtgaaggaactggtgggcgaggagatgtccacccaactgtatcctatactcttcgaccaggttagagccatcgtggagaagttcttcgatcagcaaggtcaggtgaacgtcaatgtgaccgacatcaacacgcagtttatcgagcacaccatctacataatgaaatcaattctggatcccaaagccaacaaggatcccaacaacgatcaaccctcgccatcggaacatttaggtgttacaagcatcgaaggcatgatgctaggaatagtgcgctacgttcgccacctggatatgactgtttatgccattcgaatcaagacaaaattgtgccagcttgtggaagtaatgatgaagcgacgcgacgacctcgcctttcgccaggagatgaagttccggaataaactggttgaatacttgaccgactgggtgatgggcacctcccatcagattgcaccgcccagctcggcggatgccgctattcttaccaacacatccctcatatttcgcgatctagaccaagcctgcatggaggcagtggctgccttgcttcggggccttccccttcagcctgaggaatcggatcgaggcgatttgatggatgcaaagagtgcgctctttttaaagtactttaccctatttatgaacctgctgaatgattgcatcgatagctccgaggcggagaaggaaatgaataataccccactattgcctccgcgccctcgaatggcagctggaaaactgaccgctctgcgaaatgccactattctagccatgtctaatttgttgggtgccaacattgactctggtttgatgcactccatcgatctgggttataatcctgatttgcaaacgcgtgccgctttcatggaggtgttgactcaaatcctgcaacaaggcaccgaattcgataccttggccgaaactgttttagctgatcgatttgagcaactggtccaacttgttacaatgatcagcgacaaaggagaacttcccatagcaatggctttggctaatgtggtgactacatcccaaatggacgagctggctagggttctggtcaccctattcgacgccaaacacctgttatcgccactcctatggaatatgttttatcgcgaggtggaggtctcagactgcatgcagacacttttccgtggaaattctttgggcagcaaaatcatggccttttgctttaaaatatacggcgcgagctatctccaaatgctactagagcctttaattcgtccgcttctggatgaggaggaggagacctgttttgaggtggatccagctcgtctggatccaacagaagatattgaacagcacaggaacaacttgattgccctaacgcagaaggtgtttgacgctattatcaactcgtcggatcgctttcccccgcagctgcgatccatgtgccattgcctgtaccaagtgctaagcaaacgcttcccgaatcttcttcaaaacaatatcggtgctgtaggcacagtcatcttcttgcggttcatcaatcccgccataggtaagattatagaaaaattctagaatacctcttattaatatttgctttgttttcagtttccccacaggaattgggaatcgttgacaaacaagtgcacagctcggccaaacgaggtctaatgctaatgtccaagatccttcaaaacattgctaaccacgtggagttctccaaggagcagcacatgttgtgtttcaacgattttctgcgcgatcactttgaagctgggcggcgattcttcatacagattgcatcagactgtgagaccgtggatcagacctcgcacagcatgagttttatttcagatgcgaacgtactggcactgcatcggttgctgtggacgcatcaggagaagatcggcgactatctgtctagcagtcgagaccacaaggcggttggaaggcggcccttcgacaagatggctactttgctagcatacctgggaccaccggagcacaagcccgtggattcgcacatgatgttcagctcgtatgcacgctggagctccattgacatgtcgtcgacaaacttcgaggagatcatggtcaagcaccaaatgcacgagaaggaggaattcaagaccctcaagtcgatgaacatattctaccaggccggaacaagcaaatctggctatcctgtcttttactatatagcaagacgatacaagtaagtgaatcgcattttatacatatttaacttagtaactaactctatttcaggattggagaaacgaatggagacttacttatatatcacgtcatactcactctgaaaccattctgccactcgcccttcgaggtggtcatcgattttacgcacacctgttcagataatcggttccgcaccgagtttctgcagaagtggttttatgtcctgcccacggtagcctacgaaaatgtccatgctgtgtacatctataactgtaactcgtgggtgcgcgaatataccaagttccacgatcgcattctggcaccattaaagggaaatcgcaaacttctgttcctggagtcacccaacaaacttactgatttcatcgacgcggagcaacagaaattgcctggagcaactctttccttggacgaagatttaaaggtattcagcaacgcgctgaagctcagccataaagacacaaaggtggctatcaaagtgggtcccaccgcattgcaaattacatctgccgaaaagacaaaggtcttggctcactccgtgctcctgaacgatgtatactacgcctctgaaattgaggaggtgtgcttggtggacgataaccagttcaccctgtctataactaacgaaagtggccagcttagctttattcacaacgattgcgacaacattgttcaagccatcatacacatccgaaatcgatgggagcttagtcagccggactccgtgacggttcaccaaaagatccgaccaaaagatgtgcctggaacgctgctgaacatggcgctactcaatctgggatcatgtgaccccaatctaaggactgctgcctacaatttgctgtgtgctttgaccgctacttttgatctaaagattgagggtcaactgttggagacccaaggactttgcataccctcaaataataccatatttatcaaatccgttagcgaaaagctggccaccaatgaaccgcatctgactctggaattccttgaggagtccattcagggcttccagcgcagcaccatagagctgaaacatttgtgtttggagtacatgacgccatggttaaagaacctagtcaaattttgcaagtccaacgatgactccaaaaagcttaaggtctcccaaattctggacaagctcatcaatttaactattgaccaaaaggaaatgtatccctcagtgcaggccaagatctggggatcaattggacagatccccgagctgatcgacatggttttggataactttttgcacaaatcgatcacatatggcttgggatcaccacaggtggagattatggctgacacggcagtggctctcgcttcagcgaatgttcagctggtgtccaaaaaggtcataacgcgaatatgccgagtcatggacaaatcctgcacaaatcccacacaatatctggagcagcatatgatgtgggacgatattgcaattcttggtcgatacctgctcatgttgtcgttcaacaattgtttggatgtggccacatcggtgccatatctattccacaccattacgtttttggtatgttcaggatccctgtcgatgcgagcctctactcatggcctagtgatcaacatcatccactcgctgtgcacatgcacaaatccctcattttcagaggaggcgcagcgagtactccgactgtccctggatgaattctcactgcccaagttctatctactcttcggcatcagcaaggtcaagtccgcagcagttaccgctttccgctccagctgccgtcaccctacagataaatggctaggaaatgaaagggttacccagcctctgcccgccgatcgagagcgtttatccctaccatcgcttgaggttatcacggatgccctgctggaaatcatggaggcttgcatgcgagatgttccggactgcgaatggctcaacacctggacctctttggctcgcagttttgctttctgttacaatccagcgctacagcctagagcccttatagtttacgggtgcatcagcaagagtgttaccgatcacgaggtcaagcagttactacgcatcctggttaaggccctcgaatctttcaacgatctcattctgatcgaggctctagtaatgtgcttaactcgcattcaaccactactccgaccagagtcgcccattcatcgggccctcttctgggtggccatttcggtgctgcagttggacgagattaccctgtacggcgctggactagctctgcttgaacaaaatctacacacgcttaagtcacagggctgttttgacaagaaggagaccatagccgaggtcatgatgaagacaagggaaaagctggagtggcatttcaagcaactggatcacgccgtcggcctctccttccgcagcaatttccactttgccctagtgggacacttgattaaggtacgttttgaactaaccgaacttattcttaatctacggatatcataatttacagggcttccgccatcctacacctacaaccgtctcacgcacctctcgtgtgctgacgatgctcttgggcataatagccaaacccctgcatcgggacaagttcgaagtaacacctgacagtgtggcctatttgactgcgctggtggctgtctccgaggaagtccgttccagatgtcacgtaaaacatgcccttccccgctggccagccgatctgagtagtagtgtggaaaatggtgaagcatccggcggagtgcaagctgttagttgaaaaaaagaaatgaaatcatacaggggatcaatgacatttctgacattccttttagatcggcctgcccctgtcacgccgtcaaaaaagttgggacatcctggatcagtccgccttgcagtttgcccgccaacacaaggttcccactcttcaggtgagcttataagaactatccagccaagctgtaattcccacttgttcgaaatttgctgtgcaaaagttgttataaccatctgctatggtaacttttggctatctatttgagtttatatattcaaacctatatatcctatatatcccatctactatgtaatatcaactatctattgagatcagccgttgcataactaataatcgttcaatgatttttttctttctctttttatgtttgatttgaatataaaaaaaaaacgttacatataaatcacaatgtatactcgttgaaaccatatttatgccataatctgcctgccgaatcttacatctaattggtgcttgtaactctcatcaatatcgatattactatatgtcctatatgaactccaaacttgtaactgccacctgccacttctactactactactactactacgcatgaacattgtcatttgatttacgtttgatttggttaccgaaacccgctaaaactacaacatcaacactgtgcaaaatcaacaaccaccccgaacacaaaattaaactccgtagaacgcgcgagttttgttcaaaactcaacgctcattctcggtgccgacgaccaaagatccgaacaatgccaccggcatcgaagaacgtcaggtactgctcaacaaaacttatctcttagctaagactaactaactactaccccactaaatcaaatgtttaagtttgctactaaaacccatactaaaatgaggtcattaatgtttcgctgtaatgtcatttgttttggttactcttgcatggcaccgaatgaaggcagtcaaaaagccgtccagttcactatacccattgccaaaatgcacaattcggatatatcgtagatctttcatcttcactagtacttttttaccatatctgtgtgtaattaaatatcacatcaattgtattacaaatcaatatgtatttgaacaggaacgcggttcgcgttcgtcggtgtccaacgagtccaacgtactgctcgatcccgaggtcttacctgacctgtccattcaagccctggtactgactgttttggccaccttggtcaagtactcttcggatgaaggcgaaacgcgggttttgtatcagtatttggccgaaggatcggtggtctttccaaaggtgtttccagttatgtgagtctatacaattctaacgtttttcgacaaattttattttaatatgtttgataccgtagccattcactgctggaccaaaagataaacaacattttgtcagtgtcacacgaccaagtggtgctcaactctgtgcagaacattatacaaaatatgctggccagcgaagatccttcccagcagcagctgcacttcctgcagagttgtggatttggcggactctggcgatttgctggtcccttcaccaaggtgggtgctttaaatgcgtattccgaagaatatatgatttatttttgattgatttttagtacaatatgatgggtgagtcctcggagctgtttgtcaactgtttggaggccatggttgagacctgtttgccaggcgacgaatccgcgccggtgccaccatctccgcgtccatacaacctgagctccagtctgagtagcctgaccctgggatcacccacggataaaggttagtatcctgtagatttatctttagcttttgcccaagctataccgtaatgcattcattgctttaatctatagcgtttatttttcaatagcaagacccattgaatgaacacagatttttacaaacagtatttactcaaacttaaccttttctttatatcacaccaattgcgatatatagcattctcatcggaatcattagatttttatgacaattgcccaggcagcgtcagcagcctgcgacgcgcctcacacagcaaatcacgcgccaaacatcgaattaacgacagtccatcacattgaacgttccacaagtaaaatacgaaaatattcaaactgcaacttaagacaacataagaatagctgaaaacaatgcaacaaaataacaccatgattgggaaacatatgtatttcgtagttatataagctttgccaaatggaattattgtcccaacactccaaacgatttcacttttgtaatatcgaacacaatatccaatatgcaaattgttaatctcaaaaaaaaaaaaaatccaatgaatttacactagataatgcaccttatcctacacgcattagcaaattgatgttgaagatttgagaattatattgatgataaatctggtaccttgaagcatttacaacatattttcgacataatgtaggtgaattgaaagcaccttttgtagcgtagagtagtgttgtcataaatatttgttgttcaaaaattaaaacacacagtcaaaaaaaaaataattcacgatagctaaattaaaacaaagacccaaaatatatttctgataaatgcatgccaagagtatataaaactaatgcaagttaaaatagctgagaacctttagttatcggtagctgctaatttagctaaaaacaattactaggcacagaaaatacatcaagattttatatattttcattgacaactatattttatacgagccaatagataattgaagtaagtctaagtaaattgaataatcttcactgcttctttgccccaaatatcctttcgccccaatttgttcttccctcgatatgtttatgcaagttttgtcttactttcagctgcatgaataacaactacaaacccgcgcactagacgtaccacacttatcgcaaaagtaatgcgtttcctaaatctgcttaaaaagtgcttttagagaacgtgaaaacccccacagaatgtcgtacaaaatcatagaatatttatatatatatgtatgtatgtatgtatagaatgtccagaagcgatgaccactgaatgcgaaagaaggaaatgaacgcgtgtattgatgtatgtaaacagaatgtatatatttgtatgtgtagaagggagtggatcgaggatactataagcaccgtagaagaagatatcgaatggaaatatttttaaacgattaccgattgtacattttaatgcttgcaacccacaactgcaactaggcacaccaagtccaccagttcctcaaaggatgaccgcgaccaggcga

SEQ ID NO: 18158 - DNA, 8893 bp, DROSOPHILA
ggcggtacacacacaatataaacatccaaataacagcctgtaagcccttagaaaattcccataaaaaaagaaacagtgcccgttttgtaaagccaaaccatccaaattgttggaagagaaggaagtgaacgtctcaggaactgaaaaaaacaccaaggataacgaacaaagatgccactcaaccaattgccactccccaagctcaacgaaaagctgccctatttagttgctgaaatgcagtaaaaaacgcataaacaactgttaaaacaccacaacaagatgacccagaagccaggcgagtgggctagcgcccttttggcacgtttcgaggatcagctgccaaacagaatcggtgcctatggcacgcaggccaggatgagccaggaccaattggtggcctgtctgatccacatatcgcgctaccgcttctcccttgtcatatccggtctcaccaagatgctgcagagggtcaatgaggcggcccttcaaaatcgccatgagccagagcgttgctactttgagtcgctggtcatcatactgaccactctggaacgctgtctgaccaaccagaccaaggacacagcacgttttgaagaggccatgaatgtgaagcttctgctgcgcgagatctcccagtttgtcgacgtccagagcgacagcaatccgaatgccgcccagctcaaggccctggcatccaaggtgctctttgccttgtcccagaatcacttctcggcggtgttcaatcgcatatcggccaggattcaagagctgacatcctgttccgaggaaaacccggactacaacgacatagaattaattcaacacatcgatatggatatgataaagctaaccaagctgctacaagaaaccatcacaaagtttcgatcgaagcgtgctccacctttgatcttgctttactcgctggagaaggctatttggaactggatcgagtaccatccacaagagttccaggacttgcaacgaggaaccaatcgagatatatcaacctgctgggaacccctgatggactttgtagagtactttaaaaccgaaaacaagaaaagcaagactcttgtttggccgcttcaaatgctcttgctgatattgaatccctcttgccttgaggctgttgttaacgaacttcagcagtcggagaaagagaaggaaaaggacaaggaaaaggttgcctcgaagtcagcgcaatccacgtcccgggacaaggacttctcggccaagcagttcatcgagagtatcaagagaggcttgggccagcactcaccatccaaacaggtgaccgaatctgcggcaattgcctgtgtaaagctgtgcaaagcatccacctacatcaacaacaccgactccaataatgtggtcttcaagttggtgcaattctttatcaacgatctcaaggcactgctctttaatccagcaaagcccttttcgcgcggtcaggggtacaacttcgctgatatcgagctgatgattgactgctgggtgtcttgtttccggattaatcctcacaacatcgaggctctaaaggtttgcctgaatttgtcctcgccgcaggcttaccattttgtaattgtgtgctctctgctaaggttggctcacatatacgttgacttccgtttgcagaacaagaacccctttcgaatagtaaaccaaccgagattgtcttggtggccgcaaacggatgtggttcactaccgttctgctgagctacgagctttgtttacggatacgctcaacaaggccacccagggttatatagcccatacgccactgcgctacataacctccctgacgctcaaatctaaagatacccagaaaggtttaacccgcgctgaagagggtcccgcccacaaaatgctattactgctactcgtacggctaattcatgcagatcccacgcttttgttgaatacccaaggaaaagtggcacatgaagtgcagagctccacattggagctcatcaacggcttagttagtttggtgcatcaaactaccatgcccgatgtggcacaagaggctatggaggcgctgcttgctctgcacgccccggagaaaatagaggtttggaatccagaggctccgatcaatacgttctgggacgttagctcccaagtactgttttcaatctcgcaaaagctcattcaacaccaaattgccaattacactgatgtcttaaagtggctacgcgagatcctcatctgtcggaatacttttcttcagcgacacaaggattatgcacatgtgggaagtcagattgccatttgcaagcaggctcacattaagatggaagttgttttcttcatgtacctgtggagtgttgatttagatgcggtgctgacatcgctatcgtgttttggactactatgcgaggaggctgagatttgctgcagttctgatgaattgacagtcggatttattatgccgaattaccacatttaccaggagctggctcagttgtccacatctgcaacggactctcgcatttgcttttttgacaacacgcacggcaatgtgctgagccgtcttacacttcaaaagcgcataatgaccctattgcgcaagatcgagcactgtgttcatggtgttcagcccgcctgggaggaaaccttccgcaactgggaagtatccagcaaggttttgcaaacgtaccccaaatgtaaaggagaagatggccaagcggaggttttccatcgtggcatgggcaagcggcgagcgagtcaccaaagctcagagcacgatttggaggaacaaattaatgaatgggccaatatgacatggtttctattagccttgggtggcgtctgccttcataaacgtagcagcagtcgtcaaatgctgctgcagcaatcacagaacaatgcttctttgggatcacttgctcaaaactctctttactcaagctccacaagttctggacatggctctctgcatcctagcacggtttcactatccactcttcccccagcaccgccacaagatgtcagctattgtcctgtaacacaattcgtgggccaactattgcgcctgttagtttgcagcaacgaaaaaattggacttaatattcagaaaaatgtgaaggaactggtgggcgaggagatgtccacccaactgtatcctatactcttcgaccaggttagagccatcgtggagaagttcttcgatcagcaaggtcaggtgaacgtcaatgtgaccgacatcaacacgcagtttatcgagcacaccatctacataatgaaatcaattctggatcccaaagccaacaaggatcccaacaacgatcaaccctcgccatcggaacatttaggtgttacaagcatcgaaggcatgatgctaggaatagtgcgctacgttcgccacctggatatgactgtttatgccattcgaatcaagacaaaattgtgccagcttgtggaagtaatgatgaagcgacgcgacgacctcgcctttcgccaggagatgaagttccggaataaactggttgaatacttgaccgactgggtgatgggcacctcccatcagattgcaccgcccagctcggcggatgccgctattcttaccaacacatccctcatatttcgcgatctagaccaagcctgcatggaggcagtggctgccttgcttcggggccttccccttcagcctgaggaatcggatcgaggcgatttgatggatgcaaagagtgcgctctttttaaagtactttaccctatttatgaacctgctgaatgattgcatcgatagctccgaggcggagaaggaaatgaataataccccactattgcctccgcgccctcgaatggcagctggaaaactgaccgctctgcgaaatgccactattctagccatgtctaatttgttgggtgccaacattgactctggtttgatgcactccatcgatctgggttataatcctgatttgcaaacgcgtgccgctttcatggaggtgttgactcaaatcctgcaacaaggcaccgaattcgataccttggccgaaactgttttagctgatcgatttgagcaactggtccaacttgttacaatgatcagcgacaaaggagaacttcccatagcaatggctttggctaatgtggtgactacatcccaaatggacgagctggctagggttctggtcaccctattcgacgccaaacacctgttatcgccactcctatggaatatgttttatcgcgaggtggaggtctcagactgcatgcagacacttttccgtggaaattctttgggcagcaaaatcatggccttttgctttaaaatatacggcgcgagctatctccaaatgctactagagcctttaattcgtccgcttctggatgaggaggaggagacctgttttgaggtggatccagctcgtctggatccaacagaagatattgaacagcacaggaacaacttgattgccctaacgcagaaggtgtttgacgctattatcaactcgtcggatcgctttcccccgcagctgcgatccatgtgccattgcctgtaccaagtgctaagcaaacgcttcccgaatcttcttcaaaacaatatcggtgctgtaggcacagtcatcttcttgcggttcatcaatcccgccatagtttccccacaggaattgggaatcgttgacaaacaagtgcacagctcggccaaacgaggtctaatgctaatgtccaagatccttcaaaacattgctaaccacgtggagttctccaaggagcagcacatgttgtgtttcaacgattttctgcgcgatcactttgaagctgggcggcgattcttcatacagattgcatcagactgtgagaccgtggatcagacctcgcacagcatgagttttatttcagatgcgaacgtactggcactgcatcggttgctgtggacgcatcaggagaagatcggcgactatctgtctagcagtcgagaccacaaggcggttggaaggcggcccttcgacaagatggctactttgctagcatacctgggaccaccggagcacaagcccgtggattcgcacatgatgttcagctcgtatgcacgctggagctccattgacatgtcgtcgacaaacttcgaggagatcatggtcaagcaccaaatgcacgagaaggaggaattcaagaccctcaagtcgatgaacatattctaccaggccggaacaagcaaatctggctatcctgtcttttactatatagcaagacgatacaagattggagaaacgaatggagacttacttatatatcacgtcatactcactctgaaaccattctgccactcgcccttcgaggtggtcatcgattttacgcacacctgttcagataatcggttccgcaccgagtttctgcagaagtggttttatgtcctgcccacggtagcctacgaaaatgtccatgctgtgtacatctataactgtaactcgtgggtgcgcgaatataccaagttccacgatcgcattctggcaccattaaagggaaatcgcaaacttctgttcctggagtcacccaacaaacttactgatttcatcgacgcggagcaacagaaattgcctggagcaactctttccttggacgaagatttaaaggtattcagcaacgcgctgaagctcagccataaagacacaaaggtggctatcaaagtgggtcccaccgcattgcaaattacatctgccgaaaagacaaaggtcttggctcactccgtgctcctgaacgatgtatactacgcctctgaaattgaggaggtgtgcttggtggacgataaccagttcaccctgtctataactaacgaaagtggccagcttagctttattcacaacgattgcgacaacattgttcaagccatcatacacatccgaaatcgatgggagcttagtcagccggactccgtgacggttcaccaaaagatccgaccaaaagatgtgcctggaacgctgctgaacatggcgctactcaatctgggatcatgtgaccccaatctaaggactgctgcctacaatttgctgtgtgctttgaccgctacttttgatctaaagattgagggtcaactgttggagacccaaggactttgcataccctcaaataataccatatttatcaaatccgttagcgaaaagctggccaccaatgaaccgcatctgactctggaattccttgaggagtccattcagggcttccagcgcagcaccatagagctgaaacatttgtgtttggagtacatgacgccatggttaaagaacctagtcaaattttgcaagtccaacgatgactccaaaaagcttaaggtctcccaaattctggacaagctcatcaatttaactattgaccaaaaggaaatgtatccctcagtgcaggccaagatctggggatcaattggacagatccccgagctgatcgacatggttttggataactttttgcacaaatcgatcacatatggcttgggatcaccacaggtggagattatggctgacacggcagtggctctcgcttcagcgaatgttcagctggtgtccaaaaaggtcataacgcgaatatgccgagtcatggacaaatcctgcacaaatcccacacaatatctggagcagcatatgatgtgggacgatattgcaattcttggtcgatacctgctcatgttgtcgttcaacaattgtttggatgtggccacatcggtgccatatctattccacaccattacgtttttggtatgttcaggatccctgtcgatgcgagcctctactcatggcctagtgatcaacatcatccactcgctgtgcacatgcacaaatccctcattttcagaggaggcgcagcgagtactccgactgtccctggatgaattctcactgcccaagttctatctactcttcggcatcagcaaggtcaagtccgcagcagttaccgctttccgctccagctgccgtcaccctacagataaatggctaggaaatgaaagggttacccagcctctgcccgccgatcgagagcgtttatccctaccatcgcttgaggttatcacggatgccctgctggaaatcatggaggcttgcatgcgagatgttccggactgcgaatggctcaacacctggacctctttggctcgcagttttgctttctgttacaatccagcgctacagcctagagcccttatagtttacgggtgcatcagcaagagtgttaccgatcacgaggtcaagcagttactacgcatcctggttaaggccctcgaatctttcaacgatctcattctgatcgaggctctagtaatgtgcttaactcgcattcaaccactactccgaccagagtcgcccattcatcgggccctcttctgggtggccatttcggtgctgcagttggacgagattaccctgtacggcgctggactagctctgcttgaacaaaatctacacacgcttaagtcacagggctgttttgacaagaaggagaccatagccgaggtcatgatgaagacaagggaaaagctggagtggcatttcaagcaactggatcacgccgtcggcctctccttccgcagcaatttccactttgccctagtgggacacttgattaagggcttccgccatcctacacctacaaccgtctcacgcacctctcgtgtgctgacgatgctcttgggcataatagccaaacccctgcatcgggacaagttcgaagtaacacctgacagtgtggcctatttgactgcgctggtggctgtctccgaggaagtccgttccagatgtcacgtaaaacatgcccttccccgctggccagccgatctgagtagtagtgtggaaaatggtgaagcatccggcggagtgcaagctatcggcctgcccctgtcacgccgtcaaaaaagttgggacatcctggatcagtccgccttgcagtttgcccgccaacacaaggttcccactcttcagaacgcgcgagttttgttcaaaactcaacgctcattctcggtgccgacgaccaaagatccgaacaatgccaccggcatcgaagaacgtcaggaacgcggttcgcgttcgtcggtgtccaacgagtccaacgtactgctcgatcccgaggtcttacctgacctgtccattcaagccctggtactgactgttttggccaccttggtcaagtactcttcggatgaaggcgaaacgcgggttttgtatcagtatttggccgaaggatcggtggtctttccaaaggtgtttccagttatccattcactgctggaccaaaagataaacaacattttgtcagtgtcacacgaccaagtggtgctcaactctgtgcagaacattatacaaaatatgctggccagcgaagatccttcccagcagcagctgcacttcctgcagagttgtggatttggcggactctggcgatttgctggtcccttcaccaagtacaatatgatgggtgagtcctcggagctgtttgtcaactgtttggaggccatggttgagacctgtttgccaggcgacgaatccgcgccggtgccaccatctccgcgtccatacaacctgagctccagtctgagtagcctgaccctgggatcacccacggataaagcattctcatcggaatcattagatttttatgacaattgcccaggcagcgtcagcagcctgcgacgcgcctcacacagcaaatcacgcgccaaacatcgaattaacgacagtccatcacattgaacgttccacaagtaaaatacgaaaatattcaaactgcaacttaagacaacataagaatagctgaaaacaatgcaacaaaataacaccatgattgggaaacatatgtatttcgtagttatataagctttgccaaatggaattattgtcccaacactccaaacgatttcacttttgtaatatcgaacacaatatccaatatgcaaat

SEQ ID NO: 18159 - protein, 2802 aa, DROSOPHILA
MTQKPGEWASALLARFEDQLPNRIGAYGTQARMSQDQLVACLIHISRYRFSLVISGLTKMLQRVNEAALQNRHEPERCYFESLVIILTTLERCLTNQTKDTARFEEAMNVKLLLREISQFVDVQSDSNPNAAQLKALASKVLFALSQNHFSAVFNRISARIQELTSCSEENPDYNDIELIQHIDMDMIKLTKLLQETITKFRSKRAPPLILLYSLEKAIWNWIEYHPQEFQDLQRGTNRDISTCWEPLMDFVEYFKTENKKSKTLVWPLQMLLLILNPSCLEAVVNELQQSEKEKEKDKEKVASKSAQSTSRDKDFSAKQFIESIKRGLGQHSPSKQVTESAAIACVKLCKASTYINNTDSNNVVFKLVQFFINDLKALLFNPAKPFSRGQGYNFADIELMIDCWVSCFRINPHNIEALKVCLNLSSPQAYHFVIVCSLLRLAHIYVDFRLQNKNPFRIVNQPRLSWWPQTDVVHYRSAELRALFTDTLNKATQGYIAHTPLRYITSLTLKSKDTQKGLTRAEEGPAHKMLLLLLVRLIHADPTLLLNTQGKVAHEVQSSTLELINGLVSLVHQTTMPDVAQEAMEALLALHAPEKIEVWNPEAPINTFWDVSSQVLFSISQKLIQHQIANYTDVLKWLREILICRNTFLQRHKDYAHVGSQIAICKQAHIKMEVVFFMYLWSVDLDAVLTSLSCFGLLCEEAEICCSSDELTVGFIMPNYHIYQELAQLSTSATDSRICFFDNTHGNVLSRLTLQKRIMTLLRKIEHCVHGVQPAWEETFRNWEVSSKVLQTYPKCKGEDGQAEVFHRGMGKRRASHQSSEHDLEEQINEWANMTWFLLALGGVCLHKRSSSRQMLLQQSQNNASLGSLAQNSLYSSSTSSGHGSLHPSTVSLSTLPPAPPQDVSYCPVTQFVGQLLRLLVCSNEKIGLNIQKNVKELVGEEMSTQLYPILFDQVRAIVEKFFDQQGQVNVNVTDINTQFIEHTIYIMKSILDPKANKDPNNDQPSPSEHLGVTSIEGMMLGIVRYVRHLDMTVYAIRIKTKLCQLVEVMMKRRDDLAFRQEMKFRNKLVEYLTDWVMGTSHQIAPPSSADAAILTNTSLIFRDLDQACMEAVAALLRGLPLQPEESDRGDLMDAKSALFLKYFTLFMNLLNDCIDSSEAEKEMNNTPLLPPRPRMAAGKLTALRNATILAMSNLLGANIDSGLMHSIDLGYNPDLQTRAAFMEVLTQILQQGTEFDTLAETVLADRFEQLVQLVTMISDKGELPIAMALANVVTTSQMDELARVLVTLFDAKHLLSPLLWNMFYREVEVSDCMQTLFRGNSLGSKIMAFCFKIYGASYLQMLLEPLIRPLLDEEEETCFEVDPARLDPTEDIEQHRNNLIALTQKVFDAIINSSDRFPPQLRSMCHCLYQVLSKRFPNLLQNNIGAVGTVIFLRFINPAIVSPQELGIVDKQVHSSAKRGLMLMSKILQNIANHVEFSKEQHMLCFNDFLRDHFEAGRRFFIQIASDCETVDQTSHSMSFISDANVLALHRLLWTHQEKIGDYLSSSRDHKAVGRRPFDKMATLLAYLGPPEHKPVDSHMMFSSYARWSSIDMSSTNFEEIMVKHQMHEKEEFKTLKSMNIFYQAGTSKSGYPVFYYIARRYKIGETNGDLLIYHVILTLKPFCHSPFEVVIDFTHTCSDNRFRTEFLQKWFYVLPTVAYENVHAVYIYNCNSWVREYTKFHDRILAPLKGNRKLLFLESPNKLTDFIDAEQQKLPGATLSLDEDLKVFSNALKLSHKDTKVAIKVGPTALQITSAEKTKVLAHSVLLNDVYYASEIEEVCLVDDNQFTLSITNESGQLSFIHNDCDNIVQAIIHIRNRWELSQPDSVTVHQKIRPKDVPGTLLNMALLNLGSCDPNLRTAAYNLLCALTATFDLKIEGQLLETQGLCIPSNNTIFIKSVSEKLATNEPHLTLEFLEESIQGFQRSTIELKHLCLEYMTPWLKNLVKFCKSNDDSKKLKVSQILDKLINLTIDQKEMYPSVQAKIWGSIGQIPELIDMVLDNFLHKSITYGLGSPQVEIMADTAVALASANVQLVSKKVITRICRVMDKSCTNPTQYLEQHMMWDDIAILGRYLLMLSFNNCLDVATSVPYLFHTITFLVCSGSLSMRASTHGLVINIIHSLCTCTNPSFSEEAQRVLRLSLDEFSLPKFYLLFGISKVKSAAVTAFRSSCRHPTDKWLGNERVTQPLPADRERLSLPSLEVITDALLEIMEACMRDVPDCEWLNTWTSLARSFAFCYNPALQPRALIVYGCISKSVTDHEVKQLLRILVKALESFNDLILIEALVMCLTRIQPLLRPESPIHRALFWVAISVLQLDEITLYGAGLALLEQNLHTLKSQGCFDKKETIAEVMMKTREKLEWHFKQLDHAVGLSFRSNFHFALVGHLIKGFRHPTPTTVSRTSRVLTMLLGIIAKPLHRDKFEVTPDSVAYLTALVAVSEEVRSRCHVKHALPRWPADLSSSVENGEASGGVQAIGLPLSRRQKSWDILDQSALQFARQHKVPTLQNARVLFKTQRSFSVPTTKDPNNATGIEERQERGSRSSVSNESNVLLDPEVLPDLSIQALVLTVLATLVKYSSDEGETRVLYQYLAEGSVVFPKVFPVIHSLLDQKINNILSVSHDQVVLNSVQNIIQNMLASEDPSQQQLHFLQSCGFGGLWRFAGPFTKYNMMGESSELFVNCLEAMVETCLPGDESAPVPPSPRPYNLSSSLSSLTLGSPTDKAFSSESLDFYDNCPGSVSSLRRASHSKSRAKHRINDSPSH

SEQ ID NO: 18160 - DNA, 3264 bp, DROSOPHILA
cttggccgaccccaatacattcctgctggatcctctgctgtcgctgaagcctgtgcgctttttggaaggcgacctcatccacgacctgctgtccatcttcgtgtccgagaagctgccagcgtacgtgcagttctacgaggatcacagggagtttgtcaactcgcaaggattgaaccatgagcagaacatgaagaagatgcgtctgctgaccttcatgcagctggccgagagcagcccggagatgacattcgaaacgcttaccaaggagctgcagatcaacgaagacgaggtggagcccttcgtcatcgaggtgctgaaaacaaagctggtacgcgcacgactagatcaggccaatcaaaaggtacacatctcatcgacaatgcaccgaacctttggagcaccacaatgggagcagcttcgcgatttgctgcaggcatggaaggagaacctcagcacagtgcgcgagggtctaacgagcgtctcctcggcgcaactggatctggctcgatcccagaagctgatacactaggcgcaccacttccaaaaaattgcactgatgatgaacaaatgctggcctcggggcactggagtgacgacctaaattattttcaagaatgcgagagggctggataacttgaataaatttataagtaaaatcggtagcaaacaagtgttttcataaatgcgaggaatactttaatagcttacaattaagttgtagtgtttttgaaggcatttaacgggtttcattaaaatcctttttaagaattaaagctaaaagaataaaacataaatatactgatattctttaaaagcactaaatattggtaacattcaaaagtaaattcattaaatttgtaagttgaaacttttaccttaaccatttaagaagtgaagtccagaatattgcttaatcaatgtaataaaactgtctagtattaggaaagaaaaccgaaaaatagcctattcgagtatttaagtagataatcctgttgctccattacagctcctcgtgcacgtttgtatgcttacgatccttttccttggggaatccccagaagtacgatggaaaaccgtgcacatctcgttcccttttttcgaatgccgagtaagaggatatacagttgccgataaagtggttcgactgtccgagaatggccaagtccaggtaaggatcatcctccggcagcttgtgcacactgatgcccatgcgactaagggccgtgtttagttcaccaatcatgtgattggagtctgacgccacgaaaactgatttgatttcgttgtccggctgagtttggcgcacgttcttaatggttctctttagctggcggatgatcgcctccttggagggcatgcagagctccgggtagagtgcaccacgttcatttttatagcccaagcactgcggcgaggcaaacagatgctggctatccttgacgtgctcacaggctctcacccaatcgataccgttgcgcagatgaatgcccaaaaaggcaccccgaggcaactgctctcggatgaaatccttagatgcttccctataccgttgactccactgcaagtagcgctgcagcttgcagttctctagctgaacaggaaaactagccggagctccggtgaacgcgagtacgggatatgattctgcaggatatttggtctgccacttggcagcctcgttgctatgatgcacatcaaaatgaagtggcgcatagaactctgaccgcacaaagtctatgtgaaaagtgtcccaaaagggaccaaaaggattgccatccttggcgtggcaattgggcttgtctggatcgttcttctcctgctgaaggctatatcgttccttgtagcaaaatgacactcgctccgattctggccaaatgtcgtcggccaggtgccacatgaaatctgccatggtgatgacgcgatggtattccttcaggggctccacttcaaaatatgtgttgaacggtacctgacgggatcgcagttcacccctacgatactccacccacggcggcaggatcagggtgcgattaagcgccttggcgaaggccaatgatcccaggaagtggtcggcctggttgccaaagcgtcctttgaaaagcgcggtttagttgtcgtttttcggttgcttccaagtgaaacttacccatacacggacagtaggtgaggtagccattgggatcgccccccaattgggcacatgttgagcttattaatagtaaaattaagtttacgaagcgaagcttcattttgagccactgcattctgccggcttcgattttctttgaccaggtggcaactctgtctctttgccagattacaaaatgtttggaatgcttttgtttatgatgtgatataaatataattgcaaacataaatatatatttgaaaatttatgaaattatattgtgaaattattttttaattttattgtgagactttcttactatgggctaaaaagctcagatctggcaacctattattttctaatcagatgttattgcttacatgaaactttagaaataattttatttagactttagacaaaatttacaatatataacaatgtatagcctgtgagtatttatgcggatagtgtcttttttgtatttctaagcccaaatgtttcccacagcaaggaggggctccgggctcttaacagtcgaacgagaccagctctcatttgccggcgcaacatttcggaggaggctcccaaacaggatagtccgtttaaatggagaaaaccaattggccagcacacaggaatcaatatatacaatcacggcttgcggcagaaggtacccctaatcctacgcaatccccaaatggtcacatggtacacttgcggacccactgtttatgactccgcgcacctaggtcatgccagcacctatgtcaaggtagacatcctgcagcgcattctccgcgattattttaaaatcaacctggtgacagccatgaacatcacggatgttgacgacaagatcattaagcgggcccagctcgctggactggactggcagaagatggcgcgagcttatgaagcggaatttcgtcaggacatgttgcgtctcaatgttcaggcgccggatgtgcgcagtcatgtgactaccaccatgcctgtcattattcagttcattcagcagctgatagacggaaagcaggcttacgttaccccggataactctgtttactttgatgtctccaaaagcaagaactatggaaagcttcaaaacttaggcctaagcgaggacaaattggacc

SEQ ID NO: 18161 - DNA, 1209 bp, DROSOPHILA
atgcagtggctcaaaatgaagcttcgcttcgtaaacttaattttactattaataagctcaacatgtgcccaattggggggcgatcccaatggctacctcacctactgtccgtgtatgggacgctttggcaaccaggccgaccacttcctgggatcattggccttcgccaaggcgcttaatcgcaccctgatcctgccgccgtgggtggagtatcgtaggggtgaactgcgatcccgtcaggtaccgttcaacacatattttgaagtggagcccctgaaggaataccatcgcgtcatcaccatggcagatttcatgtggcacctggccgacgacatttggccagaatcggagcgagtgtcattttgctacaaggaacgatatagccttcagcaggagaagaacgatccagacaagcccaattgccacgccaaggatggcaatccttttggtcccttttgggacacttttcacatagactttgtgcggtcagagttctatgcgccacttcattttgatgtgcatcatagcaacgaggctgccaagtggcagaccaaatatcctgcagaatcatatcccgtactcgcgttcaccggagctccggctagttttcctgttcagctagagaactgcaagctgcagcgctacttgcagtggagtcaacggtatagggaagcatctaaggatttcatccgagagcagttgcctcggggtgcctttttgggcattcatctgcgcaacggtatcgattgggtgagagcctgtgagcacgtcaaggatagccagcatctgtttgcctcgccgcagtgcttgggctataaaaatgaacgtggtgcactctacccggagctctgcatgccctccaaggaggcgatcatccgccagctaaagagaaccattaagaacgtgcgccaaactcagccggacaacgaaatcaaatcagttttcgtggcgtcagactccaatcacatgattggtgaactaaacacggcccttagtcgcatgggcatcagtgtgcacaagctgccggaggatgatccttacctggacttggccattctcggacagtcgaaccactttatcggcaactgtatatcctcttactcggcattcgaaaaaagggaacgagatgtgcacggttttccatcgtacttctggggattccccaaggaaaaggatcgtaagcatacaaacgtgcacgaggagctgtaa

SEQ ID NO: 18162 - protein, 402 aa, DROSOPHILA
MQWLKMKLRFVNLILLLISSTCAQLGGDPNGYLTYCPCMGRFGNQADHFLGSLAFAKALNRTLILPPWVEYRRGELRSRQVPFNTYFEVEPLKEYHRVITMADFMWHLADDIWPESERVSFCYKERYSLQQEKNDPDKPNCHAKDGNPFGPFWDTFHIDFVRSEFYAPLHFDVHHSNEAAKWQTKYPAESYPVLAFTGAPASFPVQLENCKLQRYLQWSQRYREASKDFIREQLPRGAFLGIHLRNGIDWVRACEHVKDSQHLFASPQCLGYKNERGALYPELCMPSKEAIIRQLKRTIKNVRQTQPDNEIKSVFVASDSNHMIGELNTALSRMGISVHKLPEDDPYLDLAILGQSNHFIGNCISSYSAFEKRERDVHGFPSYFWGFPKEKDRKHTNVHEEL

SEQ ID NO: 18163 - DNA, 4130 bp, DROSOPHILA
cttgactatagcattaaattcacatagttgtagttccttttacagcttaaaatctagagaaaaaaatcaattacatttttaaacaaagcaaggtcttactccaaacattttgtgtaccgcaataagccatctgtcattttaataaataattaagtaaataatagtatcctttactaagttagtagtaaccgtgctttaaacattttcttacagctcgcgatggcaaatcattagcctcactcgtatttccgtagggcatttggcaaacgctcgtgcataaaaactcatttgaaagagtgcctcgcctgcgctggacgacaacgaagggcagcagagacaagaggcgagggtgctcctccgtggctcccatcgtactcatccaccagttccggggaaggcgcgctcaagtgcacattggctgcaggctggaatgcacgggcacagctgctccttcaacgattcgcgtgtcaacaataagcgcaataacttaagcttcattcaatgcggtgagctgcagcccggggccagtgatgaatgcctctccacgtggaggagaccagccagctaattaagcggcaaatggatttcatctggcgaacactaggcacttgtgcttcgctttctccacttgtaaaacacaatctcaacagtttgctttcacattcacttggccaccatcatctatgcgtcatgcaagattttcctacttttgtgctcatctctcaacagttttaacaattgtctttgggtggcgaaagaagtaacgcacagcttaaattaaatgattaataaatcaggacattagcttaaaaaagtcttgtatatctgcagtggtgtatatacgtgaatcacaaacattttgatctacaactttgattatatatacatataaaatgaactatttaagattatatgctaaactaaacaataaattttaatgcacacatttgaacgtgtttggttgactagatagagcagccgttcttccctacatcagccactatttcaggggattggactttaagtagttagccaggataatcatcgcaaaagaagtggtcaggaatatactgcccggtacggaacgccttacaggtaaattgggatcaagttctcgctgagcaaacagctcaatatcagcctcgtacgtctcgtagttgttccagtgcaggcatttctttaccgcataagcccagcgcttgtagagcagctctcgacctagaaaaagaatatatatctatattattgaatgaagtagtatgaggagaaaacgcacatagctcgtgcttagatttggtaataaaagaagggaacatgttatttcgttgcactgacccaaattctacttacgatttttggtagttgttggcgaaaagacatcagtgggcggggtgtacatttttacggcgtgctccagggacaccactttcatcgtcacgcccgcggttatcataacgcccaatccagcaggtgaggtggtctgtggacgctccaacatatagccaataatatctgctatgaactgcaccaaatgcaagttttcggcgtaatcaccgccgaatgtcagcacgggttgcatgctggatcggtcccagttgggtgtatcgcgcttgaacgcctgtagcacttcaaagatctggaacccggtggcctcgtaagcagcttgggtaatgttttccgctgtagtctggctggtaagtcccaagattatgcccctggcatcgtgtcgccagtagggtgcgtacatgccatgaaatgccggcacaaacgtaatctccgacctcttggctgccagtccacactcggcattcagcatggatgaggaacaagaggacgagatcatcgagttctcgccgatgaatgtattcaaagactccaccacattatcattggaattaatctcagtattgatctgtagcttatcccgcagccatgtaaccgtggaaccggcatttgaaatggctccctcgagtgtgtagttagtggccgctttttcgcccagcttgtgcgctatgcccgttatcagtccgtttgcagagtccagcttctccctgcccgtgttaaggagcacgaaacagctgtcgtccagggtacagacattttgcccggccttcacgcagagttggcccaacaaacttgcgggctgctcacccatcatggccgctatgggagtgccatgcaaaggaccctccagcacatagccgaagatttcggagttggatcgtatgcgtggcagtatgttcaggggcaatcgaaagaactggcagagtttaggatcccactgctctgtggacacgttcataagggaagtgtagtgggcattggtaatgtcagtagagtgcacacccatctcaacgccgccggttaggttccacagaagccaggagtccaaggtgccgaataagcacttgttctcctcaatggcagtggctacggcaggaacgtgatccattagccaacggatctttagggcactgaaacagctgctcaggggcaagccactgcgatacctcacgtagtccacattgtgccggacattatggagcagggtctttaggatgggagtgctacggcaatctgaccatccgatggcattgtgcagtggctgtcccgtctccaaattccataacaccgaggtgccccgctgatttacgataccgatggcaataatatcacgtggattgatctctagtataaccaggttcttataggcggtctgcaaatgtagtcagattagttgccgcatgatgatataacccggcgattaacaacctctatgcactcctgtgtgttcttccatatctccgacggatcgtactccatccagcccgcctggtggacaatctgtcgcagcttcagctcatggtaggccaggacctcggcatttttcgttgagtatatctatgaaaatagaatctgagtcagcggccgttttcggctttaggaccttctcaccagaaagcggcagtgggtgctgctcacgcaggcgacgccgatgagtgctccgaatctcccgtaacgaccgttggacatctttggcctgatgggtgtccacggacacgtgcttaatggtgttaaggctcgctagccgagcaaaataagcaagtcgtgttttgttgttgtcgctttttggaacgccaattgtctagtgatgtaaaaattcattttttcatcgaaaatcgatgctagctatcgatttcttagcgaatacgctaaccacaggttggagtacaattccgatcgagagtaattaatctgaccgtgggcctaggtattacaataaattcgacgcttcaaataccctttattatgtaaaacttgcaatttactaatttaaaaattgatttaaaagagcttatatttaatatggcttattataaatgcctggaatagatgtaatatctttgatgttaaagctttgatttatctattaatttatgaataaagacatttgtcacacttcaggcaactctaagaacaccctgtaagactggcatttttggctttgcacaatctggtcacacctatacttttccgggcccttctctccagaaagcaaaatagaaacaaattttccatatttcatgctaaattggcacagatccgtactactatgctcatgagtcgagcgctttgccggagctggctaccccaggtggcgtaagtaagcaggcggtgacggagttccgtatccggagtaaccccacgtaaacttacagccgcagatgtcatgctaatgtgaatgtgccaatcctgcggataaactctggtcatccggcggcgaggtcatgtcggcagattcacagcaaccgaaaacagagcagcaacctgaagccgacgactggggagcctgcggcagcggagcagaacaccccggtgccggtgaacaatgtgatcaaggcggtggccttcacgggagcagtaagatttaatcatgaccagcacttgtacggggatctcatatagtccctgattcacgcttgtagtttacggtcggctgctttgcgggtgccaccatcctggagtacgagaacacacgtagcctaatcctagaaaaggctcgccaggcgagattcggttggtggcagagtcgttcgctggcggacagggattactggacacagatcaaa

SEQ ID NO: 18164 - DNA, 1888 bp, DROSOPHILA
aaaagcgacaacaacaaaacacgacttgcttattttgctcggctagcgagccttaacaccattaagcacgtgtccgtggacacccatcaggccaaagatgtccaacggtcgttacgggagattcggagcactcatcggcgtcgcctgcgtgagcagcacccactgccgctttctgatatactcaacgaaaaatgccgaggtcctggcctaccatgagctgaagctgcgacagattgtccaccaggcgggctggatggagtacgatccgtcggagatatggaagaacacacaggagtgcatagagaccgcctataagaacctggttatactagagatcaatccacgtgatattattgccatcggtatcgtaaatcagcggggcacctcggtgttatggaatttggagacgggacagccactgcacaatgccatcggatggtcagattgccgtagcactcccatcctaaagaccctgctccataatgtccggcacaatgtggactacgtgaggtatcgcagtggcttgcccctgagcagctgtttcagtgccctaaagatccgttggctaatggatcacgttcctgccgtagccactgccattgaggagaacaagtgcttattcggcaccttggactcctggcttctgtggaacctaaccggcggcgttgagatgggtgtgcactctactgacattaccaatgcccactacacttcccttatgaacgtgtccacagagcagtgggatcctaaactctgccagttctttcgattgcccctgaacatactgccacgcatacgatccaactccgaaatcttcggctatgtgctggagggtcctttgcatggcactcccatagcggccatgatgggtgagcagcccgcaagtttgttgggccaactctgcgtgaaggccgggcaaaatgtctgtaccctggacgacagctgtttcgtgctccttaacacgggcagggagaagctggactctgcaaacggactgataacgggcatagcgcacaagctgggcgaaaaagcggccactaactacacactcgagggagccatttcaaatgccggttccacggttacatggctgcgggataagctacagatcaatactgagattaattccaatgataatgtggtggagtctttgaatacattcatcggcgagaactcgatgatctcgtcctcttgttcctcatccatgctgaatgccgagtgtggactggcagccaagaggtcggagattacgtttgtgccggcatttcatggcatgtacgcaccctactggcgacacgatgccaggggcataatcttgggacttaccagccagactacagcggaaaacattacccaagctgcttacgaggccaccgggttccagatctttgaagtgctacaggcgttcaagcgcgatacacccaactgggaccgatccagcatgcaacccgtgctgacattcggcggtgattacgccgaaaacttgcatttggtgcagttcatagcagatattattggctatatgttggagcgtccacagaccacctcacctgctggattgggcgttatgataaccgcgggcgtgacgatgaaagtggtgtccctggagcacgccgtaaaaatgtacaccccgcccactgatgtcttttcgccaacaactaccaaaaatcgtcgagagctgctctacaagcgctgggcttatgcggtaaagaaatgcctgcactggaacaactacgagacgtacgaggctgatattgagctgtttgctcagcgagaacttgatcccaatttacctgtaaggcgttccgtaccgggcagtatattcctgaccacttcttttgcgatgattatcctggctaactacttaaagtccaatcccctgaaatag

SEQ ID NO: 18165 - protein, 596 aa, DROSOPHILA
MSNGRYGRFGALIGVACVSSTHCRFLIYSTKNAEVLAYHELKLRQIVHQAGWMEYDPSEIWKNTQECIETAYKNLVILEINPRDIIAIGIVNQRGTSVLWNLETGQPLHNAIGWSDCRSTPILKTLLHNVRHNVDYVRYRSGLPLSSCFSALKIRWLMDHVPAVATAIEENKCLFGTLDSWLLWNLTGGVEMGVHSTDITNAHYTSLMNVSTEQWDPKLCQFFRLPLNILPRIRSNSEIFGYVLEGPLHGTPIAAMMGEQPASLLGQLCVKAGQNVCTLDDSCFVLLNTGREKLDSANGLITGIAHKLGEKAATNYTLEGAISNAGSTVTWLRDKLQINTEINSNDNVVESLNTFIGENSMISSSCSSSMLNAECGLAAKRSEITFVPAFHGMYAPYWRHDARGIILGLTSQTTAENITQAAYEATGFQIFEVLQAFKRDTPNWDRSSMQPVLTFGGDYAENLHLVQFIADIIGYMLERPQTTSPAGLGVMITAGVTMKVVSLEHAVKMYTPPTDVFSPTTTKNRRELLYKRWAYAVKKCLHWNNYETYEADIELFAQRELDPNLPVRRSVPGSIFLTTSFAMIILANYLKSNPLK

SEQ ID NO: 18166 - DNA, 3956 bp, DROSOPHILA
tgcttgatgttacgcgtttcctttgaggaggaactactgccaggcttggatcctggagaggatttgggcttatcctcccgtccaatttcgcccaatcttagcttcttgcccgatttggtggcgttggcaagctgctgaaactgacggaacttaaaggacacctgctgctcatcctttttcacaggcggattgttcgttactttggaaagtctgaaatgtgaaatggtgcagatattagtttagctgcctttttcgactgacttgccactatgaacaaacttcttctccttctgttccagctgcttgaggggatcacggacgccgtggtgcttgcgcacgggaatctttcgtttccgagccatttattttgggttttggttcaatttttgtaaaacaaactcgtggtatcgacagcatgggttaaaatactaagcgcgatgcatgctgacaaataccaaaacaaaccataaatataccaaatcgattaaagcttggactcaaaccattggcgcccagaattacaaatgaaatattaaagttaaatatatattagattaaatatataaatgtattttacactatgtattgtattaagtagtcttcatattcccctattttataatatacatttttaataaagatttatatgctgtaatgagaaaagtattttattgcaagtggtaaaatttactgtttgcagtaaaattaaatatttaaagtcacgaatttgtcttaatttattgttttattagtttataagcaacgacaaaatgaagaataagtctgaaacggcactttcgaactgaatacgtatgatttaaatgtacatatgcatattatgtacgcaaattaatttcattataaagctacaaataatttagctgaagtgaaattttttttgattgcaaatggcaatgaatgaataagtatctggatattaattaattgtccgttcttataaagaacatacattaatttttgaccaaaatacgttaacaatttaaagtatgtacgccgaggcggcagtaggtgtaacatcattatcatcgctgaagttcagcaggtaatcatcgtcaaaattgttgtggggcgagctgaatcgaagtgattgatcatcaaagttgttgaatgtggacgacggatgcttaaagtaatccggcattggttggctcattgggaactcctcctcctccaattttagtcgcttgcaaggcggcgcctcgttttcatcgcgattgctaccatagttcataaactgggttgcagtaaaacgattaagagtgcccttggaggtgctgggtatatcgtcgctggcccaggaagatatgtttttgaagggagagagagtgtcgactctaattatttgtggtttatcggaaatttcattggatagctgctcatcagtcttcgggttttcgccgatttttacttgtttggccgcatcagccggctcctcctctcctgaagcctcccctccggattccttgtcatccgatacggattcctcgacttctgagccagatttctcatcatatctatcctgttctagatgcaaaacctcttctgacttttctacttttacctcctgctcaaatccttcatctttcagcgccatttcgaattcttcttctgatatttcctcaaaatcttcgtctgtggcctccatttcgtcactgtcctcttctaattccgcatttgggacacctgcctcttctgaaggagaaagccaatcggtcttctcaaatttctcctcttcgatatggcttatctctggatagggagaaaaacgcacttgctttgttggcgagttggaaatggcaacagactcgacctccttgcatttgatcaaaatggatcgcagaggagtctccagcttcttagtagtgatctctctattcacgctcgtcatggatttattgtcatctggtctgatattcttaaagatgaagttgttgaggaaatccgaagcggactgaaatggtgaaatggtgctagcggatggaacaccagccaaacttggttcagcgcccttagtgacacccgttttaatcaaattccttttttgcaactgaaaaacggaaaagttattcacttggaatggatatttcgcagctactcacctcttccttcaattcgtttatcagctttcccatctgtaaaacgctgactatcttcttattaagcttatccgtcatacttctcagcgtaattgtccactcgcgatccgactggtccagttggtcgtccactgaggctagctccttatctgcctctttttttaaggcttgctcttttcggaattcctggactgaaatagaagctacttgagaatcatttaaataacacaaatgaacttatactatcacatagggtaaaaaatattaaacaaaatgttttttattgtttatgattatatagcattcaaatggattccgtattcaataatacctcatacaaaatcttaccgatgctgcgcgattcgaggattgtgttctgctgattctcttgctcggccaaatcctcctgcagcttaattttgcgctggaactcctgctccttgcgatgcaccgtgtagtagaggatgtcctgcagcccggccatttcgagcagctcctcaattcgcgtgatctggaacatacagtcctgtatcatggtgttggcctgtgccataccggcaccgttatcctccactaccaaggcgcactgcttgaccaaggtcaggtcgaatagcacctgctccaaacgcggccctacaactgaacaagcagaaacatgtatgtataaatcttacttggagattcgcgcattatgcccactcactctgctcctcgacgatcaattctttccttttcttgagttccttctcgagctgcgccattttggtatcttttggccaattttgccccataaattctttgacaagtggatatttttccatattttgtccgttcaatgtttccccccgataagcttacaagtttgcgcgttcagtaatttatcggatatcgaatgctaaggcacagcgatcattgttgaaaagtgtcatagatactgaagtcacagcgatatatatcgcttactgttttagaaaacttattttaaaaaggaataaaaaaatgtaacgtaccgctgaatattaatttaattacaagttttatttgtttaagcttttttttattaatgttgtacaagatttgtagagatttgctcatctctgacgacaagtgccagtgttggcaaacgctccgccgaaaatcagctgtaagcggtgcttgttaaaaaaaaactgacagcagccgacggacttcacataacataagagcaaattttcagccttttcattattttggaaacgccagaatgctgacaaactgtgcctccaaaacactggccgccgtggtgagtagcgcagccatccaaactgtccagtaattcgcggtgtcaaccagggaaggcaacctgttccccgagttatataattggcgacaggaaaacaataacattaaggatatgtgttgttatttgcagcgcgccaacatccgggcaattgccaccagcagtgcccgggccagcgacaatctgttcgtccatcgcgacacaccggaggataatcccaacatcccgttcgagttcacggcggagaacaagaagcgcgtggaggccatactcagcatctatccggaggggcacaagcgcggcgccatgatcccgctgcttgatctggcacagcgccagtacggctggctgccaatctctgccatgcacaaggtggccgagattctccagttgcccaatatgcgcgtctacgaggtggccactttctatacgatgttcatgcgcaagcccactggcaagtatcacatccaggtgtgcaccaccacaccatgctggctccgcggatcggacgacatcctggagacctgcaagaagcagctgggcatcggcgtcggcgacac

SEQ ID NO: 18167 - DNA, 1611 bp, DROSOPHILA
acattgaacggacaaaatatggaaaaatatccacttgtcaaagaatttatggggcaaaattggccaaaagataccaaaatggcgcagctcgagaaggaactcaagaaaaggaaagaattgatcgtcgaggagcagattgtagggccgcgtttggagcaggtgctattcgacctgaccttggtcaagcagtgcgccttggtagtggaggataacggtgccggtatggcacaggccaacaccatgatacaggactgtatgttccagatcacgcgaattgaggagctgctcgaaatggccgggctgcaggacatcctctactacacggtgcatcgcaaggagcaggagttccagcgcaaaattaagctgcaggaggatttggccgagcaagagaatcagcagaacacaatcctcgaatcgcgcagcatcgtccaggaattccgaaaagagcaagccttaaaaaaagaggcagataaggagctagcctcagtggacgaccaactggaccagtcggatcgcgagtggacaattacgctgagaagtatgacggataagcttaataagaagatagtcagcgttttacagatgggaaagctgataaacgaattgaaggaagagttgcaaaaaaggaatttgattaaaacgggtgtcactaagggcgctgaaccaagtttggctggtgttccatccgctagcaccatttcaccatttcagtccgcttcggatttcctcaacaacttcatctttaagaatatcagaccagatgacaataaatccatgacgagcgtgaatagagagatcactactaagaagctggagactcctctgcgatccattttgatcaaatgcaaggaggtcgagtctgttgccatttccaactcgccaacaaagcaagtgcgtttttctccctatccagagataagccatatcgaagaggagaaatttgagaagaccgattggctttctccttcagaagaggcaggtgtcccaaatgcggaattagaagaggacaatgaaggatttgagcaggaggtaaaagtagaaaagtcagaagaggttttgcatctagaacaggatagatatgatgagaaatctggctcagaagtcgaggaatccgtatcggatgacaaggaatccggaggggaggcttcaggagaggaggagccggctgatgcggccaaacaagtaaaaatcggcgaaaacccgaagactgatgagcagctatccaatgaaatttccgataaaccacaaataattagagtcgacactctctctcccttcaaaaacatatcttcctgggccagcgacgatatacccagcacctccaagggcactcttaatcgttttactgcaacccagtttatgaactatggtagcaatcgcgatgaaaacgaggcgccgccttgcaagcgactaaaattggaggaggaggagttcccaatgagccaaccaatgccggattactttaagcatccgtcgtccacattcaacaactttgatgatcaatcacttcgattcagctcgccccacaacaattttgacgatgattacctgctgaacttcagcgatgataatgatgttacacctactgccgcctcggcgtacatactttaa

SEQ ID NO: 18168 - protein, 510 aa, DROSOPHILA
MAQLEKELKKRKELIVEEQIVGPRLEQVLFDLTLVKQCALVVEDNGAGMAQANTMIQDCMFQITRIEELLEMAGLQDILYYTVHRKEQEFQRKIKLQEDLAEQENQQNTILESRSIVQEFRKEQALKKEADKELASVDDQLDQSDREWTITLRSMTDKLNKKIVSVLQMGKLINELKEELQKRNLIKTGVTKGAEPSLAGVPSASTISPFQSASDFLNNFIFKNIRPDDNKSMTSVNREITTKKLETPLRSILIKCKEVESVAISNSPTKQVRFSPYPEISHIEEEKFEKTDWLSPSEEAGVPNAELEEDNEGFEQEVKVEKSEEVLHLEQDRYDEKSGSEVEESVSDDKESGGEASGEEEPADAAKQVKIGENPKTDEQLSNEISDKPQIIRVDTLSPFKNISSWASDDIPSTSKGTLNRFTATQFMNYGSNRDENEAPPCKRLKLEEEEFPMSQPMPDYFKHPSSTFNNFDDQSLRFSSPHNNFDDDYLLNFSDDNDVTPTAASAYIL

SEQ ID NO: 18169 - DNA, 3567 bp, DROSOPHILA
atccaccgcctctccattgcctccgaataaatgctgagcctggcgaatgtaaattcaagatgattaataattataaaatatagctactaaataattccccaccggaaggaattgatgatgaactggaagtacaaggccggtgcgaggcccttttggagccccgtaatgccatcatttttggccaccgtaatgaaggcattgacaatccccttgtagggctccacataggtaccccgtgccgccagctcgccctgcagctggatccgtgtcttgatcacctcgatgggattggtgaagaaggtggcccccacggaggccaggccgcccagaacaaaatccgatgtagccatgtaatcacgagttctgctgaggatagtggttgactagtaacggttgtaccgcctgctgcggaatctctgtggctctaggaagccgcacgctgcgtgtgtgtcgtgtatttcataattctccgccccgattagctggcattactcctgctcttctcgcccgttatacaaatataatataaatttggcgagcaatataacttagtagcagcggagttgccagactgtcgccaaattaacaatttaacaaaaatcgtgtcattttgcttaactgtaaagtgataaatgtaaaataaataactgctggatggtaaatttaaaattcaggagaaacgggttttagaacgttagtaacggtacggctaagaagtcacttagtgacttatatgtttcagaagatccgggaacactacttttgcccacatttattgttagctagagtcccgtcaaaacatttataaaattgatttttatgtcagcattaatacacttgcaaagccataactattttaattttattgaactgaatgaatttcagaggaatattatatattttaagtggccacgttaacgtcatcttaatttaattcggtcaattgtttgagagcatcgctattagcgggaaacggaccaggccggcagcactggtcgctctctttcctttcgagctgtcaaagcgccgaagacgtgtgtgcgtgttattttcagctgaatttgtttaaaaaagtggaataacatttaacaaaaccatgacttcgcatccggttttcatagacctgtccctggacgagcaggtagagtgaaagtgccctgttttagccatgaattcgggcggcgccttgcccgaattgaggttatgtcttcctcttgctgcaaaacaaaactaatattattcgcaatttattaaaaggtgcaagagctgcgcaagtatttcaagaagctgggagccgaaatctcatcggagaagtccaataaaggtgtggaggatgatttgcacaagatcatcggcgtctgcgacgtttgctttaaggatggtgagccctcgcagattgatggaattctaaacagcattgtgtccatcatgatcacggtgagtaatacagaatacaatattagcaacaaaaaataaccttcaatatttcagatacccctggatcgcggtgagaacattgtcctggcctactgcgagaagatgaccaaggctcccaatcttccattgggcaaggtgtgccttcagtcgttgtggcgtctgttcaacaacctggacaccgcctctcccttacgctaccatgtgtactaccacctggtccaggtggccaagcagtgcgaacaggtgctggaggtcttctcaggtgtggatcagctcaaatcccagtttgccaactgcccaccttcgtcggaacagatgcagaagctgtaccgcctgctgcacgacgtgaccaaggacaccaacctggagctgtcttccaaggttatgattgagctgctgggcacctacacggcggacaatgcttgtgttgcccgtgaggatgccatgaagtgcattgtgactgccttggccgaccccaatacattcctgctggatcctctgctgtcgctgaagcctgtgcgctttttggaaggcgacctcatccacgacctgctgtccatcttcgtgtccgagaagctgccagcgtacgtgcagttctacgaggatcacagggagtttgtcaactcgcaaggattgaaccatgagcagaacatgaagaagatgcgtctgctgaccttcatgcagctggccgagagcagcccggagatgacattcgaaacgcttaccaaggagctgcagatcaacgaagacgaggtggagcccttcgtcatcgaggtgctgaaaacaaagctggtacgcgcacgactagatcaggccaatcaaaaggtacacatctcatcgacaatgcaccgaacctttggagcaccacaatgggagcagcttcgcgatttgctgcaggcatggaaggagaacctcagcacagtgcgcgagggtctaacgagcgtctcctcggcgcaactggatctggctcgatcccagaagctgatacactaggcgcaccacttccaaaaaattgcactgatgatgaacaaatgctggcctcggggcactggagtgacgacctaaattattttcaagaatgcgagagggctggataacttgaataaatttataagtaaaatcggtagcaaacaagtgttttcataaatgcgaggaatactttaatagcttacaattaagttgtagtgtttttgaaggcatttaacgggtttcattaaaatcctttttaagaattaaagctaaaagaataaaacataaatatactgatattctttaaaagcactaaatattggtaacattcaaaagtaaattcattaaatttgtaagttgaaacttttaccttaaccatttaagaagtgaagtccagaatattgcttaatcaatgtaataaaactgtctagtattaggaaagaaaaccgaaaaatagcctattcgagtatttaagtagataatcctgttgctccattacagctcctcgtgcacgtttgtatgcttacgatccttttccttggggaatccccagaagtacgatggaaaaccgtgcacatctcgttcccttttttcgaatgccgagtaagaggatatacagttgccgataaagtggttcgactgtccgagaatggccaagtccaggtaaggatcatcctccggcagcttgtgcacactgatgcccatgcgactaagggccgtgtttagttcaccaatcatgtgattggagtctgacgccacgaaaactgatttgatttcgttgtccggctgagtttggcgcacgttcttaatggttctctttagctggcggatgatcgcctccttggagggcatgcagagctccgggtagagtgcaccacgttcatttttatagcccaagcactgcggcgaggcaaacagatgctggctatccttgacgtgctcacaggctctcacccaatcgataccgttgcgcagatgaatgcccaaaaaggcaccccgaggcaactgctctcggatgaaatccttagatgcttccctataccgttgactccactgcaagtagcgctgcagcttgcagttctctagctgaacaggaaaactagccggagctccggtgaacgcgagtacgggatatgattctgcaggatatttggtctgcca

SEQ ID NO: 18170 - DNA, 1397 bp, DROSOPHILA
ctctttcctttcgagctgtcaaagcgccgaagacgtgtgtgcgtgttattttcagctgaatttgtttaaaaaagtggaataacatttaacaaaaccatgacttcgcatccggttttcatagacctgtccctggacgagcaggtgcaagagctgcgcaagtatttcaagaagctgggagccgaaatctcatcggagaagtccaataaaggtgtggaggatgatttgcacaagatcatcggcgtctgcgacgtttgctttaaggatggtgagccctcgcagattgatggaattctaaacagcattgtgtccatcatgatcacgatacccctggatcgcggtgagaacattgtcctggcctactgcgagaagatgaccaaggctcccaatcttccattgggcaaggtgtgccttcagtcgttgtggcgtctgttcaacaacctggacaccgcctctcccttacgctaccatgtgtactaccacctggtccaggtggccaagcagtgcgaacaggtgctggaggtcttctcaggtgtggatcagctcaaatcccagtttgccaactgcccaccttcgtcggaacagatgcagaagctgtaccgcctgctgcacgacgtgaccaaggacaccaacctggagctgtcttccaaggttatgattgagctgctgggcacctacacggcggacaatgcttgtgttgcccgtgaggatgccatgaagtgcattgtgactgccttggccgaccccaatacattcctgctggatcctctgctgtcgctgaagcctgtgcgctttttggaaggcgacctcatccacgacctgctgtccatcttcgtgtccgagaagctgccagcgtacgtgcagttctacgaggatcacagggagtttgtcaactcgcaaggattgaaccatgagcagaacatgaagaagatgcgtctgctgaccttcatgcagctggccgagagcagcccggagatgacattcgaaacgcttaccaaggagctgcagatcaacgaagacgaggtggagcccttcgtcatcgaggtgctgaaaacaaagctggtacgcgcacgactagatcaggccaatcaaaaggtacacatctcatcgacaatgcaccgaacctttggagcaccacaatgggagcagcttcgcgatttgctgcaggcatggaaggagaacctcagcacagtgcgcgagggtctaacgagcgtctcctcggcgcaactggatctggctcgatcccagaagctgatacactaggcgcaccacttccaaaaaattgcactgatgatgaacaaatgctggcctcggggcactggagtgacgacctaaattattttcaagaatgcgagagggctggataacttgaataaatttataagtaaaatcggtagcaa

SEQ ID NO: 18171 - protein, 387 aa, DROSOPHILA
MTSHPVFIDLSLDEQVQELRKYFKKLGAEISSEKSNKGVEDDLHKIIGVCDVCFKDGEPSQIDGILNSIVSIMITIPLDRGENIVLAYCEKMTKAPNLPLGKVCLQSLWRLFNNLDTASPLRYHVYYHLVQVAKQCEQVLEVFSGVDQLKSQFANCPPSSEQMQKLYRLLHDVTKDTNLELSSKVMIELLGTYTADNACVAREDAMKCIVTALADPNTFLLDPLLSLKPVRFLEGDLIHDLLSIFVSEKLPAYVQFYEDHREFVNSQGLNHEQNMKKMRLLTFMQLAESSPEMTFETLTKELQINEDEVEPFVIEVLKTKLVRARLDQANQKVHISSTMHRTFGAPQWEQLRDLLQAWKENLSTVREGLTSVSSAQLDLARSQKLIH

SEQ ID NO: 18172 - DNA, 2854 bp, DROSOPHILA
atatatgtggcccaggcgatcgatgcgaggattgctgaaaagcaggaacttttgcagagtgacgatcccgtcatgtgcacctcaatctttaatctgttgccgagcagttttcacacctatcgaaagtaacgaccactgcaggcaagaaccgaaaataggcagaaggtagctaggtaaaggttgtttctcaaccccttgctgcctctaatcaatataattttgatctaatcacttgcaataaagaaaattacactacttagcagtgtttaatgtttttttttcgatcaatgaataggaaatggggatataaatgctggaaagattgacacagtgaaagattctaggaaaaggtgtttaatcgcttttgattatatatcaaaattaaggttataaattaaagatatcgaatttggattgacaactgctgacgttaagcgcaatgcagggaatgccccgatttgtgatgacgtgataaatgcactcaacttctgattcataaacaccaaattattgtgagattaaatttcgccatttgtatagtagcgaaaataagaaagatcattgtggtagtggcaatcttttaaatcaaatttataaggtttgtttccaattcctttggattctagtttttgagatcatgatgttcatacgaacaataagacagactggctagaccgatgtcgcgataaaggcgcgttcaaaacgcgtccgaaacgcgtcgaaaacgcgcgagctttttcgacattcttaatttgtaaaaattttaaacgtatttagttgttgttgttgtttcattaaatgccttaatgaacatcaactgtaataaatgtaataaaaattcaaatggcgctaaataatataatataatcatttttatgaaaaagaaacaaaaagaaaataatttgtttgacattagtgttttacaaattgccaacagatacagcatttgcttctggctttcaaaaattgttttcgttttaaaaatttgaagttctgcaaaatgtccgaaaagcggaagctccttcagcgctacatgcggaacctgagcgacctacaggatgagctgaagcgaaaagagctggagaagaagatgaaggaactggaaatgttgcaggcgaagctagctcgtcgccaggagcaatctggcaccaagtgcgctggcggtaagatcaagaacttgcgccagaagaatcttcgaaaggtactgggaaagtatatgatgaccttggagggatttctatgcgagctagcacgcagggaggcgcgtctaaatggcgacaggggtcgggctagtgaatccgaaaacctgccacatccacagatgttggaggagtacacagtagcgttctgtgctgttggtaaggcttggctataatggtgaatcctctgccattggtaatcaaaccgtaatctccaggtgaggatggccgggagctgctagaggcggctctttctgcccgtcgatgtgcctatgcgccctacagcaaattcaaagtgggagcagccttccgtgcgaagtgcggcaggatctacgcgggctgcaacatcgagaacgtagctttcactccaggcaattgtgcggagcgttgtgccctggccaagggtatcagcgagggcgagaagaagtatacggcgggtgctgtggtagcctatcacccagatgggtttaccacaccttgcggagtctgccggcagttcattttggagttcatccaaaatgatattcctatctacattgccaaggctccgccgccggagcaagagaactgcattccttcaattccggacgaagctgaagtgctggtcacgtccgcctaccatctgcttccccacagctttaactcatttgaatgaaattttcatctaaataatatccagaatttatttaatgcaataaaattattcgttctaatgtcaataagtattgcaaataatttaagttagcgatctgattaacttgacaaaaagtcaaaacaatgtgtagagaactaaacgtatttgataactggttctcccgatccgtagatgccgtattcgcttttctccgcaaacggagtgacttcctcgtgcacgagtatgggcttaacttctggatcgaattcaacccttcgaaattgtggatccgtgaaattagcgcgcacctcggtgaccattcccgaatgcggcactcgtttggtgaggttttgaaactcacagcgtcgctttgggcaattatgcgtattaccctcgtcacacattgtaggatcctcttcgcgggacactttctggatgggcggcatcttctccgtccaattccagtatgtaatattgtcgtgggcagctactccgccacacaagtcctcgggaccccagcgcacatacgacagattgtatgtggtggaggagggatcaaggtacttgctaaaggacgcctccgaacggtcgatgactagcttggtggctaccaccggagtgggcattgttacaggcaatatttcctgttcctccggcagctccttaagtacatacgactcatgactgacactagaaatgggcttcatctttcgctttacaaagcgaagggaaccctcctcaaatggtttcatatactgtgttttcatgttgagcgagggatttctaagtgcgttgggatcgttatactggaacatcatggtcacgttttagtttggtgcaacatatctcagcatatcaatcaactcacctgccacacatagttggccatgcactcagaagtcggcttctcggacagcagcggatcttttacataaatacccttatccgtaaacttggcgttcagcttgttacccattctcaagtctgtaatgtggcgatgccctcgatagtacgaggtcct

SEQ ID NO: 18173 - DNA, 795 bp, DROSOPHILA
atgtccgaaaagcggaagctccttcagcgctacatgcggaacctgagcgacctacaggatgagctgaagcgaaaagagctggagaagaagatgaaggaactggaaatgttgcaggcgaagctagctcgtcgccaggagcaatctggcaccaagtgcgctggcggtaagatcaagaacttgcgccagaagaatcttcgaaaggtactgggaaagtatatgatgaccttggagggatttctatgcgagctagcacgcagggaggcgcgtctaaatggcgacaggggtcgggctagtgaatccgaaaacctgccacatccacagatgttggaggagtacacagtagcgttctgtgctgttggtgaggatggccgggagctgctagaggcggctctttctgcccgtcgatgtgcctatgcgccctacagcaaattcaaagtgggagcagccttccgtgcgaagtgcggcaggatctacgcgggctgcaacatcgagaacgtagctttcactccaggcaattgtgcggagcgttgtgccctggccaagggtatcagcgagggcgagaagaagtatacggcgggtgctgtggtagcctatcacccagatgggtttaccacaccttgcggagtctgccggcagttcattttggagttcatccaaaatgatattcctatctacattgccaaggctccgccgccggagcaagagaactgcattccttcaattccggacgaagctgaagtgctggtcacgtccgcctaccatctgcttccccacagctttaactcatttgaatga

SEQ ID NO: 18174 - protein, 234 aa, DROSOPHILA
MKELEMLQAKLARRQEQSGTKCAGGKIKNLRQKNLRKVLGKYMMTLEGFLCELARREARLNGDRGRASESENLPHPQMLEEYTVAFCAVGEDGRELLEAALSARRCAYAPYSKFKVGAAFRAKCGRIYAGCNIENVAFTPGNCAERCALAKGISEGEKKYTAGAVVAYHPDGFTTPCGVCRQFILEFIQNDIPIYIAKAPPPEQENCIPSIPDEAEVLVTSAYHLLPHSFNSFE

SEQ ID NO: 18175 - DNA, 5494 bp, DROSOPHILA
aggaaacagaggtgtttgcccaactttattgtattttaattacgctcctcacagcgactaaatatagttaggtaaagcgaatggaaaatgtactttgtcgcgccataattgcgaggttttaagtgcttttcaggcatttaatactcgtacttaatgactcttgatagttgcatcttgaactggcgtttttagcaaacaattcgccatctaaataatgtgaaaatgttaaatgcaaaaacggaaaactgaaaacagaaaacagtggggcctgtggtggcgtttttcatctacaaacagaaaacagtgcttcaaaaaatagtaattataatacctgataccgtaaacatttgcatattgttgtaagctgtgcgaaaacacaacacaacacgagacgagacgagaccgaaagggaaaaaaacactttaaagctgctgtcgagtgttaatcatggtgtaatttattagccagttgacactttttggccgcagttgcggaaaaattcactcgaaatcgggtgtgaattggtggtaatgttgggagtgaaagtgtggctctgaatttaggatttagccccctaacactcattcataaatgcgataataaaagcgtgttaattgcggtgcataaaacatacgattggaacacttaagttctgacaaagttcaggaatggaatttatttgactcgtatgagttgtttgtcaatcattcgaaaataagaacagtttgtcataaaatatgaaaaaaaaacatgtgtaaaacaattgaatcattgaaaaaatcatatgcccatgacttgttgcgaaacaattttaaacaacaatttttccattttaggttttctaaatagaattattgggtagtcataagtctctcccttgcttgcatttatccccatggataaataaattaactcatctcctgatttctcttgcagatcttccgtaacatgctcttgtccaacgaatattgattgggtatatgagcagcttagctcgaaaatggcagccaacaacggtaacaaattctcaatggagcacgattccgagggttgtgatgaggtggactttatagtggccacgcacaacaataacaacgattacgaggatttgggcagcgtgagtcaggcggtgatcaacaccaaagtagctgcagcagcagcaaccgcagcagcagcaacaccaaacaacgaaccaaacagcaatacattgaaaaaagccaaggagcgtcgcaccctcttccatttcggaagcaataagaagctgagtcagagcaagtcacaggagagccaggaggcgggcagcaaggatgctacgccggcgacaactgctgctccattgccgccggtgccaatcggtacgccaccgcgacagcacaagttcgtgaagagcaacagcttggccagattgctgggcaacacctacaatgccaagaagtttgagaagcaggagcaaaagcgtctggcctccggatccgagggcggcaaattcaacacctacagtggaaggcgtggccgtgcgggtccctatttggagcgattcaagcgggtgtccaaggaggacggcgatgtggctggcgaggatgacacggtgagggtcacgaacgtcataaccctgacgacggactcgcgggacttgctctacggcagccggcaggagcatgtgggtcgcactgggggctatgaccagaacgatcagctcacctcgaaggcgtatcgcacgctcacccgcagcttgggcaaactctggaggcgcacacacagcgtggacattagcacacccgatccggagttcaaggtctcgtacctgggcaacgtcctgaccggttgggccaagggtgagtcagacatctaagcacaattggatccatactaatgttgcatccttagcaggtgagggttgtgtggagaaacagctgaatacgctgtggcggaactacacccagcactccaagccggacgtgatcatgcgcctgaaggtgtgcgcctccggcttgaaggccaccacccggcagcacggactcacggagtactgggcccataggatcacctactgttgcgcaccgaagaactatccgcgggtcttctgctggatctaccgccacgagggcaggaagctgaagcacgagctccgctgccatgcggtgctctgcagcaaggagaagattgcccaggacatttgcgatacccttagggtgagtagttcctactgatccgaattctgcaagagtgggacatggctaccaactataaattacgagattatacttaagtggttccatatatgaaatcaaatatatacgcatgactaaccatttatgtttatctatggacttttttcctccaattacgtacaatctctatgcgcgttttgtcatgtcgctttgtttatcaaattgaagtttttctatgagaaattaataaaaataagtctggaaacttccagttgtattaactaatataagcatgctcctcttcttgcagtgattactatttaaaacatgctcaatatattcaaatatatattttatgttgcaggaaaacctggagagcgctttgcgcgaatttaagcgcgagaaaattctgaagcaaaacgctcgcttgagtttggccaacgccgtctacgataatccgagcttgccgcgccgcaagatcatgctaagtgtgggcggcaacaactacagaccgccgctggagcgctccaagtcggcgcccaaactgatggccatcgaggaggccattggcgaggaggagggcgatgagatcgaggacaccaatgagccggagatgatgccgtgctgccagaaggactccctctatccggccatgacgctgggcaggcgtcgctgtcgtcgcggccactccattcggcgaacgggcaagatacagtccttctcgccctgctgcagttcgcacatggcaaaggagttgccgcaggaagagaccaagacgatggcggcggcgggcagttccgccaatgatggctccgattcagacgacttcgagaagctgcttaagttcgatacgactttgagtaatgagttgttgccgtacttcgacatgcagctgcacaagaacagcagccagagcatggtgagcctgagcgaactcaaggaggaggagggtgaaccgctgagcctcctgcccactattaacagcgatcccagcgccgatccagaggcggactacaatgccgaggatcacgatgtgaccgcgcctcgacgcagtggcgtttgcagcgacggcgaggaggactttctggacgatgcggacgaccattatttccggcatgcggccatgctgaccatgctgcaccgcagttcgatgagaaagatgcgggcggccgatcagacgagtcttaagtaccgccatcagacgcagtcatcgatctcctccaacgcgtccagctcgacgacggccagcacttcggcggcagcgggcggaggatccgcccagcagggtctgaccagtccggacagcgacgagggttccatatccagcggctgcgagacggccagcacagtcacaaatgccaaccacgaggagtacaacagcaagcgggttagcgatcccggccagctggagcagtcgccggacttggagctggagcaggcgcaagtgctggagcagatgatgatctaccaaagactggagcagcagctgcgcaagaacagcggcgatgccaccaattacagcagctcgagcagcatcacactgaagcgcagcaattccggcagcgacaagcaggagaggagcgaccatccggatgacgacaacagcgacagcgacgagagcggctacgtggagttccaggagaaggagcgaccgggtcagcagccgctgatcagcgaggcaagcgttacgctggccaagattgcgaccgtcaagccgcaggtaccaccaaagccggctccacgtcgctcgctcagtctcaacgcggtggccaccggcgcctcagcgggctcatccgctggtaaggctccgggcaccgctgtctgagcgaaatgctttaattacaacggaaacccgtctacaaattgttatttctgcacacccgtcagcgaccatagcaaaacacaaagtgcaagaaattgaaatcctagttgtagattagctattagcacctagtcgttaagtcatttgttgttggttcatcgagaggaaaacctaacgatattcgcccatcccccattttccatcccatcatctaaatctgtgccccttgatccaaaaataatgaatttatattgtacgcatttgtaaataaattagtcgccctacgcactgcatgtactatatacatttacacgattgtcattgatgaactgtatcttacttatcaatataaattattatctgaacggtgtgtgtgctgcacagaggaaagtgtgaacaataacaattggttaaattatatatatatgatatcaaaatttgatttatgttacatttagaacgaattatagccctaaaatagaaagaacctaaaccaattttgtactgtttgttctctgtgaccttattgattcgcttgtgattatatcgattccattcccccagaggacaggcattcttgtgcgtttatgaattttaatttcattccaaacttgaggcaattacattggacatttagcagatctatctactggcagattgtgctgctgctgggcagcaagttttgttgacgcaacatataacaaaccgtgccgcggaaatcgcgcagcgaatggtcctgcagctgctgatcgaagacctgttgcatgtggaaacgaatacgaatgtgaataagaaaaccagttgagtgcattcgattacggcgacgattgatcgcggctactcatacttacgccattgtagacgatggtgggaatgaagctcgggctgtactgtttggtcaccagctccgcctgcagctgcaatttggtgcccgtctcgctggacaggcagtggaccacatcggtgagcaggcctgcctcattggcacactgcgtatggaatggtaaaggtatatataatgggtacaatgcacacaatgggcgttaatcagttgggcaaacacagcacaacgagtacgcggaaggtagattacctgatcaatgcgggaataatccggagctagcatctggcacaccacgaatttaacctgcgccgcctggtttgcggtgctgttgatgacgcaactctggaggcgattgcccttgcactcagccggtccgtgctggcagtggaagatggcaccattgcgctccgactgcgattttccgaagggcactaagagtatatcaatgtagtccccgaactcctcgtaaacgggtcctagctgatgcatgaagttcctgctgtccgggcacaaggactcgtaaaggagggtgatgtgcagctaaaaaaggaattattcagtcgaaagataaaaatcatatgatgcctttcaccttaactattaattaggcttcgcattataccagtaattattcattttgggctactgaataattct

SEQ ID NO: 18176 - DNA, 3096 bp, DROSOPHILA
atggcagccaacaacggtaacaaattctcaatggagcacgattccgagggttgtgatgaggtggactttatagtggccacgcacaacaataacaacgattacgaggatttgggcagcgtgagtcaggcggtgatcaacaccaaagtagctgcagcagcagcaaccgcagcagcagcaacaccaaacaacgaaccaaacagcaatacattgaaaaaagccaaggagcgtcgcaccctcttccatttcggaagcaataagaagctgagtcagagcaagtcacaggagagccaggaggcgggcagcaaggatgctacgccggcgacaactgctgctccattgccgccggtgccaatcggtacgccaccgcgacagcacaagttcgtgaagagcaacagcttggccagattgctgggcaacacctacaatgccaagaagtttgagaagcaggagcaaaagcgtctggcctccggatccgagggcggcaaattcaacacctacagtggaaggcgtggccgtgcgggtccctatttggagcgattcaagcgggtgtccaaggaggacggcgatgtggctggcgaggatgacacggtgagggtcacgaacgtcataaccctgacgacggactcgcgggacttgctctacggcagccggcaggagcatgtgggtcgcactgggggctatgaccagaacgatcagctcacctcgaaggcgtatcgcacgctcacccgcagcttgggcaaactctggaggcgcacacacagcgtggacattagcacacccgatccggagttcaaggtctcgtacctgggcaacgtcctgaccggttgggccaagggtgagggttgtgtggagaaacagctgaatacgctgtggcggaactacacccagcactccaagccggacgtgatcatgcgcctgaaggtgtgcgcctccggcttgaaggccaccacccggcagcacggactcacggagtactgggcccataggatcacctactgttgcgcaccgaagaactatccgcgggtcttctgctggatctaccgccacgagggcaggaagctgaagcacgagctccgctgccatgcggtgctctgcagcaaggagaagattgcccaggacatttgcgatacccttagggaaaacctggagagcgctttgcgcgaatttaagcgcgagaaaattctgaagcaaaacgctcgcttgagtttggccaacgccgtctacgataatccgagcttgccgcgccgcaagatcatgctaagtgtgggcggcaacaactacagaccgccgctggagcgctccaagtcggcgcccaaactgatggccatcgaggaggccattggcgaggaggagggcgatgagatcgaggacaccaatgagccggagatgatgccgtgctgccagaaggactccctctatccggccatgacgctgggcaggcgtcgctgtcgtcgcggccactccattcggcgaacgggcaagatacagtccttctcgccctgctgcagttcgcacatggcaaaggagttgccgcaggaagagaccaagacgatggcggcggcgggcagttccgccaatgatggctccgattcagacgacttcgagaagctgcttaagttcgatacgactttgagtaatgagttgttgccgtacttcgacatgcagctgcacaagaacagcagccagagcatggtgagcctgagcgaactcaaggaggaggagggtgaaccgctgagcctcctgcccactattaacagcgatcccagcgccgatccagaggcggactacaatgccgaggatcacgatgtgaccgcgcctcgacgcagtggcgtttgcagcgacggcgaggaggactttctggacgatgcggacgaccattatttccggcatgcggccatgctgaccatgctgcaccgcagttcgatgagaaagatgcgggcggccgatcagacgagtcttaagtaccgccatcagacgcagtcatcgatctcctccaacgcgtccagctcgacgacggccagcacttcggcggcagcgggcggaggatccgcccagcagggtctgaccagtccggacagcgacgagggttccatatccagcggctgcgagacggccagcacagtcacaaatgccaaccacgaggagtacaacagcaagcgggttagcgatcccggccagctggagcagtcgccggacttggagctggagcaggcgcaagtgctggagcagatgatgatctaccaaagactggagcagcagctgcgcaagaacagcggcgatgccaccaattacagcagctcgagcagcatcacactgaagcgcagcaattccggcagcgacaagcaggagaggagcgaccatccggatgacgacaacagcgacagcgacgagagcggctacgtggagttccaggagaaggagcgaccgggtcagcagccgctgatcagcgaggcaagcgttacgctggccaagattgcgaccgtcaagccgcaggtaccaccaaagccggctccacgtcgctcgctcagtctcaacgcggtggccaccggcgcctcagcgggctcatccgctggtaaggctccgggcaccgctgtctgagcgaaatgctttaattacaacggaaacccgtctacaaattgttatttctgcacacccgtcagcgaccatagcaaaacacaaagtgcaagaaattgaaatcctagttgtagattagctattagcacctagtcgttaagtcatttgttgttggttcatcgagaggaaaacctaacgatattcgcccatcccccattttccatcccatcatctaaatctgtgccccttgatccaaaaataatgaatttatattgtacgcatttgtaaataaattagtcgccctacgcactgcatgtactatatacatttacacgattgtcattgatgaactgtatcttacttatcaatataaattattatctgaacggtgtgtgtgctgcacagaggaaagtgtgaacaataacaattggttaaattatatatatatgatatcaaaatttgatttatgttacatttagaacgaattatagccctaaaatagaaagaacctaaaccaatttt

SEQ ID NO: 18177 - protein, 865 aa, DROSOPHILA
MAANNGNKFSMEHDSEGCDEVDFIVATHNNNNDYEDLGSVSQAVINTKVAAAAATAAAATPNNEPNSNTLKKAKERRTLFHFGSNKKLSQSKSQESQEAGSKDATPATTAAPLPPVPIGTPPRQHKFVKSNSLARLLGNTYNAKKFEKQEQKRLASGSEGGKFNTYSGRRGRAGPYLERFKRVSKEDGDVAGEDDTVRVTNVITLTTDSRDLLYGSRQEHVGRTGGYDQNDQLTSKAYRTLTRSLGKLWRRTHSVDISTPDPEFKVSYLGNVLTGWAKGEGCVEKQLNTLWRNYTQHSKPDVIMRLKVCASGLKATTRQHGLTEYWAHRITYCCAPKNYPRVFCWIYRHEGRKLKHELRCHAVLCSKEKIAQDICDTLRENLESALREFKREKILKQNARLSLANAVYDNPSLPRRKIMLSVGGNNYRPPLERSKSAPKLMAIEEAIGEEEGDEIEDTNEPEMMPCCQKDSLYPAMTLGRRRCRRGHSIRRTGKIQSFSPCCSSHMAKELPQEETKTMAAAGSSANDGSDSDDFEKLLKFDTTLSNELLPYFDMQLHKNSSQSMVSLSELKEEEGEPLSLLPTINSDPSADPEADYNAEDHDVTAPRRSGVCSDGEEDFLDDADDHYFRHAAMLTMLHRSSMRKMRAADQTSLKYRHQTQSSISSNASSSTTASTSAAAGGGSAQQGLTSPDSDEGSISSGCETASTVTNANHEEYNSKRVSDPGQLEQSPDLELEQAQVLEQMMIYQRLEQQLRKNSGDATNYSSSSSITLKRSNSGSDKQERSDHPDDDNSDSDESGYVEFQEKERPGQQPLISEASVTLAKIATVKPQVPPKPAPRRSLSLNAVATGASAGSSAGKAPGTAV

SEQ ID NO: 18178 - DNA, 4955 bp, DROSOPHILA
gtatgtttgtcgaggacataacatcatgacaaacattgttggccatctaaaactcattattgactcatttcgctgggccataaagcgccccgaagtatgttgtctttatttttcgttgacagccggcagccatttccaattaaactcaacactgtgccccacaaataagttggggattgctttatatatagatatatgtacatgtagggccattaagacctttgtaaactgcggcaggcatatgcacttaatggctaagcacacactcacaaggacaaattcagggtagacctcgagatatattcgtatctatgtacaccgaatttgcggttttggcaatttgtcgctttatttgcggcttccttagcactttgtttacattccatttgaggagaccgcgccaacaaattgacaagtttcgttggtaaacagtaaggaacccacatttttgtgtaaccttacaccgaaaaataggggaactaaaaataaagtgcttggcgccaaaggcagggcaaccgaaatgccaccatcaattagttgtgataacgattatcgataaaatgtgacacatataattgaaaagggctaacaaccaagggtgtcacaatcaaattactgtactaaataaacggcagggaactaattgagctcaatttatgactaaatatttgatagactagaaatttgatacctgaaactctaaataattgcgaaacgatgttgtgaacttcaaattgccaatttaatgataatataaatatcaatattaatcaaaagcttaatactgtctagaatttagttatcagtataatattttaattatacattttgtttactatactctctaaaaggctaacaacttttgacctgattagattaaaaagcttgtgtgtaaacaaagatatgcgattttcttaggtgatagcaacacaaaactcactgtttacttcgatgacaactatttatttattacgtatacgtttctatttcgtttactttgcagataagaggacgacccactgggacggcagtcaatgtctgattgcgagtggacagtctggaactgggtctcttccgtctttatatgactgataatggccgtctgccctgtccgaaaccacaattgcaacaacagtgcgccacaatggccaagcaacatgagtatttgaaaatttggaaacatatcaagtggcgaaatgaaaagtaaacaaagcgaactgaatattaataaaaaccaagagatttatgcgaaagaacatataacacatgcatatatatatagtaaactggactggacaactgaagaataaacattcaatattcatgcaacggaatcgaagtgccatagtgaatcgcgagtgtttgccattcgttcgctctgtttagtcaatataggtatcacaccacacatatcgccaattatacagatataaaatatatatagagagtaccaccgaggcggagcgacgacaatatgacaatatcgggcggcaatcaacataataacaatgcaaatcgcaaatatgaaaaactcattaagcagccgcagatgcaatttggtagctccgtgaccggcacccaaacggatgtggattcctgccgagatgcggacgcggatgcgaatgctgtccgccaggactttagcaatttcaataagcatttcggcaatggtcatgccatcacggatcgcacaatgctgctgcgtttggaggacgatgtcaccaccgccgccggcattgtcacgtacaagggtaaatcgaatggcaatggaaatgggaatgggaacggaagcatcgggagtatcagtctggatttcaacggtagtcctacctcatcaacgtcaattggcatcgccagcggtagcagcagcaacacccacctggccagtggtggtggcgttggtggaatcggtggctccgagccagccggttggatgtgccattgttgtaatttaattgcacgtcgctgctttggcatcaacgttcgacgatgtgtcctggcgctcctggccattacgatggttagcattttctactacacgcattatgtcgatacgggcgtgtttaatggctgatagaaactatagttgttggctataacatcgccgtgggaacgctgatgctggtaccaggagtaggccctcttcgcaggtgatatcagaatcgtgacgatttttgcatgtggaagcagggcatgacttcgtttgggcacagcctcgccatcgaaataggtagcactcttctcgaacatgaaacgtggcgatcccaactgggtgggcatcggggaactcgtgttgggcagcgattccgatggaaagaagtccatgtaccagtccagaccacgatagtagttgtttccgttgaagaactgaacctcctcaaaggtttcgggactggcgatgttactcgcaatactgccatgcatggataggaatgtgtacaatgcagttgtgcccgttttctgcggtccaattaccaagaacttgggcaacgaatcgcaattcttggtctttgaccagatcttcttgtggcgcacatcgtcacagggatttccccacacgggatccacctcctcgggatgcagccggaaatacatctcggccagctgaactggcggagctgaggccaacttaagattggtccagcactgtaggaacttgatcaccgattggaatgtgtacagagccagacgatccgatccatagttggacatgtgcgtcataaagatgttgatgggattatagacaatggtctggaagagttctccaccctgtatggattcatctagtttatctctaccccccgggtagcgatcgatgtacatggtgtgggtgaatagaccacaagtttgcctcggcaacaccattatgttgcgatgaatgaatcctcttctcaatcgagctggcctcaaatgcggatactcttccgtggacgtaaccttcacgttccacacctttttccaagccatatatagtaactcatgggcggggtaaacgcctgaatggtgcggtgatatggagtaacccgaatccgtgggtatgttgtgatccacagcaaaggcgtagtttaagtgcatttctgccatcaggagggttaggttatcatacaaatgaggctgctggtgcttccacatgtgcgaaaaccagttgaactcctgaacgttctgcagtaggaaatcatcacccagattctcttccctcgtgccatgatgatagtattttcccgagaatcccagattgaaccggaaacctggaaccattgctgctatattcttctgggtggctattagggctctcacatcatctggtcgcagtctggtgcccttctcgcccacgaatatatcatctatatcgactagaatcattcgctccagattcaaactaagttgaccatgacttagatagctcagagcatccaggaagaccagacgatgaagccaaaaacgcaaactgctgccgaatagcactctttgtatgccatccaactgtccgcgatcttgaaggacagtagtaagaggtagttgcacctggcccacactatccgctggatactcttgagtgtttctctgcgcccactccactggctcataggtactgtgattatgctggaaaaccgcccaatcatctccgggcagagctccccaagctgtttcaccagctcgagttaatcgaagcactgatgacaagggattcaagctcgcgtctctcaacctcagattcgtgttaacaaacagcggaaagtcccgaagttgggcaccaacaagagtctcttcgctgggactcacgaaacccacaattcccacggagtactcccggcagtatttgtccaacagctctctattccatttgtccatattgaggtatttatccaggttctcaaacacaatcacgccataacgacctttgtcgagattggtaagaactggtaaactcttgcccgccacttcgattttatatctgcaagtaaaaggaaatagggtttttaaaaatgtgtgaataagaatatattataatcgataaaattgaaaacaatatgaataacaggcttataactatcaaatatttgtggctaaaaataatagcaatcttaatgatcatcggcttttttaatcctaaacacatatcataaccattttttcaataaacactcttctggtaagcaatttaaaactgaaaaaaaaaaacattactcaaaaatttttctatgccaacccaaacggtcttgcaacaaatggcatatcacaatggaaaatatctgtgtgccataactgtcaaaccagaaacaacatggcaaacaaagatggcgttagaaagagttccggcccagatagagatagaaagaaagtgcttgtcaaatgtgacattcattgagggtgtgagcaaatgagacaaacgaaatccttcttggattggaatagtgcagcgagagctgcatttgacagttggatgtcaaaagcggttggctatgacaagccatatagaatgggtgacattgcaatgcaattgcgaaaccccaaacgtgagttgcatgcaataagctcgagtttgtttaagctggaagaatggataagcttagattgttctgccaagaaagcgaacaaatatagcataaatctcagcgaacgctttaaactgcttaatttccattcgttacgcatatcacatatgtatttacgtatgccattcgttattcatttccatttccataaacaggaaaagcacttggaaaaaacacagcgaatgccataattacattgaacacggttgcataaatatgcaacgtgcttatgaataaaatcaatttcaatattattattttcgctgagtaaacgtgctaaacgttgccatctaccctaccactactactcatattgttcccttcgcctgtgcgtaaatattttgcataaatattaaaatattttcactgatatggaatttccaattgattgaatttcat

SEQ ID NO: 18179 - DNA, 4078 bp, DROSOPHILA
cagataagaggacgacccactgggacggcagtcaatgtctgattgcgagtggacagtctggaactgggtctcttccgtctttatatgactgataatggccgtctgccctgtccgaaaccacaattgcaacaacagtgcgccacaatggccaagcaacatgagtatttgaaaatttggaaacatatcaagtggcgaaatgaaaagtaaacaaagcgaactgaatattaataaaaaccaagagatttatgcgaaagaacatataacacatgcatatatatatagtaaactggactggacaactgaagaataaacattcaatattcatgcaacggaatcgaagtgccatagtgaatcgcgagtgtttgccattcgttcgctctgtttagtcaatataggtatcacaccacacatatcgccaattatacagatataaaatatatatagagagtaccaccgaggcggagcgacgacaatatgacaatatcgggcggcaatcaacataataacaatgcaaatcgcaaatatgaaaaactcattaagcagccgcagatgcaatttggtagctccgtgaccggcacccaaacggatgtggattcctgccgagatgcggacgcggatgcgaatgctgtccgccaggactttagcaatttcaataagcatttcggcaatggtcatgccatcacggatcgcacaatgctgctgcgtttggaggacgatgtcaccaccgccgccggcattgtcacgtacaagggtaaatcgaatggcaatggaaatgggaatgggaacggaagcatcgggagtatcagtctggatttcaacggtagtcctacctcatcaacgtcaattggcatcgccagcggtagcagcagcaacacccacctggccagtggtggtggcgttggtggaatcggtggctccgagccagccggttggatgtgccattgttgtaatttaattgcacgtcgctgctttggcatcaacgttcgacgatgtgtcctggcgctcctggccattacgatggttagcattttctactacacgcattatgtcgatacgggcgtgtttaatggacttattcaacgcgacacgcatcccgcacccattatcaactgccgcatgatcaactctggtggcaaacacatccggaatgcctccccagcgcccgaccatcgttccgaggctcgattacggatcgatcccaaggtcctcgtttttgtggagaccacatattccggtctcggcagggacattgccgagctgctcgtctacaatcggatcaaatataaaatcgaagtggcgggcaagagtttaccagttcttaccaatctcgacaaaggtcgttatggcgtgattgtgtttgagaacctggataaatacctcaatatggacaaatggaatagagagctgttggacaaatactgccgggagtactccgtgggaattgtgggtttcgtgagtcccagcgaagagactcttgttggtgcccaacttcgggactttccgctgtttgttaacacgaatctgaggttgagagacgcgagcttgaatcccttgtcatcagtgcttcgattaactcgagctggtgaaacagcttggggagctctgcccggagatgattgggcggttttccagcataatcacagtacctatgagccagtggagtgggcgcagagaaacactcaagagtatccagcggatagtgtgggccaggtgcaactacctcttactactgtccttcaagatcgcggacagttggatggcatacaaagagtgctattcggcagcagtttgcgtttttggcttcatcgtctggtcttcctggatgctctgagctatctaagtcatggtcaacttagtttgaatctggagcgaatgattctagtcgatatagatgatatattcgtgggcgagaagggcaccagactgcgaccagatgatgtgagagccctaatagccacccagaagaatatagcagcaatggttccaggtttccggttcaatctgggattctcgggaaaatactatcatcatggcacgagggaagagaatctgggtgatgatttcctactgcagaacgttcaggagttcaactggttttcgcacatgtggaagcaccagcagcctcatttgtatgataacctaaccctcctgatggcagaaatgcacttaaactacgcctttgctgtggatcacaacatacccacggattcgggttactccatatcaccgcaccattcaggcgtttaccccgcccatgagttactatatatggcttggaaaaaggtgtggaacgtgaaggttacgtccacggaagagtatccgcatttgaggccagctcgattgagaagaggattcattcatcgcaacataatggtgttgccgaggcaaacttgtggtctattcacccacaccatgtacatcgatcgctacccggggggtagagataaactagatgaatccatacagggtggagaactcttccagaccattgtctataatcccatcaacatctttatgacgcacatgtccaactatggatcggatcgtctggctctgtacacattccaatcggtgatcaagttcctacagtgctggaccaatcttaagttggcctcagctccgccagttcagctggccgagatgtatttccggctgcatcccgaggaggtggatcccgtgtggggaaatccctgtgacgatgtgcgccacaagaagatctggtcaaagaccaagaattgcgattcgttgcccaagttcttggtaattggaccgcagaaaacgggcacaactgcattgtacacattcctatccatgcatggcagtattgcgagtaacatcgccagtcccgaaacctttgaggaggttcagttcttcaacggaaacaactactatcgtggtctggactggtacatggacttctttccatcggaatcgctgcccaacacgagttccccgatgcccacccagttgggatcgccacgtttcatgttcgagaagagtgctacctatttcgatggcgaggctgtgcccaaacgaagtcatgccctgcttccacatgcaaaaatcgtcacgattctgatatcacctgcgaagagggcctactcctggtaccagcatcagcgttcccacggcgatgttatagccaacaactatagtttctatcaggtcataacggcaagtgactcggcaccgagggcactgaaggatctgcggaaccggtgcctaaatcccggcaagtatgcccagcacttggagcactggctggcctactatcccgcccagcagctgcacatcatcgatggcgaacagttgcgcctgaatcccatcgatgtgatgaacgagctgcagcgcttcctcaaaatccagccgctgctcgattattcaaatcacctgcgatacgatgtgaagaagggattctactgccaggccgtcagcgagaagcgcaataaatgcctcggaaagtccaagggacgccagtatccggcgatggatgagcgcagtgccaagctgttgcagcgatactatctcaatcacaatacggcgctggtgaagctgctcaaaaagctgggctcgcggccaataccgcaatggctcaaagacgacctgtccacgggaacgtgatagcagctgtttggtggaggaggtggaggaggtagtgtcggctccataggaggcactaagtatcgcaaattgcgggcaaaactcaggaaacagttgcattggctgcatgtggcagccgaaaatgcggagagcgctcagcgacgacggcgtcacaactgacaggatgaaaatttgacggaattgcgatggaaaatctatcacactcgtttccagttttcacttttggcaagcttctgcaaatagaaatttaaaattcattaaaagttaagttctaaagttattctaatgcaattctaagttaaaaagtcaaagaaattgtaagttggtagttttcttatttaaggcaactctgttttctatttccaatcaaagattttttgtttttcgtattgaggaatcaattttctattctcagtgtagcttttgcagactcttgtcaaaagtaaaaaaaaaaaaa

SEQ ID NO: 18180 - protein, 1048 aa, DROSOPHILA
MTISGGNQHNNNANRKYEKLIKQPQMQFGSSVTGTQTDVDSCRDADADANAVRQDFSNFNKHFGNGHAITDRTMLLRLEDDVTTAAGIVTYKGKSNGNGNGNGNGSIGSISLDFNGSPTSSTSIGIASGSSSNTHLASGGGVGGIGGSEPAGWMCHCCNLIARRCFGINVRRCVLALLAITMVSIFYYTHYVDTGVFNGLIQRDTHPAPIINCRMINSGGKHIRNASPAPDHRSEARLRIDPKVLVFVETTYSGLGRDIAELLVYNRIKYKIEVAGKSLPVLTNLDKGRYGVIVFENLDKYLNMDKWNRELLDKYCREYSVGIVGFVSPSEETLVGAQLRDFPLFVNTNLRLRDASLNPLSSVLRLTRAGETAWGALPGDDWAVFQHNHSTYEPVEWAQRNTQEYPADSVGQVQLPLTTVLQDRGQLDGIQRVLFGSSLRFWLHRLVFLDALSYLSHGQLSLNLERMILVDIDDIFVGEKGTRLRPDDVRALIATQKNIAAMVPGFRFNLGFSGKYYHHGTREENLGDDFLLQNVQEFNWFSHMWKHQQPHLYDNLTLLMAEMHLNYAFAVDHNIPTDSGYSISPHHSGVYPAHELLYMAWKKVWNVKVTSTEEYPHLRPARLRRGFIHRNIMVLPRQTCGLFTHTMYIDRYPGGRDKLDESIQGGELFQTIVYNPINIFMTHMSNYGSDRLALYTFQSVIKFLQCWTNLKLASAPPVQLAEMYFRLHPEEVDPVWGNPCDDVRHKKIWSKTKNCDSLPKFLVIGPQKTGTTALYTFLSMHGSIASNIASPETFEEVQFFNGNNYYRGLDWYMDFFPSESLPNTSSPMPTQLGSPRFMFEKSATYFDGEAVPKRSHALLPHAKIVTILISPAKRAYSWYQHQRSHGDVIANNYSFYQVITASDSAPRALKDLRNRCLNPGKYAQHLEHWLAYYPAQQLHIIDGEQLRLNPIDVMNELQRFLKIQPLLDYSNHLRYDVKKGFYCQAVSEKRNKCLGKSKGRQYPAMDERSAKLLQRYYLNHNTALVKLLKKLGSRPIPQWLKDDLSTGT

SEQ ID NO: 18181 - DNA, 2780 bp, DROSOPHILA
gcacatgtcagtgctggccacggtgccgtaggactgctcgcactcgctgttgctgatgatctggacgtccatgcactgcagccagtcggccaggttgccattgtccatgccgccccatccgcaggcaacgcaccatgtgtccacgaagcggtcgctctcctcgctgaagcttggcagggcgaccttgttgatcaagtcggtgaagcccacggagggagtgcggatcagaccgatgtcacgaccgccctcagcgggccagtttggatggctgataaagttgtcacggcggacagattgcctgaaagctccgttccagccccagttggatccatagtggatctccacgtagtcggtggtcagacagtgagcggcggtcagaatccagtcgctggcgatgatggttccagctccaaccgcggcactgttgcttccatcggtgcggatcaacagtcccacaatgtagggagcctttccctcgggcgctgggtaaccgttgacgatgcggccctcggcaccctcggaaatggtcacctggggcagaaggctggtgcggttgaagcctggggaggcggcgaccacggctagggccacggagagtgtaagtaggaacagcttcatggctcggaggaaacttagtattcagcccagaacaacgcgtttttatatacgacctggtagccttatcgattacggatttgttcattgtctttgtgttaaccgtatctcatcggatactcatagccacacgcaacgcaatataagtttaattttaatcaactcaagaacttttctacttgataaccataaataaatcattaatttagacactactaaagtaaattcaatttacagtttgaatatagtatcaagtaaaccccattttctgctcaatgtggatatatatatatttacataggttcatttaaagtggaacaaaaatatcagaatatctggatagacaatgatttgatttagattcatcattgatcgagtctccttgttagtaataggcaattcccgacttctctcggatccagtccaagtgatcggacacacgggtgtagcccgatggtccagacttgcagccgatggatgcaaaggtgataacgcccacttgaatgggattgtcgtgagtgaccagtgctccgccagagtcgccaccgcacacggacttgccatcggtggcccgggtgcacatatcagtgctggccaccgatccgtatgacctggcgcattctccgttgctaatgacttgcacgtccatgcattgcagccagtcggccaatcctccattggccattcctccccagccgcaggccacgcaccaccagttctcgaaacgctcacctttttggctgaacttgggcagcgaaactttgttgatcagattggtgaagctgacgtacggggtgcgaatgagtccgatgtcgtgaccagcgctattgggatatcctggatggcgaaagaagttattcttgttcaccgtatgctgaagctgaccgttccaggcacgattcgagccgtagtgtatggtcacggaatcggtggtcaggcaatgggcagcggtcaggacccaattgtttccaattacggaacctccgcccacggctccattgttcattcgcaggcccacagcatatggtgccttgccttcgtaggctggatagccatttacaatgatgtccttgggaccaccaccatgatgagccgtacgattgcgattcctgtgggcacagacagtggcaacaaacaatagcaacaataccagctttttagacatgcttaaaattaaatctatatcgcaatggtttttgctttttatagaagaaatggttgcatgtgttatttacggctgggggtaattagtctccagtccaacgtgggttatcagtgctttcgacacttaatgagtgtgggtattagctcagatatactttgtcaatggtaatacattttcacaaagaaatacatttttatttttaaacccatattgcctaaatttacttaacgctgcgaagtttttctgattcctccatttaatgttgtcatactatatacatataacacttgcagatgcaatgtggccgttatgctgctcaccgacattgtagtggacggcattccgggcatcgactggacccttcacttgcccctgatgctgcacatcctcttcctgggactggaccacacgcgcatcattgtgcgggagcattgcaaacagctgtgcgtcaatctgctgatcgtgctggcggagcacaatgatcacctgacggtggcccgcatccttttgaacagtgaaacgagtaaactggatctgggactcacggtgccagcgctgcccgtgatcgacaataactttacggagctccatcagcaattcgacagctatctgctgcacgtaagtccccaggcggcagcctatgccctgcagcacaatctttccagctccacgatcatagcagcgcatcaccagaatttatcacaaacgccgcagagtcagcagcagacgggttcgcagaatggacagactacgacgcccccaggtttgactgctactccagctgcactgcaaataaatccgaataactcggagaattcggaggtaccgctgatccatcccgatgagcatgctcctccacaaccgggtcccagtatgcccattgcccatgtgatcaagagcctgctgaagttcctcgcacaggacacgtgtcagccactatggaactatgaggatattacggccaaggtgtgggcagtaaaatctgccgagcaattaagct

SEQ ID NO: 18182 - DNA, 780 bp, DROSOPHILA
atgtctaaaaagctggtattgttgctattgtttgttgccactgtctgtgcccacaggaatcgcaatcgtacggctcatcatggtggtggtcccaaggacatcattgtaaatggctatccagcctacgaaggcaaggcaccatatgctgtgggcctgcgaatgaacaatggagccgtgggcggaggttccgtaattggaaacaattgggtcctgaccgctgcccattgcctgaccaccgattccgtgaccatacactacggctcgaatcgtgcctggaacggtcagcttcagcatacggtgaacaagaataacttctttcgccatccaggatatcccaatagcgctggtcacgacatcggactcattcgcaccccgtacgtcagcttcaccaatctgatcaacaaagtttcgctgcccaagttcagccaaaaaggtgagcgtttcgagaactggtggtgcgtggcctgcggctggggaggaatggccaatggaggattggccgactggctgcaatgcatggacgtgcaagtcattagcaacggagaatgcgccaggtcatacggatcggtggccagcactgatatgtgcacccgggccaccgatggcaagtccgtgtgcggtggcgactctggcggagcactggtcactcacgacaatcccattcaagtgggcgttatcacctttgcatccatcggctgcaagtctggaccatcgggctacacccgtgtgtccgatcacttggactggatccgagagaagtcgggaattgcctattactaa

SEQ ID NO: 18183 - protein, 259 aa, DROSOPHILA
MSKKLVLLLLFVATVCAHRNRNRTAHHGGGPKDIIVNGYPAYEGKAPYAVGLRMNNGAVGGGSVIGNNWVLTAAHCLTTDSVTIHYGSNRAWNGQLQHTVNKNNFFRHPGYPNSAGHDIGLIRTPYVSFTNLINKVSLPKFSQKGERFENWWCVACGWGGMANGGLADWLQCMDVQVISNGECARSYGSVASTDMCTRATDGKSVCGGDSGGALVTHDNPIQVGVITFASIGCKSGPSGYTRVSDHLDWIREKSGIAYY

SEQ ID NO: 18184 - DNA, 3666 bp, DROSOPHILA
aaactaatgccacttggccaacaacgtcactggcccagcgaatcgaacacactagttccaaacccgaaccccatcgatgatcggagatcgcagttctgagatgcgagatccaagatctgatccactgatcacgtgcggcaagaagggggttttctcttttggccagcggtatccggagaaccgatccagtcgagcgcggctcattaccattggcattaaacaagaactcgagaccttgggattacgtgttcccctcaagcatgaaagccaagctcaagtgctcggttgacagttttccaagttatccatccaaatatgcgtcaccgcatcgcagcgatttgcataaagcggccgcataatgaacaccaaattggttccgatccgatgccgtgatctcggcgagagatctcgatctttagagctatagatcttgacaagctttacgactccacggtggcttccgtgtgtgtgtgtgtggcgccagttgcccatcgccattctcatcctgctatctgcttatccgaactactggggagattagtgtcttcttgattggtaagtgcgtcatggaaaaagtttaattagttaacgccgaagatcgaagatcggttaatgccaagcgcaaacaaacgcggcttatgtgacgcatatgtgattcaattcgattcgatttgatttgatttgaattgaattgatatccctgggaagccgcagaagcgttaattacgtgaccagctggagcggccaaaatgcagccagtgccaccaatttggcaatttggccacaaaacactggaactggaaccctaggttgtgttttttttttatttatttatttattttttttttttttggtggcaaagggggctgctacgcacgccgcgatatcggcaatatttagcgaaacccgggtcgggaaaccagttccgcggggcgagggcatcgaatcgggccgtataaaagtgaattgtcacaaaaattctgaacagtcgaagcgcacgctcagcggcgacagcaacgagaatcgaagccaaccaaagcgaatcgatagccccgggggccaacaaggtgttaagcgatcactgataacaaacaaactgactaactaatcgatcgatcagaacggtttcgactattcgcgagtgaaatcttcaatctacaatctgcaatctgcaatctacaatctttcatccgaattggaaaaagtgactaagtgcagactcgaaacaggatactccactcaacgcaactcgactaacgcatacccagcaaagatgtttgcgtacacttggcaagtgagtattatggttactcaaagttcgaaatttatgagccaaaacacaacacaggccaacaaagaaacgtgtttcgccgattaacattttcgaccaaaaaccaaaaaaaattcacatattaaggctgcaaaacggacagcgtactctgattttttcgccgccggacaaggccgaacgcattatcgaatcaagttattccaattctatttctacatctatatcttatagccgtttccatttccatttcgatttcgatttcgattcgattcgatcttgtgatcatctcgatgaggaagtgtcgtaaaatgtctttatttcgtgcccatggcactttgcacttgatcttgggctcatccgctcatccgctcatccgcagctcatccgcagctcatccatcctgctggtggagccttgataccgtttacaaagtcgagctctcttaaccctgaaccacatgaaacgcaaccggttacagtctccacctcgatctcgatcttctccttttgccccgccgccgattgtaattaatttgtttttgactgcggttaaggttttacataattcaaaaagaaaaaaaaaaccatcgaaaacatagtaacaattacacttggcttggcgattgattcaaatgcttgagatccaggagactatggccagtgatgcatccggttgggtggcgcctagagatcagctggatgatgacgatgacgcccaccaaaattgcgacgacgtgctcatgaatattttacgtgcgactataaattagatttgattgcgattatatcatggatcacatcttcccgtcgccgccagttggttaaatttaaattaattattgtatgctaattggcagcataagagcgctaagagcagacaggttctggcgctggcctccatcagctattcacacctctgactgacttgtgtaccaaagttcccttcccttcattccttccttgttccttccttgcagctcgctccactgatcctggtcattctggcgacaacgatgacgacgacaatggctgcaccgcagcagcaggaggtgccccacgccctgctggacatcgagacgcccaatcagttcaactacagtccctcgccgttggcacagccggatagtctgcgatccaagccgtactttgattttctgagcacactgtatgcccacgatacggccaagtcgaatctgtttcggccatattcggtgcgccagcgcagggatgcggatgtccagaagctgagtcgtccgcgacgggccatcgtctttcggccgctgttcgtgtacaagcagcaggagattcggaagcaggagatcagggacaggaatgcccagaggcgtcacgatctgaaccgtctgcagcgggtgtagtacactccaatcgaatccagtgtccatccagccaatccggtttggtttggccttctacagggtcctctagcacttagccacttagccactttcgatgcgtcctagttctaagtcaaatgcactgcagcacgaatatagagaaagagaatggagcactcatcatattaaatattatataatatatatatatatatacacattcgcaccaaacacccacaatcacaaccacaaacacatcctcgtagattaaggcccaaatgtttgttatgccacttgttatcgcgacgtttgattaaagctaacaaaactgatatcaaaatgcaaaatgctgctttcttactttcttactttcattcgggggccgtttttattcatcagaatgagatcggaatgagtgagatgaactcatgtgaccggctcgagatctagtttttggcttcgcattgcacttggaaaggctattaaccggatcttcactggctttttttttttaatcactctgccgttcaggttttttactttctgaattcgtttagcatatgaaatttggacttttgcagtcaaaagttcttcgatcctccgaaatgtttgaggctttcgcttctcttttttttgcttcagcagcaaaacatcataaataataatctttaatatatatatatataaatataataacaaaactcacttgcagttagttgcagctggttataaaacaaattgaaatcatgctgaaatagctagtagttagatgagtagatccaaggatagtttttattgctatggtaactaaagtgctataattatgcacttaaagtttgcattttaaaatgtattttgctaaataaaagcacggaagtcagctgcgagctgccacatggcatggccacaactcactatataaatatttatgatccaatgaagcacacacgtttacttgcaaccaatcatcgcgtatcttgattgaatgtcgaatgccaagaatgtatatattcatgaaata

SEQ ID NO: 18185 - DNA, 693 bp, DROSOPHILA
ctcagcggcgacagcaacgagaatcgaagccaaccaaagcgaatcgatagccccgggggccaacaaggtgttaagcgatcactgataacaaacaaactgactaactaatcgatcgatcagaacggtttcgactattcgcgagtgaaatcttcaatctacaatctgcaatctgcaatctacaatctttcatccgaattggaaaaagtgactaagtgcagactcgaaacaggatactccactcaacgcaactcgactaacgcatacccagcaaagatgtttgcgtacacttggcaactcgctccactgatcctggtcattctggcgacaacgatgacgacgacaatggctgcaccgcagcagcaggaggtgccccacgccctgctggacatcgagacgcccaatcagttcaactacagtccctcgccgttggcacagccggatagtctgcgatccaagccgtactttgattttctgagcacactgtatgcccacgatacggccaagtcgaatctgtttcggccatattcggtgcgccagcgcagggatgcggatgtccagaagctgagtcgtccgcgacgggccatcgtctttcggccgctgttcgtgtacaagcagcaggagattcggaagcaggagatcagggacaggaatgcccagaggcgtcacgatctgaaccgtctgcagcgggtgtag

SEQ ID NO: 18186 - protein, 120 aa, DROSOPHILA
MTTTMAAPQQQEVPHALLDIETPNQFNYSPSPLAQPDSLRSKPYFDFLSTLYAHDTAKSNLFRPYSVRQRRDADVQKLSRPRRAIVFRPLFVYKQQEIRKQEIRDRNAQRRHDLNRLQRV

SEQ ID NO: 18187 - DNA, 3213 bp, DROSOPHILA
aatgaaggcttctgtgtccgcagcgaatgccaagcccaagctaacgcgaccgtcggactcgattttagttgagcaactgagcgccgccgttttgtcacattcggtgcttaattttggctagcagcgaactgggaacgggcagagctgttttaccacctctcatcgacgttctcgcaggcaagccggtttcttgactcagcctgatttcgatttaaaaagcttaactaagcattcatacatttaacggattcgcaatacgataattaacacttttggcttagtgcaaatattgggaagaagttactatgaaggctaataaactttttattacttgtcaataactatgctattatatttattgtattatatttatgtacttctttgttagataagcataatttaaagatacagtatctcacctgtttcatattcaacttaagctgctccttgatttcctggcatatattttcaagtaccgagtaatatgtgaaagtctgccatatcagaagagacagcataaaggatagtattatattcacacttagtctgttcatgtctgcaataaatataccaactagtaactacgttttccatatcaaactaatttgcatggccaatttcacggaagcgtttaaaatacaattatttgctttatttgagtctaaacggtgtagcgcgaactatttaaatgcaatcgattggcgactgtggctacagttatcgatagattttacttttaaaaaccgtgactcaatgaatctaaattatcaactatgaattataatgaattactattttcaatttcttgttattttattaacaacataactttgcttacctttcatttataaataccgtgatcgaaaattggagtcactaaagtcacggcagaaaagttcatctctattaagccaaagccaaacaaagaagcacacaaaagtttataccatagtttattgtttaccaaaaatatgacctgtagttaaacagcagttaagcaatggaggacctgtgtcgaatttgtggcggggcctcggaaaacatgctgggcattttcgacgatcaggtggaagaatatgttgatggagccaagctcgctgagatggtgaagacatgtgccgacgtgcagttggatcccgacgacgctatgccccaaaaaatgtgcatttcctgtgtccacgatgcacgaactgcttacggattcaagcgaagatgcgaagagaactacaagaagttctatttggcgatattaaatgggcaggtcatcaaggacgagcccaacgaggaggatttcctattcattgagaacccagacaaaggcaatctggaagcaaagaagaaactcaacaaggaaattaaaaagacacatcaaacagcttccagaacaaccaagtcttccataacaaccagtagagctggcagacagctaaggagtataaagaatcagactttcaaatgcgaactatgcatcaaacagttcaagcgccaaataaacctcctggaccacatgaagtaattacaatcaatacatatgatttcacctgttcttaaaattgtatatctcattccacagggttcacagcaattcacacgtatgccaaaactgcgaagagcgttttctgttcaaggccgatctggataaccaccaatgttatcgcaatagcaattccaccgtcgagtgcccggaatgcttaaaggtcttttcaagcacccagagcctggacagccacaaatgcaaggatatgcaggagcgttcgccctttcagtgcccccactgtcagcaggcctttactcgcgaacaaaacctcaaggcgcacctgttgatccacgcggaatcgaaacagggaaacggaccccacaaatgttcatactgccaaacgggattcttcaacaagtcggccctcaaggtgcacatccatgcgcacatgggcgaacggccgcatgcctgtcccttctgcgtgtccaacttccgttccaagcaggcccttaaggtccacatccgcatacacacgggcgagaagccctaccaatgcccccactgccccaagactttttcggacaacaataacctggcgaagcaccgacgacgccactcggatgaacggccctacaagtgttccatctgcctgcaggacttccgggagaaacatcatctgaagcggcactttctgggcaagcatcgggatggagatcaaaagctaaagctaaagtgataccttaaattcttgaccaaataccacggcttactcgaataaataaattaggattcggttatgtttatatctcattgtttctatagttcatattgggatttaattgaatttaggatttatattttcgtagaattcgaacagcactttgaaaaccatttggagtggcaacaccgtttttctgtaaatcaaaattcgatgtagacacgacgatatagacagcgttgccattcggccgtgatttgttcacgtggcaccaccattttgataaacaagctaaacaacccttaaatcgctcgaaaagagcaatggaaaaaaacaacaagttgtatgtttataaattataagtcttacaaattgtaattgtggtttccgtttgcttagaacatcaaagcagctaccaacacacaaaaaataccgaatatttctcgacgtaattttccctagacgtccttacaattcgtcgtgttcgctttgatctttgtcttgcttagattcatcatccttctcctcatcgtcatcatcctcgtcctcatcgtccttgtcggaagcctttttcgcctcctcctcgtccttcttgcgctgcacctcatcctgggcctccttcattttcttctcgcccgcctgggtgttcttgacttcggcagcagccttagcggccagctccacgtcgtccgtgatcaggacgttgtcgaagatagtgccggacttgacctgccagagatcgaagcccagggtgcagatctccttgcgcagatacagcttgtcgtcgggcacatactcgggattggcgatctcgggatgctcccaggcgcccttgtagttggggttgtccagctgctttggctgccactcgcccttgaactcagggttgtcgatcatcggtggctcccactcgccgtccatctcatcgtcccaatcctcaggctttgtggcatctgggtcgggaatgtgctctggtttgtcccagtcctcgggcttcttgtcatcgggatcgggaatg

SEQ ID NO: 18188 - DNA, 1152 bp, DROSOPHILA
atggaggacctgtgtcgaatttgtggcggggcctcggaaaacatgctgggcattttcgacgatcaggtggaagaatatgttgatggagccaagctcgctgagatggtgaagacatgtgccgacgtgcagttggatcccgacgacgctatgccccaaaaaatgtgcatttcctgtgtccacgatgcacgaactgcttacggattcaagcgaagatgcgaagagaactacaagaagttctatttggcgatattaaatgggcaggtcatcaaggacgagcccaacgaggaggatttcctattcattgagaacccagacaaaggcaatctggaagcaaagaagaaactcaacaaggaaattaaaaagacacatcaaacagcttccagaacaaccaagtcttccataacaaccagtagagctggcagacagctaaggagtataaagaatcagactttcaaatgcgaactatgcatcaaacagttcaagcgccaaataaacctcctggaccacatgaaggttcacagcaattcacacgtatgccaaaactgcgaagagcgttttctgttcaaggccgatctggataaccaccaatgttatcgcaatagcaattccaccgtcgagtgcccggaatgcttaaaggtcttttcaagcacccagagcctggacagccacaaatgcaaggatatgcaggagcgttcgccctttcagtgcccccactgtcagcaggcctttactcgcgaacaaaacctcaaggcgcacctgttgatccacgcggaatcgaaacagggaaacggaccccacaaatgttcatactgccaaacgggattcttcaacaagtcggccctcaaggtgcacatccatgcgcacatgggcgaacggccgcatgcctgtcccttctgcgtgtccaacttccgttccaagcaggcccttaaggtccacatccgcatacacacgggcgagaagccctaccaatgcccccactgccccaagactttttcggacaacaataacctggcgaagcaccgacgacgccactcggatgaacggccctacaagtgttccatctgcctgcaggacttccgggagaaacatcatctgaagcggcactttctgggcaagcatcgggatggagatcaaaagctaaagctaaagtga

SEQ ID NO: 18189 - protein, 383 aa, DROSOPHILA
MEDLCRICGGASENMLGIFDDQVEEYVDGAKLAEMVKTCADVQLDPDDAMPQKMCISCVHDARTAYGFKRRCEENYKKFYLAILNGQVIKDEPNEEDFLFIENPDKGNLEAKKKLNKEIKKTHQTASRTTKSSITTSRAGRQLRSIKNQTFKCELCIKQFKRQINLLDHMKVHSNSHVCQNCEERFLFKADLDNHQCYRNSNSTVECPECLKVFSSTQSLDSHKCKDMQERSPFQCPHCQQAFTREQNLKAHLLIHAESKQGNGPHKCSYCQTGFFNKSALKVHIHAHMGERPHACPFCVSNFRSKQALKVHIRIHTGEKPYQCPHCPKTFSDNNNLAKHRRRHSDERPYKCSICLQDFREKHHLKRHFLGKHRDGDQKLKLK

SEQ ID NO: 18190 - DNA, 3393 bp, DROSOPHILA
tcttgatctagaatggaaatgtagctatcagtgatgccttatcttatcacggctagacattgtcacatattcgcggaagcagacaccttcagtgtttgatttacataatcgcttaccaggaagaagggactggcacaataggaacccacaacgccgcccaaagcgccccagaacatgccctttgcgaatgagatctcgcccttgttgttgtggacccaacccttctctacggcatgggtgtatatgctcaatctagagcagatagagagatagagcacatatgtatatttttggaaaactccttgtaggataacaaacagctttaacctaccgaaacgagtttattacaaactggaagcatagcgctggagccaatcctttttgcaagccaagaattccatcgtttttggccacagtcacaaaggcctggaagacactcttgtaaggctgagcatgagatcctcgggcggccagctctccctgtagttgaatgcgagttttgatcacctcgacgggattggtgaagacaccagcgcccatggcagccacgccgcccagcacaaaatccgacgtagccatcaatgagacgtccgttctgtatcacaatctagtgatcactaacgccacacttgcgataagctagctgcttaagacttgagagcaatatgcgttaaaatgtaacagttaaactggtttatttcaccaaaatattgcacggttaatggctacaggaagagctcttaaattagcttaatgaaggcacaagttggttctggggctttgctaatctaagagattggaactaggacattaagctaactcactaaagactaaagccagatttagacaaacaaattgtatgcggcggcacttgcatatcaaatttgtttatcaaagcttggcttaataataaaaagcaatgtgtatatttccgggtggtaaaaacgattttaacaattttgtacttaaattaatgctacctagccagtgatctttggggtcattgattactatactttgtgcgtacggcgaccagctcgtcaaagaatagcagcacaagggttgagtggggggcaatgcgcaagtagttggcccagaaccccttgtacataccataaacgccctctgatcgtaggattttcacaaagcagtcaagccaaccgcgataaagaagaccgcgtccttcggcgtctacgccctgattgtacagacgcgtggtgattacatctggcggcgttatggccaccgacataatggatccggctatcaagccagccgagaaggagttcaacgtgggctgggtcaccagatcgtactggaccaacagggctttggtcttaccaaaggtggctatctgggcacctgatcccaaagccgccctgggcaatgcggccacagatcctctccacagtcctcgtactccattcctggagtagatctgacgcagggcatctgtcatggaagtatgggcatgttggtagccaacggcgatttgcttggcggcttgtgattgcagctgagttttgatctggatgcaaaagaaaggaccataaataataatatagaaatatagacattgtacataagagaattgactgtgataatatgttaatgtttacaatacttattaagttatttagcgaatatttttctgtttctagatcttgaaaatgtcttggtataaataggctaacaataaatgcgttatgtcataaagtaataagcaatgcaaacaaccataaacagtcaaaaaatatggaatatttggaagtataatactttctccctggatatcttgaaatggtagtatttagatactgatggacaattgccaataaagtctcttatctgtggaaggtccataatgctgatgagcacgcggctcatttagataaactatgtatttgtttatgtaacctcccgcagcattcccacaattggcgtaccaggaaaaatggactggagaagtagcaccccacgacgccgccgatggcgccccacagtagtcccattccgtaggacacctcacccttccggttgtgcatccaccgcctctccattgcctccgaataaatgctgagcctggcgaatgtaaattcaagatgattaataattataaaatatagctactaaataattccccaccggaaggaattgatgatgaactggaagtacaaggccggtgcgaggcccttttggagccccgtaatgccatcatttttggccaccgtaatgaaggcattgacaatccccttgtagggctccacataggtaccccgtgccgccagctcgccctgcagctggatccgtgtcttgatcacctcgatgggattggtgaagaaggtggcccccacggaggccaggccgcccagaacaaaatccgatgtagccatgtaatcacgagttctgctgaggatagtggttgactagtaacggttgtaccgcctgctgcggaatctctgtggctctaggaagccgcacgctgcgtgtgtgtcgtgtatttcataattctccgccccgattagctggcattactcctgctcttctcgcccgttatacaaatataatataaatttggcgagcaatataacttagtagcagcggagttgccagactgtcgccaaattaacaatttaacaaaaatcgtgtcattttgcttaactgtaaagtgataaatgtaaaataaataactgctggatggtaaatttaaaattcaggagaaacgggttttagaacgttagtaacggtacggctaagaagtcacttagtgacttatatgtttcagaagatccgggaacactacttttgcccacatttattgttagctagagtcccgtcaaaacatttataaaattgatttttatgtcagcattaatacacttgcaaagccataactattttaattttattgaactgaatgaatttcagaggaatattatatattttaagtggccacgttaacgtcatcttaatttaattcggtcaattgtttgagagcatcgctattagcgggaaacggaccaggccggcagcactggtcgctctctttcctttcgagctgtcaaagcgccgaagacgtgtgtgcgtgttattttcagctgaatttgtttaaaaaagtggaataacatttaacaaaaccatgacttcgcatccggttttcatagacctgtccctggacgagcaggtagagtgaaagtgccctgttttagccatgaattcgggcggcgccttgcccgaattgaggttatgtcttcctcttgctgcaaaacaaaactaatattattcgcaatttattaaaaggtgcaagagctgcgcaagtatttcaagaagctgggagccgaaatctcatcggagaagtccaataaaggtgtggaggatgatttgcacaagatc

SEQ ID NO: 18191 - DNA, 912 bp, DROSOPHILA
atggctacatcggattttgttctgggcggcctggcctccgtgggggccaccttcttcaccaatcccatcgaggtgatcaagacacggatccagctgcagggcgagctggcggcacggggtacctatgtggagccctacaaggggattgtcaatgccttcattacggtggccaaaaatgatggcattacggggctccaaaagggcctcgcaccggccttgtacttccagttcatcatcaattccttccggctcagcatttattcggaggcaatggagaggcggtggatgcacaaccggaagggtgaggtgtcctacggaatgggactactgtggggcgccatcggcggcgtcgtggggtgctacttctccagtccatttttcctgatcaaaactcagctgcaatcacaagccgccaagcaaatcgccgttggctaccaacatgcccatacttccatgacagatgccctgcgtcagatctactccaggaatggagtacgaggactgtggagaggatctgtggccgcattgcccagggcggctttgggatcaggtgcccagatagccacctttggtaagaccaaagccctgttggtccagtacgatctggtgacccagcccacgttgaactccttctcggctggcttgatagccggatccattatgtcggtggccataacgccgccagatgtaatcaccacgcgtctgtacaatcagggcgtagacgccgaaggacgcggtcttctttatcgcggttggcttgactgctttgtgaaaatcctacgatcagagggcgtttatggtatgtacaaggggttctgggccaactacttgcgcattgccccccactcaacccttgtgctgctattctttgacgagctggtcgccgtacgcacaaagtatagtaatcaatga

SEQ ID NO: 18192 - protein, 303 aa, DROSOPHILA
MATSDFVLGGLASVGATFFTNPIEVIKTRIQLQGELAARGTYVEPYKGIVNAFITVAKNDGITGLQKGLAPALYFQFIINSFRLSIYSEAMERRWMHNRKGEVSYGMGLLWGAIGGVVGCYFSSPFFLIKTQLQSQAAKQIAVGYQHAHTSMTDALRQIYSRNGVRGLWRGSVAALPRAALGSGAQIATFGKTKALLVQYDLVTQPTLNSFSAGLIAGSIMSVAITPPDVITTRLYNQGVDAEGRGLLYRGWLDCFVKILRSEGVYGMYKGFWANYLRIAPHSTLVLLFFDELVAVRTKYSNQ

SEQ ID NO: 18193 - DNA, 3949 bp, DROSOPHILA
gaagctgtgaaagttcagcccaaaaaggagaacgttccatcaccgattattctggaaaaatccagttgcgaaatgtcagccaaaaaggaatcagcggagttgccaagctccccgatgttgaagccaggacgaaacttaattagtttaattggtcgcgtggatttctgccttaaaactcaaaaaatgtatccggaaattaatgctatttggaatgtttacggtgggtctgaactgaaatacattcaaaatcaaattactatatacattttaaacagaatgattaatatcgctaaatttggcaagttaaatcattaattatcgtttttcaggaaaattgctacggatcattgtgggaaaacgtggagaacacaccttgctcgtgcgaaacaaagaatcggggcccgtccttcagggaatttactacgatttcgaaggcgttatgagtacttggagcccaggtaaaatgcaggaaactgataaccattacataaccaaagttttattcattaaaaggctgctttgtccatctcgtgggccagtttattggcgaaaatcgcttgaaaacatttaagattgaccaggtaagcgacattgactggcaacagcaatttctgcgcattgaaaatgttacctcgtatattttattgcaaaacactatgcaaaagtaatttattttttaaggatacagttttcttgagatttttaggccaggcgatagtgtacttttcacaaggtataaatatgctagcctaagcttttcgatcctggcctccaatcaacagtgaaatgtttcattttgtacttttgtagtttacaaatcatgaataatttatagagttagtaacttataattaatatacctaggaaataagttagcttcaaaatgccccctgacgattctctccaggagcattgcacagtttcaaggactacaacaaatacaaattccgaagtgggcgtataaagtctaatactggtgaacttattgaactaattggaaggaaatgggtattcagttctacgagtacaagtcgaagtacatgaagaccgtgaccagaaatccgcagaacagggcgcacaagtagcccaagtgcatcgaggcagtcttctcctcgcggaaactgcaaattgaagtaaagactccatgttataatgaataattaaaggtgatttccccagagcttaccgtttcttggaacgcggcgtaaagggcgaggggggatttacgccgggcaccgcgctgtccaagtacacgattccgtacgcgaaagctgccactagaaggccacacagcaggggactcagcctggagcccagctggtgcctggtggcccacaccaaggtctcgttccacctactctgcacctggtggctcagcacctggatggaatcgcccgtgatgtatggcactgcaaagagaacgcccaaagctcgttagtatctcattttgagtgtcgttctattgatttcactgttatcagtcctagcgtgataaacacgtcaaaatgttgggtttataactagggtggttcaaatttattagtcagatatgtacgctatgagggaatcaaagcaatttggctaaatggaaagaattagtgggcaaagaaatttgcaaaaatgtacagaaaccccattcgttacaccataaatagcaaggttgcgctttttatagatttggaccgatgggaaagattggaaataaatattcgtttgtattggtttaattatttcttttctcgacaatgtataaaatttgttttctgcttatatcaaatttatatgtttgaattatttaacaaatagttgattaaacatgtgttttttctttgagctttgttaaactttattaaattttttgtcgcactttttttggagccaccctaatgcaaaacctgcagcaaataaagattgctatatcgtcagaaatgtaaaattcgttattttcctgggccttctagcggtaccttctaatgtttatattacatacattagaatatacatgtatgtgtcgcgtgacgaaagcccagtgctaaataccgttaagctaagcgtagatgaataactaatagccgctgggcaaacaattaactaactaatggcattttgcctcaaagatgaagcaactaatcactctttgacgatttttctaaggtcttcagtacgtttgtatgcaaatgagacggctaatgcgcatcaaacaatttgccttccttatatagacgttttttcgctattcggcggcttatgcagggggaacaaacaccaccgctatgagatcacacgaacttcaactatttataaacgcgagaatataaacaaagtgcgagtaaagacgacgcaaccgacaattgcaaccttgaattcccacccccgccacaccggggatatacagaaataaacaaatggaaatccaataaacccacaatatatttacgtttagcccccagcttggcacacttactcgttaagatgacgcttttgtagccaatgataagagtcccaaagagaagggccacctttttgatcagcggatcgagggcggtcaccactcccactcgccccttttccgagggtttagcaacacctacgtagtgctcaagtttcggatgcgaggtcttcggcgtggaggtgtagatccgtccgttcggttgcccgttttttttacttctgactgccgttgagaaaatcccattggttttgtttttctcctgctggcgatgcgtgacgtcacagccgacttcggctggttccacctgcatttcgtggttttgccggcgtaagctttgtttggaattagttttcgttgttcgaactgcgcggcaaaacaacaatcagtgtctatttaactcgacaattgtttggtttatttcacaatagcacaaaaacaacaagaaaaacgtcacacccccgaaaaaaaacaacgcagaaaatgcaattggaactagtgatgggagagttgatgttgcaccgtgaactatcgacggcctcttatcgatagttcatttgttatcaatattcaaattagttttagccctcctaagagcgactttgaaattgaaaagaaaaaagttagaaacaaaaattatattttagccattttttaaacttactttatattaaaaaagtacaacattttaataatttaaactaaaagcccattttcgatatccattttaacatttaaataataatcatacgtttatttgtaatttaaaaaccataataattgtttaatgtacatgttttatagtttaatgtgtgtattcattttatttttatctttgtagttttctttccaattcttacgcttttaggttttctttttgaatgcattttgaatgcatacttgttgaatttaacgagacaattgtatgtattatgatgatgttacattaactaaaaattaactgcgatcatagaaaagttaattttaattacttaataaggctctgtttacgttttcattactttacttcgtactttaacttatgcgcgatatactttcctttttttattcgatatacaatagtctaagaataatggtaaaatcaatcaataaatcaaacactataaaagaacaggataaaacattttaaatgataaataattacttttacagagttgcggttaacagatttttcgacacttttttcgtttttctttttttgatgtttgtgtttttggtgtatctcacaaaattgatatagtacatactgaatgcgaaactgaacaatccgaattctgggtgcttagttgtgagttgcatggtgtggataaaggtagtgtcggtttaacaactatcgtggtctttcctacgtcttaaatatttagttaacttaggcgcctagactaaacataactaaactaacaagtatgcgctctctccacctccaatctgcgccatcccagcccctatgatttggctgaagcggctcctgcgcgcgtt

SEQ ID NO: 18194 - DNA, 829 bp, DROSOPHILA
actagttccaattgcattttctgcgttgttttttttcgggggtgtgacgtttttcttgttgtttttgtgctattgtgaaataaaccaaacaattgtcgagttaaatagacactgattgttgttttgccgcgcagttcgaacaacgaaaactaattccaaacaaagcttacgccggcaaaaccacgaaatgcaggtggaaccagccgaagtcggctgtgacgtcacgcatcgccagcaggagaaaaacaaaaccaatgggattttctcaacggcagtcagaagtaaaaaaaacgggcaaccgaacggacggatctacacctccacgccgaagacctcgcatccgaaacttgagcactacgtaggtgttgctaaaccctcggaaaaggggcgagtgggagtggtgaccgccctcgatccgctgatcaaaaaggtggcccttctctttgggactcttatcattggctacaaaagcgtcatcttaacgatgccatacatcacgggcgattccatccaggtgctgagccaccaggtgcagagtaggtggaacgagaccttggtgtgggccaccaggcaccagctgggctccaggctgagtcccctgctgtgtggccttctagtggcagctttcgcgtacggaatcgtgtacttggacagcgcggtgcccggcgtaaatcccccctcgccctttacgccgcgttccaagaaacgtttccgcgaggagaagactgcctcgatgcacttgggctacttgtgcgccctgttctgcggatttctggtcacggtcttcatgtacttcgacttgtactcgtagaactgaatacccatttcc

SEQ ID NO: 18195 - protein, 207 aa, DROSOPHILA
MQVEPAEVGCDVTHRQQEKNKTNGIFSTAVRSKKNGQPNGRIYTSTPKTSHPKLEHYVGVAKPSEKGRVGVVTALDPLIKKVALLFGTLIIGYKSVILTMPYITGDSIQVLSHQVQSRWNETLVWATRHQLGSRLSPLLCGLLVAAFAYGIVYLDSAVPGVNPPSPFTPRSKKRFREEKTASMHLGYLCALFCGFLVTVFMYFDLYS

SEQ ID NO: 18196 - DNA, 3116 bp, DROSOPHILA
cgcactagctgcgggttaatcaccgttccttcgctcagctgataagtaaaaacaactaaaacagcacactcacccacaccactgcagtaagacattgtggctttgacacgatgtacgtaagcccgagttgaagaaggaaaatttaataagccttctatatccgattttaattcacgattgactcatttagcgtctaggctatttatcaattgttaatgctatttgtgtgcctatttgcgcgccagtcacaatttgttgttcttctctctatccgcgtgcctatgcgtatgtgtatgtgcgtgtgtctacaacaatgaatttaatcaatataaaaaaaataggaagttggctaaaactgcgttaactagagtaattgtagttgactactgcgctaatagcaatttttttaaattttttctattgcttttcactttagccgactttttcggcgaacgatcacgcttaaaagtcaatttaaaataaattaatttcagaaatttccgtcacgaccagtgtggccgaaggcgcagtgttgattaagtccaagcgtgtacacagctaccgcacaaaactgaacgtgggtttctaataaaatctggtcatactgtcatatttagcgccactttttagtttctctaaattttatttatattttttaatgttatacgtaaataaaaaaatgtgagtgtctgcataagcaagtgaagtactttttttgtatctataaatatcaacataatagtgccctttttctttttgccaaaagactccatattaattaccacctccatgaaatactgatagaaatagtggaattaaacagtgcactttttattttgtatgaaaatagatttaataaaaatctcatcaatatatttaacattctataatgaaactacgaccttcagtgggtagcaaacgcattcacgaaacttaagggattaggttaacttgttttcatgtaaaaaaaaaagtacgttggtatctagtctagaatctgttaggaatctgctgttgtcttgtttttgagctgacggtatagctgaaccattttgctgcgctcggtttcaagcattgacctcgtagccaagggcagatctttccgcttgcccttcatctgggccttggtgggtgctttgaaggcgctcttagattgggcagccagctttagtcgactgctgtcgtcgtcctccggcccacgatttgactgaccctggtcgggattcagcatggactttagaaggagattggctttgcgtcctggacgcggcacggtttcacttttttccgctttgcgcggcaggattttgagggaaggtggggcatggacgatctcaccaaatgccacagcatcctgtttgaattctgttggcccggcattctgcttctcctcggtatcaacctcttgctgggcctccttgtaggccctcttcaccaattcgcgactggtcttcgcatccatgggcttgtgtacgacttgaacctttttgcgaccccttttgcccgccagccgttgctccttttgcttctgcttgagcagctcgtcgatctcgtttttcggcctcttttggacagtaatctccccggttttggggtttctgatcacgttcacaccatacttggcctcgtagtgggcttcccgtacggatgcattggtcatgcgattcactcggcgcagataatcctcgtccgtttcgttggcgaactgcttgatgttacgcgtttcctttgaggaggaactactgccaggcttggatcctggagaggatttgggcttatcctcccgtccaatttcgcccaatcttagcttcttgcccgatttggtggcgttggcaagctgctgaaactgacggaacttaaaggacacctgctgctcatcctttttcacaggcggattgttcgttactttggaaagtctgaaatgtgaaatggtgcagatattagtttagctgcctttttcgactgacttgccactatgaacaaacttcttctccttctgttccagctgcttgaggggatcacggacgccgtggtgcttgcgcacgggaatctttcgtttccgagccatttattttgggttttggttcaatttttgtaaaacaaactcgtggtatcgacagcatgggttaaaatactaagcgcgatgcatgctgacaaataccaaaacaaaccataaatataccaaatcgattaaagcttggactcaaaccattggcgcccagaattacaaatgaaatattaaagttaaatatatattagattaaatatataaatgtattttacactatgtattgtattaagtagtcttcatattcccctattttataatatacatttttaataaagatttatatgctgtaatgagaaaagtattttattgcaagtggtaaaatttactgtttgcagtaaaattaaatatttaaagtcacgaatttgtcttaatttattgttttattagtttataagcaacgacaaaatgaagaataagtctgaaacggcactttcgaactgaatacgtatgatttaaatgtacatatgcatattatgtacgcaaattaatttcattataaagctacaaataatttagctgaagtgaaattttttttgattgcaaatggcaatgaatgaataagtatctggatattaattaattgtccgttcttataaagaacatacattaatttttgaccaaaatacgttaacaatttaaagtatgtacgccgaggcggcagtaggtgtaacatcattatcatcgctgaagttcagcaggtaatcatcgtcaaaattgttgtggggcgagctgaatcgaagtgattgatcatcaaagttgttgaatgtggacgacggatgcttaaagtaatccggcattggttggctcattgggaactcctcctcctccaattttagtcgcttgcaaggcggcgcctcgttttcatcgcgattgctaccatagttcataaactgggttgcagtaaaacgattaagagtgcccttggaggtgctgggtatatcgtcgctggcccaggaagatatgtttttgaagggagagagagtgtcgactctaattatttgtggtttatcggaaatttcattggatagctgctcatcagtcttcg

SEQ ID NO: 18197 - DNA, 1047 bp, DROSOPHILA
cgataccacgagtttgttttacaaaaattgaaccaaaacccaaaataaatggctcggaaacgaaagattcccgtgcgcaagcaccacggcgtccgtgatcccctcaagcagctggaacagaaggagaagaaactttccaaagtaacgaacaatccgcctgtgaaaaaggatgagcagcaggtgtcctttaagttccgtcagtttcagcagcttgccaacgccaccaaatcgggcaagaagctaagattgggcgaaattggacgggaggataagcccaaatcctctccaggatccaagcctggcagtagttcctcctcaaaggaaacgcgtaacatcaagcagttcgccaacgaaacggacgaggattatctgcgccgagtgaatcgcatgaccaatgcatccgtacgggaagcccactacgaggccaagtatggtgtgaacgtgatcagaaaccccaaaaccggggagattactgtccaaaagaggccgaaaaacgagatcgacgagctgctcaagcagaagcaaaaggagcaacggctggcgggcaaaaggggtcgcaaaaaggttcaagtcgtacacaagcccatggatgcgaagaccagtcgcgaattggtgaagagggcctacaaggaggcccagcaagaggttgataccgaggagaagcagaatgccgggccaacagaattcaaacaggatgctgtggcatttggtgagatcgtccatgccccaccttccctcaaaatcctgccgcgcaaagcggaaaaaagtgaaaccgtgccgcgtccaggacgcaaagccaatctccttctaaagtccatgctgaatcccgaccagggtcagtcaaatcgtgggccggaggacgacgacagcagtcgactaaagctggctgcccaatctaagagcgccttcaaagcacccaccaaggcccagatgaagggcaagcggaaagatctgcccttggctacgaggtcaatgcttgaaaccgagcgcagcaaaatggttcagctataccgtcagctcaaaaacaagacaacagcagattcctaa

SEQ ID NO: 18198 - protein, 332 aa, DROSOPHILA
MARKRKIPVRKHHGVRDPLKQLEQKEKKLSKVTNNPPVKKDEQQVSFKFRQFQQLANATKSGKKLRLGEIGREDKPKSSPGSKPGSSSSSKETRNIKQFANETDEDYLRRVNRMTNASVREAHYEAKYGVNVIRNPKTGEITVQKRPKNEIDELLKQKQKEQRLAGKRGRKKVQVVHKPMDAKTSRELVKRAYKEAQQEVDTEEKQNAGPTEFKQDAVAFGEIVHAPPSLKILPRKAEKSETVPRPGRKANLLLKSMLNPDQGQSNRGPEDDDSSRLKLAAQSKSAFKAPTKAQMKGKRKDLPLATRSMLETERSKMVQLYRQLKNKTTADS

SEQ ID NO: 18199 - DNA, 3101 bp, DROSOPHILA
gtggcactcagttccttgcactctccagttccattatcgcagaattcggataaaatactgcatattactgccaagattaacagaatcccgaatatcacttgcatttcagacgacgactatttcaaaactgaccaccgaaaataaaaacttggaaagttagttgataagcggataagtaataatgagagtttagaaaccagaccataataccattttttattatgggaattattgtataaagctgatagaagcattaagtaaaaagttagcagaatctattaataagatatcgtggtattattattcctatcttttttgacatgttaacaagattttaaaactttttagttagcgaattcacacaccttgtcagtgatgccactcttttgtaccgcaagcagaatggttggaaacatcgataaaatcgaacacatttcttcttgttccaccctaccctaaaattaggcagaccgttcgtggctaattgaataatttgcaaaaaaagcatgcaaaacaaattgatctattcataacaaatataacaatatgatttcataaatgagttataaatagcagaaatttacttgatattgaacctgtaaacaatttttattcacatttataattagtaaataacttttcaatgagtatgttcttagaataagaaatttatataatttaaatgccgccaaaagtcactgcaaatttatagctgatcccgtagctaagtttcacaaactaagcaaacatcgcgaaatattaattcatagtacatattgaagatagaaaagaacatccaagaagcgataaattgatattagtttgacttatatttaataaaactaataaataactttgtaaatgtagaatccgtttttatgttgtgtcggtatgtctaaaatatcacgatggtatttgtagtatattttcactgttcagccggtatttttagcgtacgtttgcgcggtcacactgctttaaatctctttccgtttttgtgcgcaaccaaaaaagatggccgatgtaaatatctatacaaaaatccaatgaaaaactcggcatccgtgcgggtatcgaacaaaatgccatacgaaacaccattagaagacttcgttgcacggctgctgatgttattctggagtttcgcagcgcgatttaccggctgaatgtgaaactaatgtcggtgttttttttcgttctatgcagcaagtcgatgaaaatctgaagaagaagcgtaccttcaagaagttcacctaccgcggtgtcgacttggaccagcttctggacatgcccaagtgagttgccagcccccaaaacgcccgctgtaatcagcaaataaatgtgattccttcgcccaatttagcaaccagctggtggagctgatgcacagccgtgcccgcaggcgtttctcccgcggactgaagcgcaagccaatggctctgatcaagaagctgcgcaaggccaagaaggaggcaccgccaaatgagaagcccgagattgtcaagacccacctgaggaacatgatcatcgtacccgagatgaccggctccatcattggcgtctacaacggcaaggacttcggacaggtaagagtgaaacagagaaggacaactttttagagcactacatggtgtgtcaatcgctaatccttgttcccgccaaaatgctcctcatgcatcttggttaggttggagctaagaagatgaagattatcatttgaaagtgattgacaaactaggtagagagctctaaaagataacccctctcaatgtccccatctagatcctagatccacacaactaacaccccattttcccccatccacaggtggaggtcaagcccgagatgatcggtcactacctgggcgagttcgccctgacctacaagcccgtcaagcacggtcgtcctggtatcggtgccacccacagctcccgtttcattcctctgaagtgagcgctgctcgtcttttgggctgttgagatgaatgatgcgtgaataaatgaaacgtacttttataagaacacacccccctcgtctgcgttgcgttttccatctaatgcttttccaaaagtaaaggagtggtcgccacttaagaaatgtacgttatctatttattggaacttttaaatcagtggccgctcgtctgtccccctgggaagctatctgcgctgtcgccgggcgatgttgtggctgctggagctggtggtgcgatcgtaggcggtgtccttcatcagcgagggacttctgctggccgccaccgccatctcgctgacatcgaccgatccgtaggcactgtctttaacttgagaagcatatgggagattagcgtagctcgagtgccgggcatcgcgaagctctgaaagtgcggcaaggatgactattagtgacaattagagtcggcggtcttgtcatcgccgaaagaaggagctcttgctgggtgttaggcccgtggatgtttgcaggtgctggttgagctgctgcaggctgtggctctggccgtggttaaaagcgcccaaagcgggataagcggcggtggctatggaggatttgaggatgctgcgactggagccgcgggtgcccactccaattgagttctttgcggcgggattggtgttcacatcgaaggtggttagcaggggattgttgctctgggtgcgctggttcagccgaggatcagcctcacctagacgattcaattcggtctccatggacgtgtacatagtcaggttgctggccagcagatcctgccgcgagcccagtgtcattaggctgtccgcgttgttcagcgtggacgctgtggtgctgtagttggaggcgggactggccgacttggaatacgccatggccacctgacccatctcgctgggtccctgctgcagtgcacccgtgcgtggatcgaagtgcttttgggtggcgtccttcagggtgctgttaatctcctttgcgctctccgccggacttgtgggcttgcgcagcgacgatatatgcccgggtagcggctcgcgcgagaccgacgaggatggggatgccgaattggtctcctcgttctcctcctgcaacaaagttggcggccattaacatgtaaccaatctttatgctag

SEQ ID NO: 18200 - DNA, 609 bp, DROSOPHILA
cgcaaccaaaaaagatggccgatcaagtcgatgaaaatctgaagaagaagcgtaccttcaagaagttcacctaccgcggtgtcgacttggaccagcttctggacatgcccaacaaccagctggtggagctgatgcacagccgtgcccgcaggcgtttctcccgcggactgaagcgcaagccaatggctctgatcaagaagctgcgcaaggccaagaaggaggcaccgccaaatgagaagcccgagattgtcaagacccacctgaggaacatgatcatcgtacccgagatgaccggctccatcattggcgtctacaacggcaaggacttcggacaggtggaggtcaagcccgagatgatcggtcactacctgggcgagttcgccctgacctacaagcccgtcaagcacggtcgtcctggtatcggtgccacccacagctcccgtttcattcctctgaagtgagcgctgctcgtcttttgggctgttgagatgaatgatgcgtgaataaatgaaacgtacttttataagaacacacccccctcgtctgcgttgcgttttccatctaatgcttttccaaaagtaaaggagtggtcgccacttaagaaatgta

SEQ ID NO: 18201 - protein, 148 aa, DROSOPHILA
MADQVDENLKKKRTFKKFTYRGVDLDQLLDMPNNQLVELMHSRARRRFSRGLKRKPMALIKKLRKAKKEAPPNEKPEIVKTHLRNMIIVPEMTGSIIGVYNGKDFGQVEVKPEMIGHYLGEFALTYKPVKHGRPGIGATHSSRFIPLK

SEQ ID NO: 18202 - DNA, 3505 bp, DROSOPHILA
cgcgatgactaccacttaccgttgtcgaaattctccttcagataaacctcggcactaataaagccgactgtcgccagcaacactatcactgttttgcaccacatcatgtgaacgatcccgcaccactttttggactgactcttccaactccgatggttgtccgaactcggttaaagttaagtactaaatgccggcaagaaagtgctatttatttattgcatctaaatcgtgcgtgtcggagcgggacggcttgttactgaaattggtttgctggaacgttttcattggcccaaatcaggccaatcagggatgtctacgtattctttttcaccggccagggctgatttcgataagcaatcgcatgctgccctgtcgctatcgattgcttgagctggaattagaaacactaaagtgaccgtttgctaattaaattaaattataaaatatataaaattaatatattctggcatacaattaatcacttgcagcaggctaagctaagaaaacataaaattactccaataacaattcttctactacttaacaattgtagtagttacaggaagaacagttgtgcttccagaacattcctaagctttttaacggcttaagggttttgaaaattttaactcacacttacatcacatgttaacaattaagttttcacccgataaagttcatagtatttaaaaagttagaatgttaattatacattataatacaaatcaaaaacaaataaaggaattccaaaactttgcacctgtatttcgttaattttaggaacttttttatctataagtgctaacttttacatttgactttattacattaaaaaattacaattttcgctggaaatgtattatattaataaaaaagataaatagccagaaatagaaaagtgaaattaaattaattaaaacaaaaaagctttggtatttataccaatagaccttctaaggtattttttaagacctagctttgtggcagatacggtaagttcgtgtcgagcccacgtgttgagccaatcttatcaaacgccgattcgaatgcggcattaaacaaatggattcccttaacaacggatggttcagcgaactgcaggccgatctctggcccggtcagtcattctccctgaaagtcaaggaggtcatccacaaggagaagtcccggttccaagacatccagatcgttgaaacgtaagataaataatagataaacaaatacttggacacacaaccccatttgtttacatccgaaattcctcagtctagactgaagtttgaagatagatgtcaaaataaattagcttagattgagattaaaaaactaaattaaaatcattataaacacgcaagtcacacaaatccgaaatttttaacagcttaagctgttgagattttaaggactaacctacaatagcctaatcccatatgtatcctacattgaaggtccctaaatcatagattgtagaaatcgaaaattttccactggttgttcaaacacaaattgcccagccagcattttcggaccctttggttttcgtgtgtttattcttgatctgcaccaacagccttatcgatggagtcatctagggccaaaaacgacagacagaatactgatagcaagtcagctcgtctttcaggtttgagttcctccagtcgaacattgggtacacttgcgccgctgaaaaaatcaataattcgataattctattacagcgaaacctatggacggtgcctaattctggacggaatcattcagtgcacggccagggatgagttctcgtaccaggagatgatatctttcctgccgctctgcgcccatcccaatcccaaaaaggtcctgatcgtgggcggtggcgatggcggcgttgctcgcgaggtggtaaagcatccactggtcgaggaagtgcatcaggtggaaatcgacgaccgtgtcgtcgagctgtccaagcaatatctcccagcgatggcctgtggtttcgccaacgagaagttgaagcttaccattggcgatggattcgactatatgaagaaacacaagaacgaatttgatgtcatcatcaccgacagctcggatcccattggtccggcagtgagcctgtttcaggaaagctactacgagctaatgaaacacgcgctgaaggatgacggaatcgtgtgctcccagggcggtagcttctggctggacctggactacatcaagaagaccatgtccggctgcaaggagcactttgctaaggtggcctatgccgtcacctccgttccgtcctatccctgcggccacattggcttcgtcatgggctccctgaacaaaaaccaggacttcgctactcccaagcttggaaagtccgaaatcgattctatagacctaaggtactactcctccgaggttcactccgccgcctttgccttgcctcgatgggtgcagaagcacttttacgaatgaccaggttgcggaaagattcgtgtgtatctgtttgttaaaaataaatatgataataatatgacttgtttatcatcgcttcttaaattcttggatattttcaacaaatgctgactcttgcaatgattcatttttagtcgaatttttgtagcctgagtattttccttccaatccgactaccatctttcagttattttactgttgaaaatagaacaaattgtaatgtttattacgtaatgatatatacagttggctctatttaatttttgtatttgtaagtggatgctgggttaacataatgagacttattgcaatattttacacgaccgaatgttactctcatttatatatcgcatatattgcaaaactttgaaaggaagcgtttcttatatgcaaaaatgaccttaactgcatgtgaataattaactaaaaactgatattcaatttcaataacttaatagaaattaaatcttcaacctgtttaatgactaattaaatattgttatagttaggaaacgcaattgatacataattacaaaattagatgtaaaatatgtacaatcatttaatattggtttttattttctcgcctattctaaagttaattatcatttcttttgtgtcggatagattttggtgtctaatgtgcgtgtttttatgtgtaataaatataatgtatgtgcattgcgattttggtagccgagctccagttttcgaaaaagtcgaatcattttgtgtccaattgagaactatttcacatttttcgaaatagatggataaactaattattgtgtgtgtacgaatactccactcctttgactgggtaaatttgaataaacctataaaaattcctaattcaagtataataattttgtctaaataaatcaatttgtaaatgtgtattccaaaaaaagaatcacgagcagttggaaaaaaattaataataatggttttgaaaaccggagcttgactgtgtataatttgttatgcgattgattttgtatagggaatttcatgtcttcgcgattacatttgttatagcgtgttttatattatcaat

SEQ ID NO: 18203 - DNA, 983 bp, DROSOPHILA
gtgtcgagcccacgtgttgagccaatcttatcaaacgccgattcgaatgcggcattaaacaaatggattcccttaacaacggatggttcagcgaactgcaggccgatctctggcccggtcagtcattctccctgaaagtcaaggaggtcatccacaaggagaagtcccggttccaagacatccagatcgttgaaaccgaaacctatggacggtgcctaattctggacggaatcattcagtgcacggccagggatgagttctcgtaccaggagatgatatctttcctgccgctctgcgcccatcccaatcccaaaaaggtcctgatcgtgggcggtggcgatggcggcgttgctcgcgaggtggtaaagcatccactggtcgaggaagtgcatcaggtggaaatcgacgaccgtgtcgtcgagctgtccaagcaatatctcccagcgatggcctgtggtttcgccaacgagaagttgaagcttaccattggcgatggattcgactatatgaagaaacacaagaacgaatttgatgtcatcatcaccgacagctcggatcccattggtccggcagtgagcctgtttcaggaaagctactacgagctaatgaaacacgcgctgaaggatgacggaatcgtgtgctcccagggcggtagcttctggctggacctggactacatcaagaagaccatgtccggctgcaaggagcactttgctaaggtggcctatgccgtcacctccgttccgtcctatccctgcggccacattggcttcgtcatgggctccctgaacaaaaaccaggacttcgctactcccaagcttggaaagtccgaaatcgattctatagacctaaggtactactcctccgaggttcactccgccgcctttgccttgcctcgatgggtgcagaagcacttttacgaatgaccaggttgcggaaagattcgtgtgtatctgtttgttaaaaataaatatgataataat

SEQ ID NO: 18204 - protein, 287 aa, DROSOPHILA
MDSLNNGWFSELQADLWPGQSFSLKVKEVIHKEKSRFQDIQIVETETYGRCLILDGIIQCTARDEFSYQEMISFLPLCAHPNPKKVLIVGGGDGGVAREVVKHPLVEEVHQVEIDDRVVELSKQYLPAMACGFANEKLKLTIGDGFDYMKKHKNEFDVIITDSSDPIGPAVSLFQESYYELMKHALKDDGIVCSQGGSFWLDLDYIKKTMSGCKEHFAKVAYAVTSVPSYPCGHIGFVMGSLNKNQDFATPKLGKSEIDSIDLRYYSSEVHSAAFALPRWVQKHFYE

SEQ ID NO: 18205 - DNA, 3519 bp, DROSOPHILA
ccacaatgggtatgtcgtccgtcatcgagttgtgcttgaggtagtactttccatgcttgctcaacaccaaagtacgtgacttcttttcgtgtgtggaggaggtaacctggcattgcaccacaccgttgaagtcctcggtgagcatcttgttccatgacagctgctcctgaatgaggataaccttctcctgacctcgcaccacaaagtagccgccaggatctagtggacactcattcagtttggacagctcgaactccgacttgccggtaagggcgcaattggagcagcgcagcatgaggggcatccttccgatgagcaaattattccgcttgatccgctgggttcccctcgtgtactcgatgtccacggtgatgggggcggagtacgtggtgtccctcagacggcattcgtgcggtgtggtcgctttggtgatgttgaagccatcgtcgatgtccggcttgcccacccgcacatccaagtactttaggtaaaacaaaggatcagctccactggtaaccagctcgttagccttcacaatcttttttatgtccacgttgatgaagtgattgaaggaatcaatgtgctgcttcactaatccttttacttgcaagaatgccggcaccaatttccacttctccgttagcggcttaatgggcaccgaccagtccttgctgtcgccgggatcccaggtggtggcctccacgttgtgatcgcccatctttagctccaccatttcgttataataatttaatttaagtttgtcaacaaaacagcgtgctatgaggttcttcgatatgcggtttctttacctatcggttatcgatatacttgggcaagtgatagcaaagttattcccatagagctggcagtgaaattaattcccgctaaatctagctttaatttatttaaattacctctgtgcgcgccaattaaaaaatttgataaaataaaaattagagggttttcttaaacttaagccgccttaaatccacgcacacataaagcacattcgttttttattttcgaataaaaaatgccatcaagtaatcaaagtgttatcgttgcacagagtctaaaccttcttcacaatctggaccacatcctcgtcgttgagaacgtgttcgatgcccaccttctgtggctgatgcttcacagatgagccccaaaccagcgcactacgaaggaaatacataaatgttattataaccaagggaacagagggaaagtgaagcgcactcactatttaaattccttggcaatggagcgatgcagcttgttgcagaaatcctcaatgctggtgcgctcgttgtggagtaccacgggcgagttgtaatcgggcagctggcccttgggcttggtgtagatgcgctgcagtcgcaggtattcccacatcagctccagcagatcgtcaaagttccagtggtgatgggccgagatgggcacgcaatgcgggatcttgtagatgacgtccagctcctcgatggagatctgatcgatcttgttcagcagatatatgcagggtatgtagatgcggttgccctcgataacgtcaatgaggtcgtcactagtggcgtcgtatctcagggtgatgtccgcattgtggatcttgtactcggatagaatggtcttcaccagatccgtgtccaactcggactgcggaaccatgctgttcagattgatgccacccttgtccttccgcttgtagtagatatttggtggtttcttgttaagccggatgccgaagccctccaattcatgctcgaggagtttcttgtggccaagcggtttcaggcaatccagcaccatgaaaatgaggttacaggtgcgagcgacagcaatcacctgacgacctcgacccttgccatccttagcgccctcaatgataccgggcaagtccagcagctggatcttagcgcccttgtacttaatgcatcccggcacagtggtcaacgttgtgaattcgtatgccgccacctcggagtaaacgccagccaagttggagagcagtgtggatttacccacagaaggaaaccctacgaatcccacccgggcatctccagtcttggccacctcgaagccagctggaaatacataatgtttagtgattgcctgaattatatatccaagagcctaccttcgccggttccgccgccgcctcctttgggggaaatcagttcgcgtcgcagcttagccagcttcgccttcagtagacccaaatgggccgaggtggccttgttcttttgggttcgggccatctaggattcagttgagaaggtggtccaacaacccggtgatttagatagaatccaggggggaatccgcggggtaaatggatgcgagacaggttagtttctgtaagatcggcaggtactccaagttccactcacctccgactcgatggccgagattttctccaatattgtgctcatggctggctgagagttaaacgcggttcacagaaaaccccagttatcaacaaatatgcatgtaaaaataaaatatataaaactctcgcgtggacagttggaggtgcaatcgatatgtattcgatacaatcgatttgttcagtaatgtggtcgattcccaacgttagccaacacttaacgaatcgtaaaagtattcttagacaaaattaaaatggtcaggctgattggaatatagccgttacaatttgatggctgcaagaatgtttgctaaaggttaagttccgcaattaaatactgagaactatttataaattaacaaaaaattaacattgtttcagttaaaccgcgcacccctctgggtaacaaccaagctcaatttaagagccaactgaccaacaacgtctcgcaattgaatcgcagttttccaacggccgctgaacttttgcgcaaaaatagcacccaattgcggcaaacaaaactaactgtctgtcgtaaggataataagctaatatacgatggattcgtggaggaagctgtgaaagttcagcccaaaaaggagaacgttccatcaccgattattctggaaaaatccagttgcgaaatgtcagccaaaaaggaatcagcggagttgccaagctccccgatgttgaagccaggacgaaacttaattagtttaattggtcgcgtggatttctgccttaaaactcaaaaaatgtatccggaaattaatgctatttggaatgtttacggtgggtctgaactgaaatacattcaaaatcaaattactatatacattttaaacagaatgattaatatcgctaaatttggcaagttaaatcattaattatcgtttttcaggaaaattgctacggatcattgtgggaaaacgtggagaacacaccttgctcgtgcgaaacaaagaatcggggcccgtccttcagggaatttactacgatttcgaaggcgttatgagtacttggagcccaggtaaaatgcaggaaactgataaccattacataaccaaagttttattcattaaaaggctgctttgtccatctcgtgggccagtttattggcgaaaatcgcttgaaaa

SEQ ID NO: 18206 - DNA, 1269 bp, DROSOPHILA
ccacgcgagagttttatatattttatttttacatgcatatttgttgataactggggttttctgtgaaccgcgtttaactctcagccagccatgagcacaatattggagaaaatctcggccatcgagtcggagatggcccgaacccaaaagaacaaggccacctcggcccatttgggtctactgaaggcgaagctggctaagctgcgacgcgaactgatttcccccaaaggaggcggcggcggaaccggcgaagctggcttcgaggtggccaagactggagatgcccgggtgggattcgtagggtttccttctgtgggtaaatccacactgctctccaacttggctggcgtttactccgaggtggcggcatacgaattcacaacgttgaccactgtgccgggatgcattaagtacaagggcgctaagatccagctgctggacttgcccggtatcattgagggcgctaaggatggcaagggtcgaggtcgtcaggtgattgctgtcgctcgcacctgtaacctcattttcatggtgctggattgcctgaaaccgcttggccacaagaaactcctcgagcatgaattggagggcttcggcatccggcttaacaagaaaccaccaaatatctactacaagcggaaggacaagggtggcatcaatctgaacagcatggttccgcagtccgagttggacacggatctggtgaagaccattctatccgagtacaagatccacaatgcggacatcaccctgagatacgacgccactagtgacgacctcattgacgttatcgagggcaaccgcatctacataccctgcatatatctgctgaacaagatcgatcagatctccatcgaggagctggacgtcatctacaagatcccgcattgcgtgcccatctcggcccatcaccactggaactttgacgatctgctggagctgatgtgggaatacctgcgactgcagcgcatctacaccaagcccaagggccagctgcccgattacaactcgcccgtggtactccacaacgagcgcaccagcattgaggatttctgcaacaagctgcatcgctccattgccaaggaatttaaatatgcgctggtttggggctcatctgtgaagcatcagccacagaaggtgggcatcgaacacgttctcaacgacgaggatgtggtccagattgtgaagaaggtttagactctgtgcaacgataacactttgattacttgatggcattttttattcgaaaataaaaaacgaatgtgcttt

SEQ ID NO: 18207 - protein, 368 aa, DROSOPHILA
MSTILEKISAIESEMARTQKNKATSAHLGLLKAKLAKLRRELISPKGGGGGTGEAGFEVAKTGDARVGFVGFPSVGKSTLLSNLAGVYSEVAAYEFTTLTTVPGCIKYKGAKIQLLDLPGIIEGAKDGKGRGRQVIAVARTCNLIFMVLDCLKPLGHKKLLEHELEGFGIRLNKKPPNIYYKRKDKGGINLNSMVPQSELDTDLVKTILSEYKIHNADITLRYDATSDDLIDVIEGNRIYIPCIYLLNKIDQISIEELDVIYKIPHCVPISAHHHWNFDDLLELMWEYLRLQRIYTKPKGQLPDYNSPVVLHNERTSIEDFCNKLHRSIAKEFKYALVWGSSVKHQPQKVGIEHVLNDEDVVQIVKKV

SEQ ID NO: 18208 - DNA, 3016 bp, DROSOPHILA
caaattatagtttagttacagaatttaatatattatttatgcacattttgcatatttctgaatattatatttcagtttacaaaacaacattttttccagtgcacctgcacgcatacaagcagaaacccacacccatatgcaacaatggcattgcctcgacaagattggctctttggcttaagtgaggacggcacgcatggggctcggctctcttttctcgagggaagtgggaaccagggagcacggatggctgccaggcaggtcgaggtcatgtcgctgctgatgtcgtgtgtgcgtgtggtgcgctgctggtggtggtggttgattgctccgactctttcctcctgctcttcctcggagacccttcttcagactgttgcgccggcgcacggcaacagcacgaggaagagagacgcccgaagagagcgcgctactagctcgggcgaagatccgaagaacgtgttattggaccctagtcaatacactgaaaataactttaaggcattctactattatgaccaaggttaaagaagctttgattaaaaataaattaatttctaaatatataaaagtttctaaagtacaataaaactattttttctttgtttatacttatcgttgtaagatactttagatgcatgagaaactttggtttccagaatggacatccaaagagtatgcttcgaaacttgtatattttaaaagtagtttatataaagtatagattttaaaaattgttctctgccacatatggattgttttcagtgcaagaagagagcctcagcggcttccgcccgatccaatttttttgatgttgcacacgtgcaacgccgagggaatcttgccacaagcagagagtgacccgattgatgcttcgttgtgatcgtcggcgtgtaggagcgttgtgatcgcagtgcgtggtggcagttaggggaggatttcgatttcgcaagtgtacggcaccagcagctacaaaaaggatcagcttaccttgcggcaagatcatttctcaagtgactaccgtgcagtgcggagcggcagcagcgacatcgcaacatcgcaactttatttacaaacaatcaccacaccaaatcaaaacccattatacacaatggccgttcagggtcagagatttatgaccaagactcagcattaccgcaaggtgaccaaacccctcctggagcgcaaaagacgcgcccggatgaacctgtatctggacgaactcaaggatctcatcgtggacaccatggatgcgcagggcgaacaggtcagcaagctggagaaagctgacatcttagagctcaccgtcaactatctgaaagcgcaacagcagcagcgagtggccaatcctcaatccccaccacccgaccaagttaacctggacaaatttcgggccggatacacccaggctgcctacgaggtctcgcacatattctctacggttcccggcttggatctcaaattcggcacccacctgatgaagcaattgggtcaccagctcaaggacatgaaacaggaagaagaaatcatcgatatggccgaagaaccagttaatctagccgaccaaaaacgttcaaagtctccgcgagaagaggatattcatcatggcgaagaagtctggcgcccctggtgaagggcattccatatatacgcaaccaattaacattgatagctttactactcagtttcattaagaaacaatccaagttttccaaggtctagtgtaaacatttgcctcagaatcgtatttagttggtagttgatttgatatgatgtgatgttcctgtgatagttcttaagttcgtattttgtatttgatctcccataggcttactgattcatgtatttaattcattgtaatttatttcatcaactttgcaagagcttccccaccgagcttccacttagcctcattaagaacaaatttttgtgtatgttttaaaattatatttttcgctttacaccattaagtataagccatgaacatttgaataataaaatgaacgtaaactgaaattttaaaagctttatattatttggaatatgaacataaacaaggttgctataatccataggtacataggtacaaaatgttataatatatataattattatattataattataatttataagctcttatttagctttcttcgatataaaagatatatcagatatatttaaatatatttctaaaatctaatttgaaatatatagaaaatatatattttccttggaattttaataatttataattctaaataccaaataccgttatactgtccacttgaattcaagtcaattgaactctccccactccgtttacaaatccctgtaatgcaccacccatccaaccatccatccattacaaaggtcctggaacgcgagcaacttacagccgaaagtgtgtccacagcgagccacacgcgagcagcgctccaggatcagcatcgctggccccttttacatggcggatggagggagaggcagaggtcctgccgggtcggggggatcgggaagtcgtacacgcattaagcgcactcgacgcacacgagcaatgttcccacaggatcataacagccgaccaacaagtgcaggatgcctctgtccttgtcccttcctctgccaccaaacacgaacccgatccaatttggaatgccaacggtaaacaggaagttgtcgaggaatcgcaacgcctcgtccttatccttatccccatcccccggcggaggtccccgctatcgtgggaaccccggaggaccccgatgagatggcataatgcaagcagttcattatccttatgcccctcaccctgccatgccatagtcaaatcataacacacaaatctagaaacggcagctgttcgctctgcaaattcccatgcccatggccgtggccatgctcggctgctttttgcgggcaggtgagcgagtcgatgtgagaaaccgagtaggaaagtgtttcccacgatcctggcagcgatcctgctccctggcccgtttgataagggtgccgg

SEQ ID NO: 18209 - DNA, 1016 bp, DROSOPHILA
gatcatttctcaagtgactaccgtgcagtgcggagcggcagcagcgacatcgcaacatcgcaactttatttacaaacaatcaccacaccaaatcaaaacccattatacacaatggccgttcagggtcagagatttatgaccaagactcagcattaccgcaaggtgaccaaacccctcctggagcgcaaaagacgcgcccggatgaacctgtatctggacgaactcaaggatctcatcgtggacaccatggatgcgcagggcgaacaggtcagcaagctggagaaagctgacatcttagagctcaccgtcaactatctgaaagcgcaacagcagcagcgagtggccaatcctcaatccccaccacccgaccaagttaacctggacaaatttcgggccggatacacccaggctgcctacgaggtctcgcacatattctctacggttcccggcttggatctcaaattcggcacccacctgatgaagcaattgggtcaccagctcaaggacatgaaacaggaagaagaaatcatcgatatggccgaagaaccagttaatctagccgaccaaaaacgttcaaagtctccgcgagaagaggatattcatcatggcgaagaagtctggcgcccctggtgaagggcattccatatatacgcaaccaattaacattgatagctttactactcagtttcattaagaaacaatccaagttttccaaggtctagtgtaaacatttgcctcagaatcgtatttagttggtagttgatttgatatgatgtgatgttcctgtgatagttcttaagttcgtattttgtatttgatctcccataggcttactgattcatgtatttaattcattgtaatttatttcatcaactttgcaagagcttccccaccgagcttccacttagcctcattaagaacaaatttttgtgtatgttttaaaattatatttttcgctttacaccattaagtataagccatgaacatttgaataataaaatgaacgtaaactgaaa

SEQ ID NO: 18210 - protein, 173 aa, DROSOPHILA
MAVQGQRFMTKTQHYRKVTKPLLERKRRARMNLYLDELKDLIVDTMDAQGEQVSKLEKADILELTVNYLKAQQQQRVANPQSPPPDQVNLDKFRAGYTQAAYEVSHIFSTVPGLDLKFGTHLMKQLGHQLKDMKQEEEIIDMAEEPVNLADQKRSKSPREEDIHHGEEVWRPW

SEQ ID NO: 18211 - DNA, 4416 bp, DROSOPHILA
cacactccattgataacacacactctccgttttgcgtttaggtgtcgccttggcgtgggtgtgcgtgtgcgccgatgtgtgtgcacgcgccccgtgtgacgatgtgcagtttttgcaattaaatttataaacaaaacactctttttccttcaatataattcacagacacagacaccactgaacaaattccttagtgttcgtgcttctcgttctctgacgccatcttgtgtgtgcgcaggccagggttgtcgaggtgccgcaactgtctaacatgggcggtcggaggtggcaacgctgttagggctaactaatagtgtgacccaatcgcttggtattgttaaattttccctcaacggtcatgctttgcataacaattcacattttctgattgaagaatccttattttatgccaaaacttgtattagatatataaaatatcgggatgtctctatcgccagccagtggcattggtcgtttctacgccaagtcggcaaaaatcatacgtttcgtacgcctgggatgcaccaatcggcctttttatcacattgtcgtcatggaggtgcgtacttttaggccattaaaatggttaaaacttttaattggtaattgtattttccggtttagaggcgcaagaaccagcaccagcctgtcatcgagcaggtgggctcctttgatcccctgcccaacgattacaacgaacgactggtggccctgaacacggagagaattcgctattggctgggcaaaggtgcacacttgtccacgccggctgcagaactcctgggaattgccggactactgcccatccacccgcgcacctacatgaccgcctggcggaaccggaggacagctgctgaagcggaggcgtcgccagaaaaggcggaatcaaccgcataaatatagttgtgcctcaataaaagcctccttttcgtttttacgtttaacaaacggagatttcttctggttcagcgaacactggtgctcttatcaacaacaaaatgaatacagaattaaaatttattgcaaaacgtaaccaatacgaggtgaggttggtgaccaggcccaaaaccaaatgcatggataagcgagaagcggtcggagctacggtacattcgccttctagtcatgcttcagcactccagcggctttcttcatgccatcatcgatgatcctgtcaacggctgtgtgcaaatattgatctccttttagtaaaattgcaatatctaagaggtgaatttactcacattcgtgatgtttcaggaagtagggtcgcaccagcttgttgtagatgatggtagaaccattctgttccgtgggcagcatgcaccagatgaggaaagcacactacatgtggagttgaagcatttaaaagaagattcttatatgtgaagaatgcaaagctcaccttcagcagccagtaaaagggaatcaccgaagttagcagactcgaaaagaattcaatcacggtgaagattccaaacgtgacccagtagatcagccacttggtgtcgtcctgctttgtgctggactcgatggcatggatggaaatatatgcagggtacagaaccccaatgatgttgcacagtagttgggcgccccagccaaagatcaggtagatggcgcacagaccaacagcacctacatatgatgaaatataataccttattagtaaatagcattaagtcactgctggagctctaccgtagcgcaggagggggttctctacgaacagttggacaattttgctctctaattcctcgactgccatgttcgccatctagttggtcaattgatattgccctagtggcgcattttcccttatggctataagcaggtccaagggcaggagcggttccacagggcgcagggtgatcagatggagttaacacttacaaactttagctacaagactaactgttccaagggcacagtgccaggtgctcgtacagctttcaagggcgccccttcgtggatccctggggtttttaaaccgccccatgccgttggctaattataaacccttagctgttgtcagtagatgtctcgacctgcctctgatcccggccagttgcattttgcccacccagatgagcggactacggcctgttgttttgccataaatttatgatgtcattcatgctcgatggcggctaattatatttataccctggctgagggtactttaatttgagcaacatcattgcaaaaaggtgggtttcattacaagccacagaaactatatccttagtcgatcagatcatttgatgtgaattgcgaattctccataaatggttgttccctaatatgcatatatttgtttacacaatttgttttgattattaaagtatgccgaactgttgaacagctaatgaggccaaatgtttgtatgatgaatcaacgtccgtcatttttgcaagtgtatatagacttcggttttgaaagatagctacttttgccattatgaccacattctcacctatgccgaggtaaaccaagggaactctgacattgcgccgcgtctcctgtcgctgtctgattagcataatatagtcccagagccacatcggtaactccggtgagcaccgaacgaacgaactgaaagctctaccaacgcacacaggtgagtgagtagattggctccacgtgtgccgacagcgccacgtctcaataattcagaccttttgaccccgccgaactggactttctccagatcttcgtctagagaatatggcaatggaatgcgccaaatgtattgctcaccgcgtactgggcaaaaaaaagtgtactttcgttgaagtaaacaaagaaaagcacaaaacatgaaacttttgtggataacagacgcacacatcgccagctgtctacgtagtcgcttacacgcacacatcgcatgctcacaaactgaggtgtattggttgcaggcactcggtgataatatagacacactatttaattgggctttgccgtttaagtcgtctgtttaattcgttaattggtcacctggcggctattaagcccccccgaccatcctgattcagccacatacacattgctatatataacaggttgctatttataagcatcccgaaatattccactgcatctctaggctaatctcaatggttacgcagtcaactagcagaaggttacatgggcgtttcggcgaaggacatgcgatgacgtcgccaggatattccacactcacccacgaaaatattgacccggtccacgccggtcttctcctccacggtatcgaagactttggtccacggcttggaagcatcgcgcagcgatttgctcacgtcatccttgtagccgtttaagaactgcttcacctgagtggccattttgcgcaaattgtttttaaatatatatagtcaatcaaaaatatgtgacgccgccgactttccagatgccagtcgatagtttgtgcttgcgcctatcggtgccaaatggactattgacaatcgaagacatgatgcgttattgttcgcatctatcgccgcctatcgataaggagaggtcatactaaaattgcaatactggcggctttttctttttcacagtaaatatttgcaaacagcaaataattattttaagcttttattagaaaggtaaatatgttatgcagcaaattacataagaaaaaaaacttatagcagttgacgtgcattcaatggtaaactcatgggatcatttttgatgaacaattttattatttataaaattataaattttaggattgtcacatcgtgggacttaacaattgtatgcgaggatttacagtaatctagttggctccatgaggactggactcttcagtttctgcgctgggagaaaacataacgatctcgcaaatggagcaacttttcaaaaaacacaaatgtcaaggtggtgtgtggagcactacgaaagtatatgggccaaaagcccttgtacatcccatggatcccttcggttctccagattttagtgaaacagtccaccaagcccttgtacatgagtccacgccccttttcatccactggctggttgtacatccgtgtggtgagcacatcaaagggcgaattggccactgccacaagggttcccgacgataggccggcacagaaggagaggagaaccggatgggtgatccagcctttatccttcagaagggacttggctttgggaaaggtgccgatctgtacactggaggccacaagcgttcggttcaagcttggtaaagcagcgcgccagaatcctgaaatgccattggtccggtaaatatgcagcagggcatccatcatcgaagtatgcttgtgctgaaagcctacggcaatggactgaaccgcctgggcatgctgttgggcctttatctgtaatggagggagatcagatgggaagctctagcggatctactcaccatgtagaagg

SEQ ID NO: 18212 - DNA, 725 bp, DROSOPHILA
gcatctggaaagtcggcggcgtcacatatttttgattgactatatatatttaaaaacaatttgcgcaaaatggccactcaggtgaagcagttcttaaacggctacaaggatgacgtgagcaaatcgctgcgcgatgcttccaagccgtggaccaaagtcttcgataccgtggaggagaagaccggcgtggaccgggtcaatattttcgtgggtgctgttggtctgtgcgccatctacctgatctttggctggggcgcccaactactgtgcaacatcattggggttctgtaccctgcatatatttccatccatgccatcgagtccagcacaaagcaggacgacaccaagtggctgatctactgggtcacgtttggaatcttcaccgtgattgaattcttttcgagtctgctaacttcggtgattcccttttactggctgctgaagtgtgctttcctcatctggtgcatgctgcccacggaacagaatggttctaccatcatctacaacaagctggtgcgaccctacttcctgaaacatcacgaatccgttgacaggatcatcgatgatggcatgaagaaagccgctggagtgctgaagcatgactagaaggcgaatgtaccgtagctccgaccgcttctcgcttatccatgcatttggttttgggcctggtcaccaacctcacctcgtattggttacgttttgcaataaattttaattctgtattc

SEQ ID NO: 18213 - protein, 178 aa, DROSOPHILA
MATQVKQFLNGYKDDVSKSLRDASKPWTKVFDTVEEKTGVDRVNIFVGAVGLCAIYLIFGWGAQLLCNIIGVLYPAYISIHAIESSTKQDDTKWLIYWVTFGIFTVIEFFSSLLTSVIPFYWLLKCAFLIWCMLPTEQNGSTIIYNKLVRPYFLKHHESVDRIIDDGMKKAAGVLKHD

SEQ ID NO: 18214 - DNA, 2697 bp, DROSOPHILA
gagccgccctgaggaccagcgatggcaccatatactccggttgcaacatcgaaaacggggcgtatgccacctgcatttgtgcagagcgcactgcagccgtcaaggccatcaggtcagtgggtcaatattctctgggtcacatacgcatcgcttgagatctatccacaggaaatactgaaagtaaagcgttagtcacagtaaagcttatcttggattaaaaacttagatttcaatatattgagataacccttgacagcaatgaggaatgttaatctgtaatgacaacactattacttaaattcttacatacttaattatcctctccaagtcctttcgaataactaaaataacacatttttacagtgaaggcaaacgcgactttgtggcttgtgcagtggtggcccagcaggataatggcttcaccacgccttgtggcgtctgccggcagttcctctcggagttcgtcaacggcaaggacatccccctgtacgccgccaagccgaccaatcttccattgagggtgctctgcaccagcgttctccaactgctgcccaacggctttagcttcgccaacggaaaatagaaaagaatatcccagcccagcccagccggacagggtgcaatccatgtgcaatagtttatgtgacatcccatttataatgttctgtaaacccacccctcgttatttgttgattgaatagcttatacgagatacggcatctgtttgtgtttttcactgctctccgcgatcgcgatcgttgcttatcagcctgatacctggttctctctcgcgctccgaattggccaaatgtttatttctgtcaccactacacggcggagagtgctatcagcatagccaacttcgggcgccgccgtcaccacaaaccgtccatttgccatcggacgttcaaaggagaaacacacgcactcaacttgctaaaaataattcaaaatttaagaaaataggcgtgcctctattgaccaaaagaattgaactataatgacacatctgacaaaaaatttcgcacgtccagaaaagaatgaggaggttgtgaccttcggcagtctgggtaagattccttctcgagattgagaacaatctgagaacaatccttaaatatctacgactgtcaattattcaaagtggttcttatgatattaaaaataataatgttataaattaatactccttacactcattgacaagatctaagtttaattcttgagcgtggcgtgcattgtttcgacttccagatccgtcggttcaagaacttctgacagctgcttttcaagtgcgccagcgggcatacgttccatatagtggcttcaaagttggggctgcttttcgggccaaggtcgatggaaagatcttcactggctgcaatgtggaaaacgccgcctttacgccgggctcttgtgccgagagaacggccattgctaaggccgtaagcgaaggagccaccgaatttttggcaggtgctgttttggcctacgaacctaatgtattcaccactccttgcggcgtttgtcgtcagtttatacgcgagtttgccaacgcggatatacccatatatgtggcccaggcgatcgatgcgaggattgctgaaaagcaggaacttttgcagagtgacgatcccgtcatgtgcacctcaatctttaatctgttgccgagcagttttcacacctatcgaaagtaacgaccactgcaggcaagaaccgaaaataggcagaaggtagctaggtaaaggttgtttctcaaccccttgctgcctctaatcaatataattttgatctaatcacttgcaataaagaaaattacactacttagcagtgtttaatgtttttttttcgatcaatgaataggaaatggggatataaatgctggaaagattgacacagtgaaagattctaggaaaaggtgtttaatcgcttttgattatatatcaaaattaaggttataaattaaagatatcgaatttggattgacaactgctgacgttaagcgcaatgcagggaatgccccgatttgtgatgacgtgataaatgcactcaacttctgattcataaacaccaaattattgtgagattaaatttcgccatttgtatagtagcgaaaataagaaagatcattgtggtagtggcaatcttttaaatcaaatttataaggtttgtttccaattcctttggattctagtttttgagatcatgatgttcatacgaacaataagacagactggctagaccgatgtcgcgataaaggcgcgttcaaaacgcgtccgaaacgcgtcgaaaacgcgcgagctttttcgacattcttaatttgtaaaaattttaaacgtatttagttgttgttgttgtttcattaaatgccttaatgaacatcaactgtaataaatgtaataaaaattcaaatggcgctaaataatataatataatcatttttatgaaaaagaaacaaaaagaaaataatttgtttgacattagtgttttacaaattgccaacagatacagcatttgcttctggctttcaaaaattgttttcgttttaaaaatttgaagttctgcaaaatgtccgaaaagcggaagctccttcagcgctacatgcggaacctgagcgacctacaggatgagctgaagcgaaaagagctggagaagaagatgaaggaactggaaatgttgcaggcgaagctagctcgt

SEQ ID NO: 18215 - DNA, 513 bp, DROSOPHILA
atgacacatctgacaaaaaatttcgcacgtccagaaaagaatgaggaggttgtgaccttcggcagtctggatccgtcggttcaagaacttctgacagctgcttttcaagtgcgccagcgggcatacgttccatatagtggcttcaaagttggggctgcttttcgggccaaggtcgatggaaagatcttcactggctgcaatgtggaaaacgccgcctttacgccgggctcttgtgccgagagaacggccattgctaaggccgtaagcgaaggagccaccgaatttttggcaggtgctgttttggcctacgaacctaatgtattcaccactccttgcggcgtttgtcgtcagtttatacgcgagtttgccaacgcggatatacccatatatgtggcccaggcgatcgatgcgaggattgctgaaaagcaggaacttttgcagagtgacgatcccgtcatgtgcacctcaatctttaatctgttgccgagcagttttcacacctatcgaaagtaa

SEQ ID NO: 18216 - protein, 170 aa, DROSOPHILA
MTHLTKNFARPEKNEEVVTFGSLDPSVQELLTAAFQVRQRAYVPYSGFKVGAAFRAKVDGKIFTGCNVENAAFTPGSCAERTAIAKAVSEGATEFLAGAVLAYEPNVFTTPCGVCRQFIREFANADIPIYVAQAIDARIAEKQELLQSDDPVMCTSIFNLLPSSFHTYRK

SEQ ID NO: 18217 - DNA, 2842 bp, DROSOPHILA
aattttaataatttataattctaaataccaaataccgttatactgtccacttgaattcaagtcaattgaactctccccactccgtttacaaatccctgtaatgcaccacccatccaaccatccatccattacaaaggtcctggaacgcgagcaacttacagccgaaagtgtgtccacagcgagccacacgcgagcagcgctccaggatcagcatcgctggccccttttacatggcggatggagggagaggcagaggtcctgccgggtcggggggatcgggaagtcgtacacgcattaagcgcactcgacgcacacgagcaatgttcccacaggatcataacagccgaccaacaagtgcaggatgcctctgtccttgtcccttcctctgccaccaaacacgaacccgatccaatttggaatgccaacggtaaacaggaagttgtcgaggaatcgcaacgcctcgtccttatccttatccccatcccccggcggaggtccccgctatcgtgggaaccccggaggaccccgatgagatggcataatgcaagcagttcattatccttatgcccctcaccctgccatgccatagtcaaatcataacacacaaatctagaaacggcagctgttcgctctgcaaattcccatgcccatggccgtggccatgctcggctgctttttgcgggcaggtgagcgagtcgatgtgagaaaccgagtaggaaagtgtttcccacgatcctggcagcgatcctgctccctggcccgtttgataagggtgccggggccaacaataagaaatcgcccgaacaataaggagcggtctcaagaagcggaagggtcggtaccgagcaaccctcatgccagcacacgaagcgtgtccccgtcccttttgctcctcgaatgccagcacacacgacgacgacgacgatccctttggcccattttttgggggttgtttctggccagctatataaggccgatcaccgaaggtctagcaacacacaacgacttcgactgtcggagcagcaagagctcaaagaactcagcttacatcgaaactacaaaaagaacaataagaaacacacaaaatgtcgtcgctacaaatgtccgagatgtccaagacctatcagtaccgcaaggtgatgaagcccatgctggagaggaagcgtcgtgccagaatcaacaagtgcctggacgagctaaaggatcttatggttgccaccttggagtccgagggcgagcacgtcacccgtttggagaaagccgatatcctggaacttaccgtcacccatttgcaaaagatgaagcagcagcgtcagcacaagcgggcttccggcgatgagagcttgactccggcggagggcttccgttccggctacatccatgccgtcaatgaggtctcccgttcactctcccagctgcccggcatgaatgtcagcctaggcactcagctaatgacccacctgggacagcgcctcaatcagatccagccagcagaaaaggaagtcttgccggtgaccgctccactctccgtgcacatcgccaatcgggatgcctactccgtgcccatttcgccaatctccagctacgccggcagtcccaactccaataccagttcgaccagccattccctgttgaccaccatcgatgtgaccaagatggaggacgacagcgaggacgaggagaacgtctggcgtccctggtagataggattacttcacaccacaactgaaaaaaaaaaaaacgaaggagagatcatagaaagtaaaagtcttccgagtcactggatttccaccagtcgactcccacctagttataagtaaacaccataaacacacaaagctttagatgaggacgcgcagttcatgtgataactaaataaataataaattatatagctaaaattgaaagatcacgactttttctgccactatctagtgactcacatgcaaattgctcagacactcccatgtccagacagtttccaattgtctgcggtctagaacggaaacgctagaaacgcaatagcacctctctctgtcccctgtaactattcgatcgccccacggatgcacatacacgatcgtcggacaaaagaaagcgaaaacaatgccaaggccgaaacaagaagaattaggcagaagaacgagagaagaaagaagtccaaagtccaaagccggggctaccgataccgggacatagcctataggccagttggtggttgcaactccaacacgtgtgcggacaataagcgaaggtaacagaaaatattagagtcttatctttgagcgtatctaatcgagttacgacaatgtcgctcagacttagaagaaaacaaatgggcatagagccggcaaggaacccgaaaaaaaaaccgaaaaccaaaaaagggatcgagtcatcattcatcccgcatccgtcctgatttcgctttgttctcctcaattttttgttgccgtgattctccctggccactcggatagaaaatcgtgtgcacaatggtcaaggtaagctatgggcacataattgcttcggatcaggtaaatgactgccttgccctagggcaactttaagatggaggagctccagccggggacaggatatcggtttttttgttgtttcttttttatgggctctgcccgagccttttttgattttcgttttttttttctgatctggctgacccagcatcatttggttatctgtgtgccaagaccagtagccgattcacagacgcctctgtcttaaaaatcgacgcagggcagatcgagggaatagtcaacgagatcggtatcaggattggcttgggactagtctgtgctggcggggtgtaataaatttaaaa

SEQ ID NO: 18218 - DNA, 842 bp, DROSOPHILA
aacgacttcgactgtcggagcagcaagagctcaaagaactcagcttacatcgaaactacaaaaagaacaataagaaacacacaaaatgtcgtcgctacaaatgtccgagatgtccaagacctatcagtaccgcaaggtgatgaagcccatgctggagaggaagcgtcgtgccagaatcaacaagtgcctggacgagctaaaggatcttatggttgccaccttggagtccgagggcgagcacgtcacccgtttggagaaagccgatatcctggaacttaccgtcacccatttgcaaaagatgaagcagcagcgtcagcacaagcgggcttccggcgatgagagcttgactccggcggagggcttccgttccggctacatccatgccgtcaatgaggtctcccgttcactctcccagctgcccggcatgaatgtcagcctaggcactcagctaatgacccacctgggacagcgcctcaatcagatccagccagcagaaaaggaagtcttgccggtgaccgctccactctccgtgcacatcgccaatcgggatgcctactccgtgcccatttcgccaatctccagctacgccggcagtcccaactccaataccagttcgaccagccattccctgttgaccaccatcgatgtgaccaagatggaggacgacagcgaggacgaggagaacgtctggcgtccctggtagataggattacttcacaccacaactgaaaaaaaaaaaaacgaaggagagatcatagaaagtaaaagtcttccgagtcactggatttccaccagtcgactcccacctagttataagtaaacaccataaacacacaaagctt

SEQ ID NO: 18219 - protein, 205 aa, DROSOPHILA
MSSLQMSEMSKTYQYRKVMKPMLERKRRARINKCLDELKDLMVATLESEGEHVTRLEKADILELTVTHLQKMKQQRQHKRASGDESLTPAEGFRSGYIHAVNEVSRSLSQLPGMNVSLGTQLMTHLGQRLNQIQPAEKEVLPVTAPLSVHIANRDAYSVPISPISSYAGSPNSNTSSTSHSLLTTIDVTKMEDDSEDEENVWRPW

SEQ ID NO: 18220 - DNA, 3055 bp, DROSOPHILA
acgtcatatgtacatagatttgtacattgatagcatttgatatagatatgaatattaaaaatagatgcccagaatggtgaagatggacaggagaatggcaaacggcagccaggtcttaataaaaccccctattccgacgtagcggccgcagacaaagagccacatgctgaggataatcatgttccatgcggtgctgtcgtagtagcgcatgtagatgagtgccgttgccacatgcgagtggcagttgtcacagaagatattgtggatgcgggtgccgtagagcacagatgctttggagaccgcctcgtcccaggcgtaactgccgcccaccatgtgcttggggtgcaaccttatgtaccgggtgggtcttccaaaggccatgttgtcctctgatacgaagtaggggccggcgaagtcacgaatcacaccggacgaagtgcaaatgcccatatgtccgatcatgggcatcagccaggtgagaaccggaatgggagtccaaacgatgcagtaggggaagcgttggtcctttacgttgatcggaggcagtctatccggaacgccattgccggctcctcctccggaactggccatcgagatctgaacgtcctcggactgttgccgctgcggacttgggtttgtcgacattattacactgtattaggttgatatttgtgcggggaagccacaagaacagtcactcacggtcttcccggccgtaatgcccatgaaacgagtcgctaacaattccaattgggctttaattgtacgataaggagaaaataaagcagtcgcagttcactcacatctacctcagtatttattgacatggagattgacagtgttggaaagcattgctgtatggcagaggcgtctgaaagggggatccagagaccacgtacaaacgtagtcacacgaaattttcaactccgcaaagttgacaaattcttttttttatttaggtatgtatttggaaatatgtttctacatttgtggaacagcaatgttagagccccataaactttacttctgtgtacgcccctgcagcgaacagctgttgcagcagttgccattgcgttggaagtgagaactggtgctgtgtttattggctgagctgctacttctattgtgaaatattcattaacaatcgcttggccatgacacaggtgtttatcaatggtgccagagacgatctcaatgtacgggaattccagagcctgggtacgaagtcgtgaaacattgccatgtcactataatttgtggtcctttctgcagatccttcgattcaagagatcatcctggcagccacggaagccagaaaacaggcttattgtccgtacagtaactttgccgtaggagccgccctgaggaccagcgatggcaccatatactccggttgcaacatcgaaaacggggcgtatgccacctgcatttgtgcagagcgcactgcagccgtcaaggccatcaggtcagtgggtcaatattctctgggtcacatacgcatcgcttgagatctatccacaggaaatactgaaagtaaagcgttagtcacagtaaagcttatcttggattaaaaacttagatttcaatatattgagataacccttgacagcaatgaggaatgttaatctgtaatgacaacactattacttaaattcttacatacttaattatcctctccaagtcctttcgaataactaaaataacacatttttacagtgaaggcaaacgcgactttgtggcttgtgcagtggtggcccagcaggataatggcttcaccacgccttgtggcgtctgccggcagttcctctcggagttcgtcaacggcaaggacatccccctgtacgccgccaagccgaccaatcttccattgagggtgctctgcaccagcgttctccaactgctgcccaacggctttagcttcgccaacggaaaatagaaaagaatatcccagcccagcccagccggacagggtgcaatccatgtgcaatagtttatgtgacatcccatttataatgttctgtaaacccacccctcgttatttgttgattgaatagcttatacgagatacggcatctgtttgtgtttttcactgctctccgcgatcgcgatcgttgcttatcagcctgatacctggttctctctcgcgctccgaattggccaaatgtttatttctgtcaccactacacggcggagagtgctatcagcatagccaacttcgggcgccgccgtcaccacaaaccgtccatttgccatcggacgttcaaaggagaaacacacgcactcaacttgctaaaaataattcaaaatttaagaaaataggcgtgcctctattgaccaaaagaattgaactataatgacacatctgacaaaaaatttcgcacgtccagaaaagaatgaggaggttgtgaccttcggcagtctgggtaagattccttctcgagattgagaacaatctgagaacaatccttaaatatctacgactgtcaattattcaaagtggttcttatgatattaaaaataataatgttataaattaatactccttacactcattgacaagatctaagtttaattcttgagcgtggcgtgcattgtttcgacttccagatccgtcggttcaagaacttctgacagctgcttttcaagtgcgccagcgggcatacgttccatatagtggcttcaaagttggggctgcttttcgggccaaggtcgatggaaagatcttcactggctgcaatgtggaaaacgccgcctttacgccgggctcttgtgccgagagaacggccattgctaaggccgtaagcgaaggagccaccgaatttttggcaggtgctgttttggcctacgaacctaatgtattcaccactccttgcggcgtttgtcgtcagtttatacgcgagtttgccaacgcggatatacccatatatgtggcccaggcgatcgatgcgaggattgctgaaaagcaggaacttttgcagagtgacgatcccgtcatgtgcacctcaatctttaatctgttgccgagcagttttcacacctatcgaaagtaacgacc

SEQ ID NO: 18221 - DNA, 709 bp, DROSOPHILA
atgttagagccccataaactttacttctgtgtacgcccctgcagcgaacagctgttgcagcagttgccattgcctacttctattgtgaaatattcattaacaatcgcttggccatgacacaggtgtttatcaatggtgccagagacgatctcaatgtacgggaattccagagcctggatccttcgattcaagagatcatcctggcagccacggaagccagaaaacaggcttattgtccgtacagtaactttgccgtaggagccgccctgaggaccagcgatggcaccatatactccggttgcaacatcgaaaacggggcgtatgccacctgcatttgtgcagagcgcactgcagccgtcaaggccatcagtgaaggcaaacgcgactttgtggcttgtgcagtggtggcccagcaggataatggcttcaccacgccttgtggcgtctgccggcagttcctctcggagttcgtcaacggcaaggacatccccctgtacgccgccaagccgaccaatcttccattgagggtgctctgcaccagcgttctccaactgctgcccaacggctttagcttcgccaacggaaaatagaaaagaatatcccagcccagcccagccggacagggtgcaatccatgtgcaatagtttatgtgacatcccatttataatgttctgtaaacccacccctcgttatttgttgattgaatagc

SEQ ID NO: 18222 - protein, 158 aa, DROSOPHILA
MTQVFINGARDDLNVREFQSLDPSIQEIILAATEARKQAYCPYSNFAVGAALRTSDGTIYSGCNIENGAYATCICAERTAAVKAISEGKRDFVACAVVAQQDNGFTTPCGVCRQFLSEFVNGKDIPLYAAKPTNLPLRVLCTSVLQLLPNGFSFANGK

SEQ ID NO: 18223 - DNA, 7871 bp, DROSOPHILA
gcgattgtttcggaattcttatttttcgccagcgtagattcgcaaagaattcgtccagcggtaacgtagacacacgcactttagcgaaaatccttaagtgccctgacttcttctacacgcatatgtaattttgtatgtatttaaacaaacggctgcacttttagacgaaatccgcagattggtcgttcacgcatccgtagtacacgaccgctcgttgccaactgctctcggttctggtatttaaaaaaagatattctgagcaatgcacgcgagcgttttcgaaaagttttcgaaatatgtttgcgagtcagttgtgggaatattgggaaagagtgtgaaccagagcaggggattgcacaagatgaaagccaatatagagtagggctaacagtgcttaaccctctagttgccaagaagatatatatttcgctcaaaaggagaaatggaatcttatttattgttaccttatatttaatgcgctatttaatacaaagaagaatgttgactctgaaataaaataaattatataaaatgtatatttattatatacataaattaaaacaaccttttccaacaattcaaagaaaacagcgggttaacatggcccagcagaaatgtctctcaagttaacagcagcatcctcagttaacagcgcacacgtacagcgaatgctgtcgcacacagagacagtgtgcaccagtacacgcacatcgcgtatacgccacgttgtcgctgtatatataaggcaactctaattggtcacttccgttccggttccgtcgacgtttccttggcgcatgcgacttctggctttcagaattgggatttcagctctagaggttcaacttcaccgctgcgcttgacacacacacaaaacttttccgcacataagtggcgctggtgtgtgtgtgtgtgtgtgttggcgagtgttgggttgtgtgtgagtgtgataagagatgcagccgacgtaacggtaaccacttgtcgcgggctataaaagcagccgctggccagcagccatttgcaaacgctcgcatgtcaccgaaggcgcaacagctccgattttgaaatttccaacacggccctcaagttgaaagttttccaaaaaaatttaaacacctccgcccatgtgaatgtgaagtgaaattcgggtttggcattcggcattggttgtgtggagcttttttctaagttttctggatatttttcaaaagtctcaaggattatttaacaatggattggagcaactacatgatttgagcttgatatttataaggtaagtaagcatataaaccagtttttaggtatgcattcaaataactgcgatgggaattataaaatcgaatgaggagaataactgaataatttaaagcgagcaacaaataaacaacataatatctttaagaacctagttttcaagtgcagctggcttaaagagatcaaaaattaaatattcattagctgaatcatgttgggcatggtgttaaaaaatcgctgtaaaatgcaaaaatttaaaatgttaatgattacagatggaaatactgataggtgataacttcaaaatgtgttgtatgtttgataagaaagcaataaagaaagaatgtaaaatttaaacactaatttaaagttgttaatttaaacaccacaccaaatttttaatattctttaatattactgtaatactttgtaaactggccaactaagattgccatcgaatctggaacaaaaagatggattctagtcataaattaacccagcgcagctccgagtactttaagcactcaatctgcatttcgcttaattgatcgcaactcagggcaattaaagtcagcggggaggaattaagtagatcagattaattgtttgacgtgtttgtggtttcattacacgcaaagatgcccgagagttgggcacatacatatagacggatatatgtacatatgtatgtatgttcttgttctgtggtgtggatggtcaagtgtttgctgcccagtgtgtttgaacatgccacctgtcgtatgcgtaatgtgccaacgagctcttcaagggctgggtaagcacatgtcgttgccaaacaggtttcaagtgccctggacacacacttattgaagcccattgattggtgaagggttttggattttgcgtggggtactgggatttaaatcattgaatatggttcttatttctggcatatctgcgcaactgacccattttgagtgctgcgattttcacagatttcaaagtgcggcggcgggatctccacattttgggtcaaggacacgacgggttatatagtcgcagatgtcaccaaccggacatatatccaaatcaaagacgcccacgccacacgataacgataacaatagcatcagcgacgagcgcgaaacatggagcggcaaagtggattttttattatcggttattggattcgccgtcgatttagcaaacgtctggagatttccctatttgtgctacaaaaatggcggtggtaagtagattcttttagatcctacactattatacagaagaagatcactattaaattggatacataaataaaaaaaaggtgtctaaaggcgctctaatgttattagactgttttatgataatcttaaaaccatatcatacctttaagatactttctttatacttcatttaagatactttcagccaatgttggtgatttttctccgtgtgaactggccaattaggggataaagacatttcgtcaatcgctctggctgagtgaatataatttatatggctttacacatcattgggctcgccacggaacccgtcgctttcctctttccgctttctgaatttccctttcggccttgttaacactttgtcaaagtggtgcgaagtgctgtcggtggggtggtgcgggaatggttcctttgtcaaattgcagggcttttccccgctaaaagagcggcaaaggacacacagtcgaacacttacttcgcttcctgatcctcatcgccgacgccatcattcaaaacaattccaaaagttaagtgcttctgtatgacaactaaatctggcagtcataatcgcatttggcctgcttaccctctgtcacactttttcaccccattttcttggcaatatgtcagcctgcttatgtggagttctctaggcttttgttgctggagcactttccaccatcgcattgtgggaaattcatgtgcgaaacatgtctccatgtctccacctccccattttccctctgattgcggcactttcccgctgatgcgtcgtgaatggatgtggcacacagggccttcgatatagttattactattttatgagttttctttttttcctcctgctaacccccggtcgctgctgctgctgctgctttaaaatcataataataaattgttatatttatacgcttcattgcgttcaatcagtggttccagctccatcttcagcttaagttccattttatgtccgttgccaggggcagcaactcgctcaggttgcgattattaccacagcttagtcggtattatttattctgtttcccattttcctgctgcctgcaactcggaagtggaagctttggtggcagcaacaggctgtgccatccacattgttctggattagggctaaaactcaaggagctgcctggctttttttcaaactaagatcgcgcatacgcacttgattgtacttgggttaactatgtatttcaataaattatattctttattcttaaatttgtctaaaagtttagatttctatttggaactgaaggacttaatggtgagactttgcacctcagcttaaaccagaatagtcctacacaaatacatgtaaaaagttattcacaagcatttaagtaggcataactttcaataattcaatagaatatcaatttgctagtcaagcaataaccaacacttggccgtttaaaattggacaagttttgaccgaattacgggatgggaatcgaattagaggcacatatttccacagtgtctccgacgagctgctggaaaatggtggaaatgcacttgaagcaacggaaattatggcttcaacaacagagacgagcgtcatggatgcccccgacttcagtttagacggttttgttttaaatttccgacataattgacacgacagaaggaagcaccgtagctggcagaccctttgtagatatactttgcaccgaacgcccttgcatacagttgggtgtatgtgggttttggccctagacgactttgtcgtcggccactttgcctgctaatagacataatcaaatcatagaacatcatcccctgccactcgacaaagtatcgatggcactctaaccaattgtctggcccaaaaggggcgtgtaactttggctcggctgcttttccggaggtgacggagatgacggcgatgactgcaggagacagccgagttgggtttttccccgcatattccgcctctcacccgccagcttgctgctgctgttaatgtttttaaaatgtccttagagtggcacttgtaaaacaatttgattttgtgtgccatcgaacatatacataaaggtcgagtgtgtctatatagaaactgtgtgtgtaattatgtttgtcgatgagggggcagcgcgaacaatgcacagattgtgacacgggtcagtctcaatatgtgatggttatgatgcaatcattatcatagaaaacatattgattgtttctacagctcgaaaataagttggttaaaaattaccggatgtaatgcggagaatatctacgattgtgatttggaatcgtagcttccagttcattgaaatataatcaaattttattgaatccgtatgttctcttagactagatttaatttaaaaatatgtgaaattttaggcgcttttcttgtgccctacggcattatgttggtggtcggtggcattcctctgttctatatggaattggccctgggtcagcacaatcgtaagggtgccataacctgctggggtcgcttggtgcccctcttcaaaggtaattactaactactaactaattaatcacaagaacttcatggataagacactttaacttacaggaattggatatgccgtggtgctgatagccttctatgtggacttctattacaatgtgattattgcctggtcgttgcgtttcttttttgcatccttcaccaactcgctgccttggacgtcgtgtaataatatttggaacacaccaaattgtagaccggtaactagatacataaccatttaatataaatgaatccttattaattctaacttcttatcagtttgagagccaaaatgcatctcgtgttccggttattggtaactatagtgacttgtatgccatgggaaatcaaagcctgctctacaatgagacatatatgaatggttcgagcttggatacgtcagcggttggccatgtggagggttttcagtccgcagcatcggaatattttaagtgagtttgctgaaatattcactttataattgtagttaaatttaatttctcgtatagccgctacattttggagctgaaccgcagcgagggaatccatgacttgggcgccatcaaatgggacatggcgctgtgccttctgattgtctacttaatttgttacttctccctgtggaagggtatcagcacttcgggcaaggttgtgtggtttactgccctctttccctatgcagtgctactgattcttctaatcagagggctcacactgccgggatcttttctgggcattcagtattatcttacgcccaactttagtgccatctataaggctgaggtctgggtggatgctgccacccaggtgtttttctcattgggtccaggatttggagtgctgctggcctatgcatcctataataaataccataacaatgtatacaagtaggttgcaagtcttatacttcaataattcctcacttaaattattacttaacttgattacagggatgctttgttaaccagtttcattaactcggctaccagctttatagccggctttgtgatattctccgtgctgggttacatggcccacacactgggtgtaagaattgaagatgttgccaccgaaggacctggtctggttttcgtggtctatccagctgccattgccaccatgccggccagcactttctgggctctaatattcttcatgatgctgctaactttgggcttggatagttcggtagatataacctatactctatatcgaccttaaactaattgtacaactcttacagtttggtggttcagaggctataatcacagctttgagcgacgagtttcccaagatcaaaagaaaccgagagctgtttgtagctggactgttttccctgtacttcgtggtcggtttggccagttgcactcagggtggcttctatttcttccatctgctggatcgttacgctgctggctactcgattttggtggccgtgttctttgaggcaatcgccgtgtcctggatctacggaaccaatcgatttagcgaggatatacgggacatgattggttttccaccgggaagatactggcaggtgtgttggcgatttgtggcaccaattttcctgctcttcatcacggtttacgggctgattggctacgagccactgacatatgcggactatgtgtatcccagttgggccaatgcgctgggttggtgcatagctggttcctcggttgtgatgattcctgccgtggcgatatttaaactactttccacgccgggaagtctgcgtcagcggttcacaattttgaccacaccatggcgagatcagcaatcgatggcaatggtgctgaacggggtcaccaccgaggtcaccgtggtgcgattaaccgacacggagaccgccaaggaacccgtcgatgtctgagttcgaccagtggcccgttttcaaatttactacgtttagatttggaaatttaccaacaaccgatgttcacgtatgtagattgtggctttgcaggagagtttgtgtttttggttcgacatttggcgcagatccgcagaaggatcggcagcaatttcgcaaacaacgtacttaggtttcggcaccaaagaaaaaaaagaagaaaacccacaagcaaacgcagcttcaaaccataagttctaagttaagattagcttgtagttcgtatggttaatgcccagttatagcatactcatatatatacgatgctgtgtagataatatcaagtccgaaagtgcgaaacacttgtcagttaatctatcgagaactccttgaaagaatgtttgcatatgccaatggaattaacgacacgatcgaggctcaaaattattgggcacataatctgtacatacacaagtcgatgatgtaaaagctttaaaacacgttataggatatctcatggaactgaagcaaaagctgccagagttgaactacaaaatccgctcaaacagccatgaggggattttgtcatatgcaaaggtttgttctagactaattaaccccgtccaaaaaaaaaaaactacgattgtttgcttaaagcagccattttaagcaaacaattgagagttatcgaaataatacattcccttttataaactcatttctgtacatagatgtatgatattttagcattgttttaagagtttctttcacgctgaagcggaactaacagccatgagttctgtttcaatttgttgaaataaattattatactttgagttactaaaaagtgaagttttattcttggtgaaataactcgaactgtgctggtctgaaaagtaaagaaatacaaatcggtgttcttgattagatatttagattttattccaattcgaatgttttggttttcttgtacaataatttcaattagcaaacgcataaaagtaaatagggaaccataact

SEQ ID NO: 18224 - DNA, 2074 bp, DROSOPHILA
cagccgctggccagcagccatttgcaaacgctcgcatgtcaccgaaggcgcaacagctccgattttgaaatttccaacacggccctcaagttgaaagttttccaaaaaaatttaaacacctccgcccatgtgaatgtgaagtgaaattcgggtttggcattcggcattggttgtgtggagcttttttctaagttttctggatatttttcaaaagtctcaaggattatttaacaatggattggagcaactacatgatttgagcttgatatttataagatttcaaagtgcggcggcgggatctccacattttgggtcaaggacacgacgggttatatagtcgcagatgtcaccaaccggacatatatccaaatcaaagacgcccacgccacacgataacgataacaatagcatcagcgacgagcgcgaaacatggagcggcaaagtggattttttattatcggttattggattcgccgtcgatttagcaaacgtctggagatttccctatttgtgctacaaaaatggcggtggcgcttttcttgtgccctacggcattatgttggtggtcggtggcattcctctgttctatatggaattggccctgggtcagcacaatcgtaagggtgccataacctgctggggtcgcttggtgcccctcttcaaaggaattggatatgccgtggtgctgatagccttctatgtggacttctattacaatgtgattattgcctggtcgttgcgtttcttttttgcatccttcaccaactcgctgccttggacgtcgtgtaataatatttggaacacaccaaattgtagaccggtaactagccgctacattttggagctgaaccgcagcgagggaatccatgacttgggcgccatcaaatgggacatggcgctgtgccttctgattgtctacttaatttgttacttctccctgtggaagggtatcagcacttcgggcaaggttgtgtggtttactgccctctttccctatgcagtgctactgattcttctaatcagagggctcacactgccgggatcttttctgggcattcagtattatcttacgcccaactttagtgccatctataaggctgaggtctgggtggatgctgccacccaggtgtttttctcattgggtccaggatttggagtgctgctggcctatgcatcctataataaataccataacaatgtatacaaggatgctttgttaaccagtttcattaactcggctaccagctttatagccggctttgtgatattctccgtgctgggttacatggcccacacactgggtgtaagaattgaagatgttgccaccgaaggacctggtctggttttcgtggtctatccagctgccattgccaccatgccggccagcactttctgggctctaatattcttcatgatgctgctaactttgggcttggatagttcgtttggtggttcagaggctataatcacagctttgagcgacgagtttcccaagatcaaaagaaaccgagagctgtttgtagctggactgttttccctgtacttcgtggtcggtttggccagttgcactcagggtggcttctatttcttccatctgctggatcgttacgctgctggctactcgattttggtggccgtgttctttgaggcaatcgccgtgtcctggatctacggaaccaatcgatttagcgaggatatacgggacatgattggttttccaccgggaagatactggcaggtgtgttggcgatttgtggcaccaattttcctgctcttcatcacggtttacgggctgattggctacgagccactgacatatgcggactatgtgtatcccagttgggccaatgcgctgggttggtgcatagctggttcctcggttgtgatgattcctgccgtggcgatatttaaactactttccacgccgggaagtctgcgtcagcggttcacaattttgaccacaccatggcgagatcagcaatcgatggcaatggtgctgaacggggtcaccaccgaggtcaccgtggtgcgattaaccgacacggagaccgccaaggaacccgtcgatgtctga

SEQ ID NO: 18225 - protein, 576 aa, DROSOPHILA
MSPTGHISKSKTPTPHDNDNNSISDERETWSGKVDFLLSVIGFAVDLANVWRFPYLCYKNGGGAFLVPYGIMLVVGGIPLFYMELALGQHNRKGAITCWGRLVPLFKGIGYAVVLIAFYVDFYYNVIIAWSLRFFFASFTNSLPWTSCNNIWNTPNCRPVTSRYILELNRSEGIHDLGAIKWDMALCLLIVYLICYFSLWKGISTSGKVVWFTALFPYAVLLILLIRGLTLPGSFLGIQYYLTPNFSAIYKAEVWVDAATQVFFSLGPGFGVLLAYASYNKYHNNVYKDALLTSFINSATSFIAGFVIFSVLGYMAHTLGVRIEDVATEGPGLVFVVYPAAIATMPASTFWALIFFMMLLTLGLDSSFGGSEAIITALSDEFPKIKRNRELFVAGLFSLYFVVGLASCTQGGFYFFHLLDRYAAGYSILVAVFFEAIAVSWIYGTNRFSEDIRDMIGFPPGRYWQVCWRFVAPIFLLFITVYGLIGYEPLTYADYVYPSWANALGWCIAGSSVVMIPAVAIFKLLSTPGSLRQRFTILTTPWRDQQSMAMVLNGVTTEVTVVRLTDTETAKEPVDV

SEQ ID NO: 18226 - DNA, 2417 bp, DROSOPHILA
gttcagcacacttgggccgcaagaaagggaattaattaaaatatctataagattcccagctcacccctggggagtgtttccaaattgaagacaagtggcaagtccgtattttattggtggtggtttcgatggtgctagtgaatagtggtaaatggattcatcgagccctgtgggaaagttggaaatcaaaacaccataacaagtgattcgagatgcctatacaaatagaagatccaaccccaagatcccttatgccctttcatatgcacgaaaccagagccaggacgaagcaatgtgtgggaatgcgtgggaatggtcctggggattcgaaactcagaaacggtcccctatccctgcttttatgttgattgcccattaggaatacaatttgcaactccttttccatgatgtgatccccttgttgatcctgggcttccttcggtgtcgtgagaaattttaccaaggaacacctgccccgtatcggtgtgtcctggattgccagtgtgttggtgatttttttcatgtcctctggggatttcacgcagcacttgaatacgtttccgaaaattttgaggccagcgaaaaattgtttcccacactcgtcggacagttgcagtttttgtaggggtttgtttcctttgccgatgcactcttctctcgtctcatcccgtctcgtctttacctgctcctggaacttcccccgactcctggcgagcgtcgtatttcaggttctccgccccgattatctcggctctttgagggcgagggtctgcgtactccgtttctgtctctgtttgtattcccctccctgtctgcggtgcgtgtcgctggcaggggtccgttctcgccctctctgtcgctcgagcgcacaggaaatgcacttcgagccgggccgtctataaaagccgtccgtttgccggttgggaaatcattctgacatcgtcagcctttcaagcaacacgcactctaaacaaaactacccacataacttcaaccaaaaatgtgccaacaagtcgttgtcgtcgccaacaccaacaacaagatgaagaccagctacagcatcaagcaggtcctgaagacgctcttcaagaagcaacagaagcagcagcagaagcctcagggatctctggaatcgctagaatccgtcgacaatctgcgcaacgcccaggttgaggaggcctactatgccgagatcgatgagaacgccgccaacgagaagctggcccaattggctcactctcaggagttcgagattgtcgaggagcaggaggacgaggaggatgtctatgtcccagttcgcttcgctcgcaccaccgccggcaccttcttctggaccaccaaccttcagccagtcgccagcgttgagcccgccatgtgctactccatgcaattccaggatcgttgggcccaggcttaagaatccattgcctcaacctttgatcttcaagctttaagaactctacaaacattgtgatagcaccagcggctttaactcccccaacaatctcggcgatccagcgcttccattagttattaagatattgtgataaaacaaaaagagctttaaaacactcgtacaaaatacaaaacaagaaatatcaaaatcaaattcattcatcttataattgggcttgggttttgggttacacacaacaagtaggaaacactttatttatcttctctgagattgttatgattcgcttggcataccacatgaatgaatcgcttgttgtcctagcataaatattgttaccgaagtcaacgtgccagatatgaaccaccgctggcagagatacttcgagttatttccagagaatgataaacaagagaaaacactcgaattacttgattatgaattcggggtagtttactactcagtaagagttgattattaaatatacaatgagtgttggatgtatctgtttattgtttactaatataagctgggtaataaaaagtagacaatgaatgggaagagtaaaaattgttataaatgagtatcattaccagtattctaagtgattttatagaaatttgcttatcgtgtttttttgtaagagtagggtaggttatttgatcgggacaagctgtccaggaatctctatttaattccagatcttttagaatcttagaaggaatgctataattgacttcgtcgcaattaaaatgcctatctaactgggtcattgaagaaaagtgcgactcgggcacatcctgctagaaaccagcccacgctccacaagatagtcaattcctcggatagcgctgtcccaaaatggacaaccttgtggccagccttgtcttgtggccattgtggccagaaggtgtgatgtgctcgcacttcggcgaaatggccgcaagccaagttggccaagagccaagtgttatggctatcaccttggctaaggccaccatcg

SEQ ID NO: 18227 - DNA, 417 bp, DROSOPHILA
atgtgccaacaagtcgttgtcgtcgccaacaccaacaacaagatgaagaccagctacagcatcaagcaggtcctgaagacgctcttcaagaagcaacagaagcagcagcagaagcctcagggatctctggaatcgctagaatccgtcgacaatctgcgcaacgcccaggttgaggaggcctactatgccgagatcgatgagaacgccgccaacgagaagctggcccaattggctcactctcaggagttcgagattgtcgaggagcaggaggacgaggaggatgtctatgtcccagttcgcttcgctcgcaccaccgccggcaccttcttctggaccaccaaccttcagccagtcgccagcgttgagcccgccatgtgctactccatgcaattccaggatcgttgggcccaggcttaa

SEQ ID NO: 18228 - protein, 138 aa, DROSOPHILA
MCQQVVVVANTNNKMKTSYSIKQVLKTLFKKQQKQQQKPQGSLESLESVDNLRNAQVEEAYYAEIDENAANEKLAQLAHSQEFEIVEEQEDEEDVYVPVRFARTTAGTFFWTTNLQPVASVEPAMCYSMQFQDRWAQA

SEQ ID NO: 18229 - DNA, 2455 bp, DROSOPHILA
ggtatagccgaagggcggcggattctgggcggcacacattatttagcacaatgcgggttgagaaagatagagagagagggggagcggggggtttttttttttggatgggaggacggaagagaaaaaagcgcaaaatttccaaacgcaaatgtaattgcacttctcgcttgcttgtggtatatgtaggtatgtatgtatgtattctaaagcacgtacaaaatactatcctcctctctagtagtagtaagtggaaattggtaatggtatttttgcggctgtgttcgaagccaaaatgtacacaacaaattcgaatacgtttgggggggtctctctcaagcactttttcatcaattattcgttatgttttcttcgttggggatatcgcactgcgacgaaatcgaaataaaatcaccgaattcgctcgccgacgacgagacgggggcaagcaactactaactatataggaccgaaaagaaagtcaagttgctctggctgcgggcgccatttttttccgtccctcggtctcaacgaaaaaaattcacttggcgttggggaacacacactccattgataacacacactctccgttttgcgtttaggtgtcgccttggcgtgggtgtgcgtgtgcgccgatgtgtgtgcacgcgccccgtgtgacgatgtgcagtttttgcaattaaatttataaacaaaacactctttttccttcaatataattcacagacacagacaccactgaacaaattccttagtgttcgtgcttctcgttctctgacgccatcttgtgtgtgcgcaggccagggttgtcgaggtgccgcaactgtctaacatgggcggtcggaggtggcaacgctgttagggctaactaatagtgtgacccaatcgcttggtattgttaaattttccctcaacggtcatgctttgcataacaattcacattttctgattgaagaatccttattttatgccaaaacttgtattagatatataaaatatcgggatgtctctatcgccagccagtggcattggtcgtttctacgccaagtcggcaaaaatcatacgtttcgtacgcctgggatgcaccaatcggcctttttatcacattgtcgtcatggaggtgcgtacttttaggccattaaaatggttaaaacttttaattggtaattgtattttccggtttagaggcgcaagaaccagcaccagcctgtcatcgagcaggtgggctcctttgatcccctgcccaacgattacaacgaacgactggtggccctgaacacggagagaattcgctattggctgggcaaaggtgcacacttgtccacgccggctgcagaactcctgggaattgccggactactgcccatccacccgcgcacctacatgaccgcctggcggaaccggaggacagctgctgaagcggaggcgtcgccagaaaaggcggaatcaaccgcataaatatagttgtgcctcaataaaagcctccttttcgtttttacgtttaacaaacggagatttcttctggttcagcgaacactggtgctcttatcaacaacaaaatgaatacagaattaaaatttattgcaaaacgtaaccaatacgaggtgaggttggtgaccaggcccaaaaccaaatgcatggataagcgagaagcggtcggagctacggtacattcgccttctagtcatgcttcagcactccagcggctttcttcatgccatcatcgatgatcctgtcaacggctgtgtgcaaatattgatctccttttagtaaaattgcaatatctaagaggtgaatttactcacattcgtgatgtttcaggaagtagggtcgcaccagcttgttgtagatgatggtagaaccattctgttccgtgggcagcatgcaccagatgaggaaagcacactacatgtggagttgaagcatttaaaagaagattcttatatgtgaagaatgcaaagctcaccttcagcagccagtaaaagggaatcaccgaagttagcagactcgaaaagaattcaatcacggtgaagattccaaacgtgacccagtagatcagccacttggtgtcgtcctgctttgtgctggactcgatggcatggatggaaatatatgcagggtacagaaccccaatgatgttgcacagtagttgggcgccccagccaaagatcaggtagatggcgcacagaccaacagcacctacatatgatgaaatataataccttattagtaaatagcattaagtcactgctggagctctaccgtagcgcaggagggggttctctacgaacagttggacaattttgctctctaattcctcgactgccatgttcgccatctagttggtcaattgatattgccctagtggcgcattttcccttatggctataagcaggtccaagggcaggagcggttccacagggcgcagggtgatcagatggagttaacacttacaaac

SEQ ID NO: 18230 - DNA, 390 bp, DROSOPHILA
atgtctctatcgccagccagtggcattggtcgtttctacgccaagtcggcaaaaatcatacgtttcgtacgcctgggatgcaccaatcggcctttttatcacattgtcgtcatggagaggcgcaagaaccagcaccagcctgtcatcgagcaggtgggctcctttgatcccctgcccaacgattacaacgaacgactggtggccctgaacacggagagaattcgctattggctgggcaaaggtgcacacttgtccacgccggctgcagaactcctgggaattgccggactactgcccatccacccgcgcacctacatgaccgcctggcggaaccggaggacagctgctgaagcggaggcgtcgccagaaaaggcggaatcaaccgcataa

SEQ ID NO: 18231 - protein, 129 aa, DROSOPHILA
MSLSPASGIGRFYAKSAKIIRFVRLGCTNRPFYHIVVMERRKNQHQPVIEQVGSFDPLPNDYNERLVALNTERIRYWLGKGAHLSTPAAELLGIAGLLPIHPRTYMTAWRNRRTAAEAEASPEKAESTA

SEQ ID NO: 18232 - DNA, 2722 bp, DROSOPHILA
tcaattaccattatgccccatggagatcggcagtttcgatgaactgtgcaaccatgtgggcggtcagaatgttgtaaccgaattagaccgaaatgtgtggaaagaaacaagatcatttgtcacaactattggatgtgaagggaatggtgaattttttgggacttgggtcttgatagctattttataatgagcggaaaataattattcaatgtttgaaatgaagttattagaatgagataacataatcaaaacaccactatgtgcacaatcaaaacatccgatagaatgctgaaaaaagtaccacgcagttcctaaaaaaaacataagtcatctaccgaaagaaaaacattacctcaacttgagcatctgtaaacaatgatatcaaacacatagcaataagagcatcatagacaaatttcttccccgatattatcaaaattttcagacagaatcgtcgatatctgtaataaacaagatagtaacgaaaatattgatgatgttgttatgaaaatagatttctctcagacagcagacaacaaaaatttgccttcgagaaggtaagcatacatttaaaagcccacttttagataccctttcttagacaaaaacaaatttctttgctcttgatatacaatgtatttttaaaacaaaatttaattatatatacaattttaatatatggtgtgatacgtatagcctgcataaattattagtgtaaatgtaatctgtaaaatctcacatataagcaacaatctaaccaacatataatcataataagtataccctctttaagggtataaacacagttcctattcgaaacagtgccagtatcttgtagaacttcgtagaccgcataaacgagtttttgttttggtccgccgataagaagccgctcttatcagcactctataactgatatactatctactagtagctagagagagtcataaaaatatataaaaatcaatgaaacttcagacagtcataccaattgaaatcgatagctactacagagagaacgcattcgtctgtaaaaacccaaaaagtaaaaacgaaagtaaaaaaacaacttcaaaatgatgagccaaactttgaccctttgctgccttgcattggtggcatgtgtatacggaaatacagtgtccaccaacgataccgcttgtccaactttttgccccagtatctacaagccagtatgcggaactgatggccagaacttcaaggagtttgctagcacctgcaatcttttgtcccacaactgtcgccgcgaaaggaatagcgtgcagggtgagtaaaatataaataaaatagtaaagattcctatctctaaaatctatatgattctatagcctatgctgccaccgatgccgcctggtgcagctccgagttcgtcgagaatctgcacgagaagttgggcaacttcaagctggaggtcaaggaatgcttcaagccctgctcgatgatctaccagccggtgtgcattaccaatggaaagtatcgtgccgagttggccaactcctgcctgctggagaacttcaactgcgccctgcaggtctccggcgcccaacccgctgagctcttccgtcttttgcgcgaagagaaatgctagacgggatcggtcgtaaagtcggaacaatgaacaggaccatcttttgttcgtcaaagtcatccttttgtcttcgatgaaaatacaaccctacgaatttatgagacatgcgtaaacgactggttaattggggtgaagaaagtgaaatggatttcagttgctacaattcgatatggtcagcattgcaaatttgtaattaggaagaggtttaagaaattttaataatagtcttagacaaattttttcatttgctcagcatagctatttattctttgtggatcttataacttttttcctttcgtttatccaaattttaatgtttccttaaaaatatactatagcttaaccgcaaatttcgcgcttgtggttttcgggtttcctgtcccaaaactcttttttatgtccgtttttgcaacgtgtcttgtggttgagttgataattatcggatccaactttcctgaatggggcaagcttatcagttcccctgatagctttttgttattattgcccaatcgtggttacctctagagtatgagccaaatttaatcaatgacttattgtgatatacccacatacaaaatcctccttccactgaagagatccatcttacaggtcccattgacgtcagcgcctaactggggatattaacacaggatattgtctgcaatcaaccttaattcttttacatatagtctgggagcatcgatgtgacagttaccgcaagatgataccagtttggcatctaccactcctttcatctcctttgatcggtttaccaacccgtctgggcagaccgctcatctgtcagggttcattaggttccactcataacactgcttccgttatcctttgctctgatcttcgttcttccgttatgccagtacttcaagagatcgggttcttctttctgatccccaagagtgataaagcagaataggtgctattatcaattttttatgtctgttaagtcatcctcaagatgatggatctatatagtttgaattgcttctcaaggtgataatacaccaaaggaaggtccaacctgttaattgcattaacaacgaatcctactcacagccctattaaccataaaacactaaaatacactggatttta

SEQ ID NO: 18233 - DNA, 660 bp, DROSOPHILA
atagctactacagagagaacgcattcgtctgtaaaaacccaaaaagtaaaaacgaaagtaaaaaaacaacttcaaaatgatgagccaaactttgaccctttgctgccttgcattggtggcatgtgtatacggaaatacagtgtccaccaacgataccgcttgtccaactttttgccccagtatctacaagccagtatgcggaactgatggccagaacttcaaggagtttgctagcacctgcaatcttttgtcccacaactgtcgccgcgaaaggaatagcgtgcaggcctatgctgccaccgatgccgcctggtgcagctccgagttcgtcgagaatctgcacgagaagttgggcaacttcaagctggaggtcaaggaatgcttcaagccctgctcgatgatctaccagccggtgtgcattaccaatggaaagtatcgtgccgagttggccaactcctgcctgctggagaacttcaactgcgccctgcaggtctccggcgcccaacccgctgagctcttccgtcttttgcgcgaagagaaatgctagacgggatcggtcgtaaagtcggaacaatgaacaggaccatcttttgttcgtcaaagtcatccttttgtcttcgatgaaaatacaaccctacgaatttatgagacatgcgtaaa

SEQ ID NO: 18234 - protein, 156 aa, DROSOPHILA
MMSQTLTLCCLALVACVYGNTVSTNDTACPTFCPSIYKPVCGTDGQNFKEFASTCNLLSHNCRRERNSVQAYAATDAAWCSSEFVENLHEKLGNFKLEVKECFKPCSMIYQPVCITNGKYRAELANSCLLENFNCALQVSGAQPAELFRLLREEKC

SEQ ID NO: 18235 - DNA, 5494 bp, DROSOPHILA
atagcccggaaaagaggtgggcatgcaagtatgggggagatcagagatggggcagccttaaattgtcatcctagtgcgcaccattggttcctcggatgctgatgctgcttctgctgctggcagtttgccccgtttgctgtcattgcactgcacatagtaacttctacgtgtcctgcggaggagaagcagcagtgggtggtagctgtgactattttaagcgcaggtcactcgaaaggacgcacaaggacattggcttgtgtgggtggctgtgtcgcctgcagttcgcaggtcacgtgcatgcaccgcggtgcattgaccacggacacgttgacacatcggccggaatctgggttgagctccacctcgaagccaggtgacaggtaattgcctcacgggcaatcaggcaataggcaatatcgagggaaaacaataaatcaacgcctggcgatattggttttactaagaagcatcaagccgctcgagaatgtttagtttaactgagccaaaaaacaaaatacacataagatagaggattataaggacaaagagcaaacaaagaaacagaataacaaaaaacatttcatcttaacaacttaatcttttgtccagacacagacgttttaaattcggccaaaagggcagacacaactaattatcctttgcgcaataaaaaaaaaggataacataagcgatttaacacggctcagtccttttcagtaacagcttgcgtctgcctgttaacgaacagaaagctgatatgcaaaaggacctcgttaaaattcaagaggactttctttcgctgacttcgtttgaacctcttcattttgacatttgcagctcgcggtcatggaaacttaatgaatgcgtaggatttttgcccttgccagagttcacacaccattcgtttttacaaaaatattggaaaacctaagctagtttccatcattaaccattattattatataacaattattttattcggtttcaggccattgcatcgttaatagttttccaaaatcattttcggcaccacattcatgctggtcaactcctggaagagcagtttgcatgcatacggcatggatatcttagagacattggccgacgactggcagaaatgacaccaggagcagtaggccatcctgccgcaagtccggcaaacatccacctcaaaggcatccgatgagatcatcagacgctccatgatcagcatactagctccgtaagaaatgagacaatcccgttccatttcgcccagacgaaggccaccctcacgactcctgccctgcgtcggctgacgggtgagcaccgccttgggtccccgggcacgggcatgcatcttatcctgcaccatatgcttcagtttttggtagtacacgggtcccgagtagatgtaggcctccagtggtgttcctgtgatgccggagtagaaaaagtccttgcccacgtagttgaaaccatggcgctccagttccgcctgaatgtcttccaccttggagcccccgaacgcagttccatagtggaacttgccctccaggagaccagccttcccgccgagcagctctaacgttttacccactgtcatacgggaggggaatccgtgtgggttcattatcatatccgggcagatgccgaagtcattaaagggcatatcctcctgttcaacaatcaacccagtcacgcctttttgtccgtgccgagagctgaacttgtccccgatctcggggatacgtgtctggcgcagcaggatcttgatgagaaagtcttcctcggcattggcggaaaccataacgcgttcgatgtaactgggctcgggacccttatagctaatgggtactgcggtgtagggaacctgtgcagactgaccctgcagcggattcatcgatgttaccgcgggcatttccttgttaatcatgatctgtttgttttgaacctgctcgcctggagccacaattccgtcagtgtccagaacgtcgtgcttgaagataaccttgttcgtcagcgcatctttcatgggacccatgattctgtcgaaggtttgattcgcataccgtttcacagtgcactttgagtttttgtacaccagacagcgtccatatccccgatctatcgacgccttgtttaagatcagcgcatcttcgatgtcgtagccagagtaactcataactgccacagtggcattctgaccagcaggcaatttgtcaaagttggtaagctcgatagtcttggatttcaccataggagcatggggatacaccagattatacatcagcgagtcaatcctgttcttctggttatagccaatcattcccatcgcctgcttacccatagcacactgataggtgttcctgggactctgattgtgatgaggatagggcaccaatccagcacaaactcccagcaaagtgaagggttcgatttccaagtgtgtagtccggtcctctatttgatcctcgttccaggcgataaacgaatcgttctcctcgttcacatctaaatactcgattagtccgtccaagagaaagtcgtcgaacttacgaatccctcgattcagctcgtccaggtgatgctgcttcaccagcgggcgacggttctccacaattacataggggcggcacagacgaccgccatccgtgtggatgtagatgcatcgctgggtgtatgatgtgtgcacagacacgtagctgcccatccgaccctttctgcgcatgtaacgaaggttccgcaccaggtgcttgtggttcaaggtgagacccagaacattaccattgatgaagacgaggaatacattcgggttattgatggggttaccgctcacttctcgtatgtcttccacgccagcattgaaagccactatcataacgggtcgctcctcaacttcggtggtgatgtgcgtcatcagagccagatttttgaccagaccacaggcctcaccttctggagtgtccgagggacacagcataccccattgactgggctgcagagatctgggtcccgacaccttacgcgtcttctcaaactgcgagttcacacgcgtcatcattcccaacgctgagatataactcaaacgggacagaacctgcgttacgccagctctttccatcttaaatctcttgatcgtccagttgccggaactgatagcagactccagtcccgctgtgatttgtgccgccctcatgtgcttgaccacatcgaactgcgccgccttcaccttgggtatatttttgtccgcaatggtcttaagctcccagttcatgcgcttgaacagatcctcgaacatcatggagagcaaagaacctgccagctccagtcgcttgttgccgtagtaatcgcggtcgtcaaagagcgttttgtccagctcggcggccataacacgacgcaccatcatggatacatagatggccttcatttgcaagttaaagttgtccacaggcacatgcgccaaaatggtagttaacagcagctcacgggcctcttccgatggcgtttttgtggtggcactctgaaaacgcttgaccaccaacttggagcctaaaaaaaggtattttaagaacaaaatttaactagggtaaacaaacctacccatgtactccaaagccctttgctgtgtgaagaccttcaggttgtaggcgtctattagagaggcaccgaatctattctgcgatttgctgtcaatgccaattagcgattgaatttcctgatcggaaactacgcccagagctttaaagatcaccacaatgggtatgtcgtccgtcatcgagttgtgcttgaggtagtactttccatgcttgctcaacaccaaagtacgtgacttcttttcgtgtgtggaggaggtaacctggcattgcaccacaccgttgaagtcctcggtgagcatcttgttccatgacagctgctcctgaatgaggataaccttctcctgacctcgcaccacaaagtagccgccaggatctagtggacactcattcagtttggacagctcgaactccgacttgccggtaagggcgcaattggagcagcgcagcatgaggggcatccttccgatgagcaaattattccgcttgatccgctgggttcccctcgtgtactcgatgtccacggtgatgggggcggagtacgtggtgtccctcagacggcattcgtgcggtgtggtcgctttggtgatgttgaagccatcgtcgatgtccggcttgcccacccgcacatccaagtactttaggtaaaacaaaggatcagctccactggtaaccagctcgttagccttcacaatcttttttatgtccacgttgatgaagtgattgaaggaatcaatgtgctgcttcactaatccttttacttgcaagaatgccggcaccaatttccacttctccgttagcggcttaatgggcaccgaccagtccttgctgtcgccgggatcccaggtggtggcctccacgttgtgatcgcccatctttagctccaccatttcgttataataatttaatttaagtttgtcaacaaaacagcgtgctatgaggttcttcgatatgcggtttctttacctatcggttatcgatatacttgggcaagtgatagcaaagttattcccatagagctggcagtgaaattaattcccgctaaatctagctttaatttatttaaattacctctgtgcgcgccaattaaaaaatttgataaaataaaaattagagggttttcttaaacttaagccgccttaaatccacgcacacataaagcacattcgttttttattttcgaataaaaaatgccatcaagtaatcaaagtgttatcgttgcacagagtctaaaccttcttcacaatctggaccacatcctcgtcgttgagaacgtgttcgatgcccaccttctgtggctgatgcttcacagatgagccccaaaccagcgcactacgaaggaaatacataaatgttattataaccaagggaacagagggaaagtgaagcgcactcactatttaaattccttggcaatggagcgatgcagcttgttgcagaaatcctcaatgctggtgcgctcgttgtggagtaccacgggcgagttgtaatcgggcagctggcccttgggcttggtgtagatgcgctgcagtcgcaggtattcccacatcagctccagcagatcgtcaaagttccagtggtgatgggccgagatgggcacgcaatgcgggatcttgtagatgacgtccagctcctcgatggagatctgatcgatcttgttcagcagatatatgcagggtatgtagatgcggttgccctcgataacgtcaatgaggtcgtcactagtggcgtcgtatctcagggtgatgtccgcattgtggatcttgtactcggatagaatggtcttcaccagatccgtgtccaactcggactgcggaaccatgctgttcagattgatgccacccttgtccttccgcttgtagtagatatttggtggtttcttgttaagccggatgccgaagccctccaattcatgctcg

SEQ ID NO: 18236 - DNA, 3443 bp, DROSOPHILA
acaaacttaaattaaattattataacgaaatggtggagctaaagatgggcgatcacaacgtggaggccaccacctgggatcccggcgacagcaaggactggtcggtgcccattaagccgctaacggagaagtggaaattggtgccggcattcttgcaagtaaaaggattagtgaagcagcacattgattccttcaatcacttcatcaacgtggacataaaaaagattgtgaaggctaacgagctggttaccagtggagctgatcctttgttttacctaaagtacttggatgtgcgggtgggcaagccggacatcgacgatggcttcaacatcaccaaagcgaccacaccgcacgaatgccgtctgagggacaccacgtactccgcccccatcaccgtggacatcgagtacacgaggggaacccagcggatcaagcggaataatttgctcatcggaaggatgcccctcatgctgcgctgctccaattgcgcccttaccggcaagtcggagttcgagctgtccaaactgaatgagtgtccactagatcctggcggctactttgtggtgcgaggtcaggagaaggttatcctcattcaggagcagctgtcatggaacaagatgctcaccgaggacttcaacggtgtggtgcaatgccaggttacctcctccacacacgaaaagaagtcacgtactttggtgttgagcaagcatggaaagtactacctcaagcacaactcgatgacggacgacatacccattgtggtgatctttaaagctctgggcgtagtttccgatcaggaaattcaatcgctaattggcattgacagcaaatcgcagaatagattcggtgcctctctaatagacgcctacaacctgaaggtcttcacacagcaaagggctttggagtacatgggctccaagttggtggtcaagcgttttcagagtgccaccacaaaaacgccatcggaagaggcccgtgagctgctgttaactaccattttggcgcatgtgcctgtggacaactttaacttgcaaatgaaggccatctatgtatccatgatggtgcgtcgtgttatggccgccgagctggacaaaacgctctttgacgaccgcgattactacggcaacaagcgactggagctggcaggttctttgctctccatgatgttcgaggatctgttcaagcgcatgaactgggagcttaagaccattgcggacaaaaatatacccaaggtgaaggcggcgcagttcgatgtggtcaagcacatgagggcggcacaaatcacagcgggactggagtctgctatcagttccggcaactggacgatcaagagatttaagatggaaagagctggcgtaacgcaggttctgtcccgtttgagttatatctcagcgttgggaatgatgacgcgtgtgaactcgcagtttgagaagacgcgtaaggtgtcgggacccagatctctgcagcccagtcaatggggtatgctgtgtccctcggacactccagaaggtgaggcctgtggtctggtcaaaaatctggctctgatgacgcacatcaccaccgaagttgaggagcgacccgttatgatagtggctttcaatgctggcgtggaagacatacgagaagtgagcggtaaccccatcaataacccgaatgtattcctcgtcttcatcaatggtaatgttctgggtctcaccttgaaccacaagcacctggtgcggaaccttcgttacatgcgcagaaagggtcggatgggcagctacgtgtctgtgcacacatcatacacccagcgatgcatctacatccacacggatggcggtcgtctgtgccgcccctatgtaattgtggagaaccgtcgcccgctggtgaagcagcatcacctggacgagctgaatcgagggattcgtaagttcgacgactttctcttggacggactaatcgagtatttagatgtgaacgaggagaacgattcgtttatcgcctggaacgaggatcaaatagaggaccggactacacacttggaaatcgaacccttcactttgctgggagtttgtgctggattggtgccctatcctcatcacaatcagagtcccaggaacacctatcagtgtgctatgggtaagcaggcgatgggaatgattggctataaccagaagaacaggattgactcgctgatgtataatctggtgtatccccatgctcctatggtgaaatccaagactatcgagcttaccaactttgacaaattgcctgctggtcagaatgccactgtggcagttatgagttactctggctacgacatcgaagatgcgctgatcttaaacaaggcgtcgatagatcggggatatggacgctgtctggtgtacaaaaactcaaagtgcactgtgaaacggtatgcgaatcaaaccttcgacagaatcatgggtcccatgaaagatgcgctgacgaacaaggttatcttcaagcacgacgttctggacactgacggaattgtggctccaggcgagcaggttcaaaacaaacagatcatgattaacaaggaaatgcccgcggtaacatcgatgaatccgctgcagggtcagtctgcacaggttccctacaccgcagtacccattagctataagggtcccgagcccagttacatcgaacgcgttatggtttccgccaatgccgaggaagactttctcatcaagatcctgctgcgccagacacgtatccccgagatcggggacaagttcagctctcggcacggacaaaaaggcgtgactgggttgattgttgaacaggaggatatgccctttaatgacttcggcatctgcccggatatgataatgaacccacacggattcccctcccgtatgacagtgggtaaaacgttagagctgctcggcgggaaggctggtctcctggagggcaagttccactatggaactgcgttcgggggctccaaggtggaagacattcaggcggaactggagcgccatggtttcaactacgtgggcaaggactttttctactccggcatcacaggaacaccactggaggcctacatctactcgggacccgtgtactaccaaaaactgaagcatatggtgcaggataagatgcatgcccgtgcccggggacccaaggcggtgctcacccgtcagccgacgcagggcaggagtcgtgagggtggccttcgtctgggcgaaatggaacgggattgtctcatttcttacggagctagtatgctgatcatggagcgtctgatgatctcatcggatgcctttgaggtggatgtttgccggacttgcggcaggatggcctactgctcctggtgtcatttctgccagtcgtcggccaatgtctctaagatatccatgccgtatgcatgcaaactgctcttccaggagttgaccagcatgaatgtggtgccgaaaatgattttggaaaactattaa

SEQ ID NO: 18237 - protein, 1137 aa, DROSOPHILA
MVELKMGDHNVEATTWDPGDSKDWSVPIKPLTEKWKLVPAFLQVKGLVKQHIDSFNHFINVDIKKIVKANELVTSGADPLFYLKYLDVRVGKPDIDDGFNITKATTPHECRLRDTTYSAPITVDIEYTRGTQRIKRNNLLIGRMPLMLRCSNCALTGKSEFELSKLNECPLDPGGYFVVRGQEKVILIQEQLSWNKMLTEDFNGVVQCQVTSSTHEKKSRTLVLSKHGKYYLKHNSMTDDIPIVVIFKALGVVSDQEIQSLIGIDSKSQNRFGASLIDAYNLKVFTQQRALEYMGSKLVVKRFQSATTKTPSEEARELLLTTILAHVPVDNFNLQMKAIYVSMMVRRVMAAELDKTLFDDRDYYGNKRLELAGSLLSMMFEDLFKRMNWELKTIADKNIPKVKAAQFDVVKHMRAAQITAGLESAISSGNWTIKRFKMERAGVTQVLSRLSYISALGMMTRVNSQFEKTRKVSGPRSLQPSQWGMLCPSDTPEGEACGLVKNLALMTHITTEVEERPVMIVAFNAGVEDIREVSGNPINNPNVFLVFINGNVLGLTLNHKHLVRNLRYMRRKGRMGSYVSVHTSYTQRCIYIHTDGGRLCRPYVIVENRRPLVKQHHLDELNRGIRKFDDFLLDGLIEYLDVNEENDSFIAWNEDQIEDRTTHLEIEPFTLLGVCAGLVPYPHHNQSPRNTYQCAMGKQAMGMIGYNQKNRIDSLMYNLVYPHAPMVKSKTIELTNFDKLPAGQNATVAVMSYSGYDIEDALILNKASIDRGYGRCLVYKNSKCTVKRYANQTFDRIMGPMKDALTNKVIFKHDVLDTDGIVAPGEQVQNKQIMINKEMPAVTSMNPLQGQSAQVPYTAVPISYKGPEPSYIERVMVSANAEEDFLIKILLRQTRIPEIGDKFSSRHGQKGVTGLIVEQEDMPFNDFGICPDMIMNPHGFPSRMTVGKTLELLGGKAGLLEGKFHYGTAFGGSKVEDIQAELERHGFNYVGKDFFYSGITGTPLEAYIYSGPVYYQKLKHMVQDKMHARARGPKAVLTRQPTQGRSREGGLRLGEMERDCLISYGASMLIMERLMISSDAFEVDVCRTCGRMAYCSWCHFCQSSANVSKISMPYACKLLFQELTSMNVVPKMILENY

SEQ ID NO: 18238 - DNA, 3422 bp, DROSOPHILA
atcggatcgcatcacaatccagccatccgtccaacgtgtgggaaacacacgacaaatctgtttcccacggtctcgtaaagtaggcacaccgcacacacacacaaacacccatccccatccactgagccatgggacccacaatcacataggctactgcctcgtaggctccctcgtgtctcattctcattgttggtgtgagcggtacggagcagcggacttcgacagcgaatgggagccgagcactgtcatcattgacaataagtatgacatggatgaggggggatggagggcggggtggagcggcctgagagacacgcgcagtcgccgagaatgagatccaatccgaaagccgactgtcgactgccgactgctcagtttccctctggccatgcaatcaattgaagacgacgcgcgccagagcaccaaagctgcagatacagatacatttgtatctgcggcggggcacgctctcgctcgctcccattgcatgcaccttggttcgaagtcgactagtttcggttaataatactaattttggactaatagtattactttcaataagcagattttacgaaaataattgcagttttattaactttgtaagtgattaatattttttgaaattgctttctttcaggtcttaaaatttagcaaatttttaaatcgtccttttggttgaacaattatgttgcatacttttgagagtcatataaaaaatagttgtagcaaaatataaagaacacaaatttaacactattggaaatgaaaaatattgatattatattcgcattgctaaaatggattatttcttattttttataataagcataattaagaaggtaaagagttccatggtgatggtcccactgtaccccctgcagacggtacaacccccatcatcgatggcctacagtagcctctctttgtgccgctgccgagcgccgctaccgatccgcgaccgaaaagaaccgaagtggaactcgatcttgggcccgagtgcctgggagcgtgtgtgagtgatcatgcgggagctttgtggccgggagagcctgatccccgtttgccgggagagcgtggctgtcatataaaagtagggctgggaactagtttgccactcatttcgtaaaagtgccgccactcgaacgcaccgcaatcggtggaacgcgcaacgcacgcgcaacaaactcgtcaaaaagtaaccaatctatgaaaccaaccaaaatcagtagtgataatgtgcagttgagagactaaatacaaaagaacaatccttaaaatacacaacataaaacaacccaatcgatcatggtcatggagatgtccaagacgtatcagtaccgcaaggtgatgaagccgctgctggagcgcaaacggcgagccaggatcaacaagtgtctggacgatctcaaggatctgatggtggagtgcctgcagcaggagggcgagcacgtcacccggctggagaaggcggatatcctggagttgaccgtggatcacatgaggaaactcaagcagcggggtggtctttcgctgcagggagtagtggctggtgttggcagcccacccacctcaaccagtaccgcccacgtggagtcctttcgctccggctatgtgcatgctgccgatcagattacccaggtcctgctgcagacacagcaaaccgatgagattgggcgcaagataatgaaattcctatcgacgcgactaattgagctgcagacgcagttgctccagcagcagcagcaacagcaacaacaccagcagcagcaaataccgcaatcatcaggccgcctagccttcccgctgctgggaggatatggaccggcagccgccgctgccgccattagttacagctccttcctgaccagcaaggacgaactgatcgatgtgacatccgtcgatggcaatgcgttatccgagacggcgtcggttagctcgcaggagtccggcgcctctgagcccgtctggaggccctggtaattgggcgtgcccaatatggatcttatccctaatattataatcgcaacccaaaaaaatggctattgaccgttctgcaacaagatccgttgtcttccaaagtaaatcatatcaacctaagttaattgaggtctaatcgatttctgaatggttttgaaatacttttagttttagttccgataatggtaatttgtaaattaattgtttaatttcaactgtgatataactaaagtacgttgatcaatcaatcagtgaatatatattcgagtgcgctattttcctactccaaaagttccctaagtttaatatctcgttgcgctctctttattgtttagcatatattaagctttaaataatttataaatgttaatttatgattagttgagaaagaataatcaaaaatacactacccaaataaaataaatgatttaaattgaaaacacaatgtttttcttttgcgggatttcaaaattttataaaatatttattttgttatattaataaatataaacaaactgaacgatattatgcaaacctaacggaatactgttcattcttgtcccagtccgccaatgttgtttactgccccaataaattacctttaattgaacatcacctcaaatgtatgcaacacattttcgactcgaccctgattcattcccataagcagatcatctaattggagcctgttcttaccaccaatctgatcggcaatcaacagatcctctctacctgcccgataactggttggcattgtggtccaaatcaacaggccaaacaacaaccgtcaatatgcactacctgctggcaggtaaattgatcaacaataagaccaaaaaaggttcaggatcgaatcggattagggtccgctcgtttttcaaatgagtcatgccaattaagaaaggacttcgctccccatttattttctgtgttgatttgtaaacggaaaattgttggaacaataagggggaaacaaagaatttagattcctattcaattattttttttttgggtgaaatgtaacacaatttttggtaaagattaccaatttccaaatgtgtgatttaagagaaggcccatttcatacgatttatcaatgattaaaagtaaaaaaaacagtggttgatttcatttaaattgtatatatattttgatttttttgtgtttgttaagtaaaatgtatcacaatttttgtaaagctcttcagttgagttgatcggcttgcgtgttaatttttgtggaatggtttcaaaaattaacggaagacgttgattaaagctggagatccaatggaagacatagttgccggatgatggatgcaggttgcaggacgctgatattttttaggcctgaacccaacgatcctgggggatagcgatggcgttggaggtgctgcagtagaggggctcgacgaggtcgttgtcggctggcaaatcggagacggc

SEQ ID NO: 18239 - DNA, 1422 bp, DROSOPHILA
ctgggagcgtgtgtgagtgatcatgcgggagctttgtggccgggagagcctgatccccgtttgccgggagagcgtggctgtcatataaaagtagggctgggaactagtttgccactcatttcgtaaaagtgccgccactcgaacgcaccgcaatcggtggaacgcgcaacgcacgcgcaacaaactcgtcaaaaagtaaccaatctatgaaaccaaccaaaatcagtagtgataatgtgcagttgagagactaaatacaaaagaacaatccttaaaatacacaacataaaacaacccaatcgatcatggtcatggagatgtccaagacgtatcagtaccgcaaggtgatgaagccgctgctggagcgcaaacggcgagccaggatcaacaagtgtctggacgatctcaaggatctgatggtggagtgcctgcagcaggagggcgagcacgtcacccggctggagaaggcggatatcctggagttgaccgtggatcacatgaggaaactcaagcagcggggtggtctttcgctgcagggagtagtggctggtgttggcagcccacccacctcaaccagtaccgcccacgtggagtcctttcgctccggctatgtgcatgctgccgatcagattacccaggtcctgctgcagacacagcaaaccgatgagattgggcgcaagataatgaaattcctatcgacgcgactaattgagctgcagacgcagttgctccagcagcagcagcaacagcaacaacaccagcagcagcaaataccgcaatcatcaggccgcctagccttcccgctgctgggaggatatggaccggcagccgccgctgccgccattagttacagctccttcctgaccagcaaggacgaactgatcgatgtgacatccgtcgatggcaatgcgttatccgagacggcgtcggttagctcgcaggagtccggcgcctctgagcccgtctggaggccctggtaattgggcgtgcccaatatggatcttatccctaatattataatcgcaacccaaaaaaatggctattgaccgttctgcaacaagatccgttgtcttccaaagtaaatcatatcaacctaagttaattgaggtctaatcgatttctgaatggttttgaaatacttttagttttagttccgataatggtaatttgtaaattaattgtttaatttcaactgtgatataactaaagtacgttgatcaatcaatcagtgaatatatattcgagtgcgctattttcctactccaaaagttccctaagtttaatatctcgttgcgctctctttattgtttagcatatattaagctttaaataatttataaatgttaatttatgattagttgagaaagaataatcaaaaatacactacccaaataaaataaatgatttaaattgaaaacacaa

SEQ ID NO: 18240 - protein, 224 aa, DROSOPHILA
MVMEMSKTYQYRKVMKPLLERKRRARINKCLDDLKDLMVECLQQEGEHVTRLEKADILELTVDHMRKLKQRGGLSLQGVVAGVGSPPTSTSTAHVESFRSGYVHAADQITQVLLQTQQTDEIGRKIMKFLSTRLIELQTQLLQQQQQQQQHQQQQIPQSSGRLAFPLLGGYGPAAAAAAISYSSFLTSKDELIDVTSVDGNALSETASVSSQESGASEPVWRPW

SEQ ID NO: 18241 - DNA, 5063 bp, DROSOPHILA
atcgtcaccggagccccaaccgaacctcctggcccagttgctgccaaaatttccgaaccaaccgccattggggcggccagaagccactgccaccaaggcagtgaagaggataagagttaggaccttcatttcgctattgtttcgattatactaccgggttctgcagatggacatagcttttatagaaagctgataaccacttccattcactgccagacatttcgacctcacactgccacattcttatctaatcgcaggtaacctgtctgatagtcagaccaacaataatcgtaattatcatatttatctgaacatgaattcggattggttgtttactgtttgccctgaacttaggatacgtaaatacttcttggaaggaacaccaacaaataaaagataatatttaaatttttccaaagaagcacctgtccagactctgtataaatttcgggtaatttctttatgatcaagcaaaatccaaatcccctttttcatgtggtgtaaagaaattgcgatatgcgttgttgggcggatcgtaaagtgatagtatcaggtgttttttaaccgcccccccaaggtaattgtttttgaattttattttgtggctacgtgtgagtcatgaattagcttgaagttttcacacttatcagtgaagagctgttatcacgaaattcccaattgatcatcgtggaaaaaacgtagaacaacacaccgataagcttgcaagattttgtgtaacgataatttcccgaattgtgggaaaaacaaaaggtgatataaaaaatatgcgatagccgaggcccttaagattgctcaccatcgatgctaataataattttaatttccatcaacaaacaaaacaaaaaaagaataaacttcgagcacagaactgtatataaacacagggacttaaaactttttgcattacctcgtcaggattttattatgccatgcgctgggaaacttcttccagccaaacagcgaatctaacgtactaaatatgtatgtatttcgttctaggatgactttctgctggccaagaggaacaaaccatcgctgtccattgtcaatccgctggatgtgctgcgccagcgtctgctcctggaaatcgcacgcaggcaaatgaaggagaactcccgccaggtcagtctcgtgttctgcaatattaaacggggatggctgaccacttggccaagtatttttaataagctgcaaaggagggtaaaacaaaactttggcttcgtatggcccagacaaacggagaacaatgccgcgtcttaaggggaatgaaagtaggtcgcgttgcaaggtataaatgaaaatgtagcgggctaatcaaaactagaatgcctgatgagaaatacttttcgaaagccataaaaacgcataaaacgcaggtgcagaaagttttttaattcatcgcagctagcgaatctaataaatttccaaaggacccaaatggtaagactctgtgcagcccacacacctacttgctcctggaatgtaaacaacatcctggcgaacccgaaatcgaggcttaagcacatcggatggccctgacacccaaaaatatacatacgtatatgcatgcggctcagtgccaaaaacaaagccaacatggcgtatgtgtaacgcaaatatttttgctcggtaacaaagcgagtttatttggttaccaaaacgttccgatcccccaaaggcgcacacacaaagacaaaaaggccaacgaaaatgttaaaaacaaaaaaaatcaaacgttttaatacgaggaattcaaacgatttgccttgatagcttcacctttcctcccacgaatttccgttaaagagggtcatgttcatccatggatgtgcctatccgcatgcccacctacctattcacatacgccagataacattattgatttgtcaaaggggtttcataaattaatccatgcatcccgaaagcaatccgaatcggagaaagatgagcttcagcaggcataatgttttcggaaaacacctgggttagactggcaaataaaagggaaataaaatggagtgaaattaaagtgaaatttcaaagaaacaaaatgaggttttcaacggcaagctgtcaaatttaataccacacaattaaaggaaagttacatttagaaacgtgtatttaaaagttaggatggagctagatatctgaaatagcattcaccacttgaatttgaatgcaaacaaaatgaatcgacatacttattcacagcttaaaggaatagatcacgtttcggtttgtgcactattcccagcagatgaaaatagactttcacatggccaaaaatataaagggaaaaatgcaatgtcacccgaacttacgagttagacattgaatccccagctcaatgcaaacacctgactctttaaaagacctgcaaagtggttggcaaacagaaagaaatttaaataaatatccaaagcactagaagaatggaatttccaaggtgtgaaaactgcaagttggcatttacacttaaattggatttaagctaaaccgagtattaagttaaaagataggaaaaggtataaatacatttccaacgattaatcatcttggctttaaatattaaagtatgttttatacaagcacctgagacttaaagtacctataaagtaattaggcaaagtatctggtggcttttcagtttagcaactaaagctgctcctaaagtatcttaaagtgcttaaaatgtaatcgtgccacatacctcatcctcgattaatgtaataacgcactggcatttgatttgtgatccaaattgaatgtggtcatccatcatgcatgtcaatctagtttagctttccctttgccgggaaaagtacatggaaaatccatggggataagggagaaccgggcttaccccacttccatttcaatttgtcaaccattttacagcagttaacagcattttactttacttaactttatgtgaaccgtgttacctttcttgtgtccaggtcgaactgaatcgcgccatcctgaagaacgtgggcaagagggtcgtgctgcgaggaggaggaggaggcggaggatcgggagcaggaggattggctcccaaggtgagcaggcgctaccgccagcagtggccagtggagcgggaactggagcgggaaaggcagagggagagggaaagggaaagggatgcagttcgtgaggagcagctggaccgtcaacagctgctgccgtggaagcatttccccagccaactgtggagctacggatgggccctgtcgccgtacaaggagtcgtcacagttacagtttgcggactcccagcaatcagcatcgactggaccacaatcccaggcactcccaaagcagttgcagttgctcagctatgcgaagaaaccactggacgtggccggaatgagtctggccaggcatcgggtcagcggaaatgaagccaacgaaacgaatcatgagaacgacgatggcaatggggccagtaaaaacccggcgagatatgtggatgacggcgacaatgagggcgaggatagctacaatgacgtgggaacagaaggtgtgggactcggcctgggaatgggtgtgggattgggtctggaacggttcgaggtgctggaggacaagcccaactgggccaatgaggaaccaaacgagttggtggtggttaatgcaaatgaccgcgtgccctggtcctttccctaccgctttcacaaaagtcagcataacgttaattaagtaagtagggattgagatgcaaacacagatatacagatacgataaagatacagatacagatacagatgcatatgcagttacagatatatgtaataccgacacagataccgataccgataccgaaacggatacgatgcgataggggcacccaacggcttctgagtgctggaaggttattaatgcaaatcgacggttcctaatggctggctacaaggcaggcatgttgtgtgtgcacatactcccttgatgacaaacttactcccacgttgctagatgtactcgcatttgaactctattttatcgaaaataaccaacggtgtatgtaacgatttatgctacctctctcacagatactgttgaaaataaagtccccgattaatgtgaaacatacatagatacccatgctaacgtgcatactactagatactttactctagatcgaaatggccgaaactttagccaatacaccaatgctgctaaggattataaacgtaattgcatgtatgcgtaattgatagtgatctatgtgtaatttaaaaaattgttttaacgctcgacgttaattaatcaatcgcatgcaatattgactagtcaaatgggattttcacgtttttatccacataagcaaaacttgtttaccaactattaattgtggcttacattctccgcgggcggaaatcggtttttatgttcattacgtttgcttcgttgtgctttaacttgtgcaaaacaaaacaaaaaaatgctcaaatagaattaacatagtgccgaaagtactgttcacacactcttttcgttaaagctgcatttggtcactattgaatttgcgctgttgaagggttcaagtttaaagctatcaggcgacaaatggttccaaatcatacgagtaacgagtaacgaattacaaattacgaataactaataacaaattgcaaataacgattttaacgtagatcaaaatcagaaatattacccaagcaagtacttcgatacatgaatacgccacgtgttgtgtaaattaacaaggaatttaccgagcaaattaaccatttaaacgttacgttctgtacattaataaatttaatacgaattgattgccctacgtgtatgtaaataaaagtcctttttcaaaaaagctaaactaatgaaattgcaaaaaaaaaaaacaaaaaatataagaaaattatatactatacaaaattatacgtatgtacggatatacttatttaaaaaataaaatcatgaggcattgacatgacattcaattacaaaacatttcgtttaattaacttaactaagcaccgacccaattccccagataggcaatcataatactgc

SEQ ID NO: 18242 - DNA, 896 bp, DROSOPHILA
atgtatgatgactttctgctggccaagaggaacaaaccatcgctgtccattgtcaatccgctggatgtgctgcgccagcgtctgctcctggaaatcgcacgcaggcaaatgaaggagaactcccgccagtcccagcaatcagcatcgactggaccacaatcccaggcactcccaaagcagttgcagttgctcagctatgcgaagaaaccactggacgtggccggaatgagtctggccaggcatcgggtcagcggaaatgaagccaacgaaacgaatcatgagaacgacgatggcaatggggccagtaaaaacccggcgagatatgtggatgacggcgacaatgagggcgaggatagctacaatgacgtgggaacagaaggtgtgggactcggcctgggaatgggtgtgggattgggtctggaacggttcgaggtgctggaggacaagcccaactgggccaatgaggaaccaaacgagttggtggtggttaatgcaaatgaccgcgtgccctggtcctttccctaccgctttcacaaaagtcagcataacgttaattaagtaagtagggattgagatgcaaacacagatatacagatacgataaagatacagatacagatacagatgcatatgcagttacagatatatgtaataccgacacagataccgataccgataccgaaacggatacgatgcgataggggcacccaacggcttctgagtgctggaaggttattaatgcaaatcgacggttcctaatggctggctacaaggcaggcatgttgtgtgtgcacatactcccttgatgacaaacttactcccacgttgctagatgtactcgcatttgaactctattttatcgaaaataaccaacggtgtatgtaacgatttatgcta

SEQ ID NO: 18243 - protein, 185 aa, DROSOPHILA
MYDDFLLAKRNKPSLSIVNPLDVLRQRLLLEIARRQMKENSRQSQQSASTGPQSQALPKQLQLLSYAKKPLDVAGMSLARHRVSGNEANETNHENDDGNGASKNPARYVDDGDNEGEDSYNDVGTEGVGLGLGMGVGLGLERFEVLEDKPNWANEEPNELVVVNANDRVPWSFPYRFHKSQHNVN

SEQ ID NO: 18244 - DNA, 7545 bp, DROSOPHILA
taccgcaagcaacctatgaagcgttcgaaattaccgtgttaaaaattgttgtctacgtttaggaaacaaacgtacaaaatttacttgaaatgaagtcttaagatttttacttgaacgtaattttctaactaattgtataactttttatctaaattattcgtactagacttgttaaataaaatgcctgactactgaataattttcaataagagtctttttttattcaaaggaccaaaatcggttcgctcgaagctcagattgctttcgattaagtttccatttcctcttccggcacttcctcttaatctgcaggacaacatcaaaagaattacaaactcaagtgtgtgtgacaatttcttggccaggcagcccaccgtaaatgccatcatacacatcaaaagcagtcaaagcgattttcagttacatttttaatatttttgggcacttttcgccccatgatttttcttttttcccctgccagcaggatgaaaatcgtcgagggcgcaaattaaaagagcagccaaggaatgggaaccgaaaaagggatgtgctgtgttagtaggggatattgagtatgcaaaggccacaggacgctggattcaattcatcaaagccagggccacgcccacaaagagacccttgctgtggggcgctgtcgtcacgaatttgggtcacccgggagctttgaactgtgttagtaggccatcgcaatcagctagccaggacctgcaaacgtcatggtgcagtgacgtcacgaaggaagttgaatggcaaaagagaatggcgtcgagtaatgcaattatatggcagcagcaggtgtaggactcccactctcttgctctctcgaactggaaaaaagggaaatggaagaagcggtgaaggaaggggaaactctcttttgccagcggaagagcaggatgcagtccatacgccctgttgcacacgctttgtgcgttgcgcatacgccccgtttgccagttatgctagttcaatcaactttagtttaataatcatttatttattacttggtttcgtgtatatagtttgcctcggggttttcacttgcatttactgtatgcttttcactatatttaataattgttcactgtttgcattcggttttagatttcgtttacgtttacggtttcccttattgcttattcgaattgtagacagttacagttaccaactttgattgggcaattgcaatttgcgttattgtgttccattattgtttaattagctaacaatgtttgcgctgtcgcttaaattcatttggctatggattcgggggcgggaagacggggattctgggaggacagggcagcagcgctggaggcttccatccgatctttcccgaaccgctcaaaccacgaaaaaacctattacacataaattcagtcagtctcaattggcctttaacgaatgacattcacaatggcattggtctaaaaacaatatttgatgtgcgtttccactctacctactattcgtaacacaatttacacggtaagcaaatcaacagtttcctgggacaactccatccaattggggttcgctctggttgtgggattctacctcaagtataatacttatttcgctaacctttgattattattcatctagtacggcttggtgtgactcgtgtatatgcggttaaatacgattccgctgactgtgattgctaaaagacttttcaaatctgcgcgggcctcttgttctcttgagcctcgtgacccggtgtttaaatctagtacgtgtattgttcgttaactttcatttgctcttagatactatgaagcattttcaatgacttgatttcgtctccgtttcgtttttgctgatttcgcagtgcctaattacatgctacaaatacgatttatgttaacccaatgttgcaggactgatgtcttcggtatatccttttggctcttgattttgattggcgcacccagttgcgttagttttccgccggcagactttacctaagactgcccaaaatgggcagtcagatgtcgccgttggcatttggatttctatttggattggcattggcctcattggcagccgcttcggcagcggaggatcccatcgctccactggctgtggcgcaagtggtggtggcctcgcccaccgtaattgttatcgtcgtgttttgattgtcgcactgcaccacctcgatggtgcgggtgttgctcgtcgttgtggtgctcatctgtccactctccgcctcgttcaactgccgtccaatctcccggtcaatggcctccgcatcctcgggataacgttccgagcagaaaatggcaccagctttcaatagcttcagcagatttaaacgatcctcggcattccgcttggcacacaatggcctaaagtcatgaaatcatgctacaattaagtggtatatgggaaaggaattaaactcaccttcccgcatccttgagctgctccataaactcctttcccgtgatgtccaccaacgagttgggatccatgttggagagtgagtccagatcggcatcgttcatcacggacacgttgcagaggttgttctgcagctggcccaccaactggcggatgcgagccgactccgagttgttggcatcggtggtgtcgccctcgcctcctccgttcagctctccgtttccagttcctgcctcgttgccatgtggagtggttatcgtcacgtagtgagtgggctataaacagagtgcagatagcatttaatttaatcttcctggctttggtcccatgctcatggagctctttcatggcattcaagaaataatgcaattagtcattatggcagataaaaggagggacacataaaatgagctatccaattaagcggtgttcactttgagaaatgaaaattacacaatcgcaaaacgaatttattgaggtgatttaaataaaaaaggtgctgatataattatttttaagtgcctgttttccttttccttttatttaagggctactcacatcgatccaatgttctccgggaaagacggccaccagttccgtattctcgtcgagggtgcgaaagtactcctcatcatcgatctccgtgccgtcggagtccaggtggatggtgggcaggtggtcgcacttctcgaacttctccgccaccttgctgcggatctcctccagactggaggcgcagacagccttcttaatgttgcgtgttacgtccttgacctggccataaaaacgcagaaggacagtgccgggaaaagggaataataaaccattacacgtttgcaattacggagacagtagcagttacacatggccccgctcatcaaatgaataataaattaatgtcagatgggaaacaactgaggtcctataaaatattcacatcgtcggcacccaaaataagaaaacggaaaaacatcgaaatgggaaaagttgtaaattttcctttagctgcaccctttttcttgagacaacaacgtgaacggaatggagaaactatggaaactttccgcctgatttattcattatcctcccgcttgcacttaattattcagtctgtttctcttttcaacgcaaactttaccctgtttttatagttatttaattaggcaatctttgaaaattccattaaacaaagagaaaagataaatagtagcgcaagttgctaaataataaatacacaaccacatttcgacgctgattgttttccattccccgaaaaatcgcaatgaataaatgaacgcaatatttgcgaccacgtcatgtcctgctgtcaaatgtccatttgctctaattgagatttatggacggctttttcccggtgggggatgtcaccaccttaaagtgcctcccacagcccgacgactttgtgcatatttcagttgcgaatgccgagttccatgagctcctctacttttgctcgagatctcgaacgcagtttgacatgcactctagcagctgcggtgcaaatatttgtcgtttatctcccactccccgattccctggcgtatccttttaaattttctttttatttgacaagttatgcatgtcagcattcttcatgctgcatgctccttcgcgaatgccataggttagtgctgttcgccggttgcaaggacgaaggacgcaagcctttggctctattaaacttgcatgcgatgttaaatgatgcctcagcactaaggttaaacgaaacataaattagacccgtccagatggaggctcaaggaggcgcaactttaagggagcaagcggcacgaatgcattccacccagaatttatagccccgaaacgtcggacagcgtgcaactccttgaggtccttcatgaatatttgagagcaccgtgactaaatgaaattgtactcgagtttgcatttcgaacatttcattttactcgtgcgcctagctgctctatcatcccaattccatttgctcagatagcggaggaggtcgtccctaaattatcttataaatacttaaagccacataacttttgtgccgcgaaagctccaaatattaatcatatcatgaatgcggcgtgtggggctagaactttgtaacaatgaaaactttgcccaactactggcgcatttgacaagtgggagtcgcggcagcatcgaaaacaaaagcatagtttttgttcggaaacttgtcaaaagttttagtcgatcgcattagttgatttttcaagtggcgtcgatttttcaagcggtcgcaattcaattagcagtttatctaattacccgcaaaattatacaaagcttatacaaatcagaaacaagatttattcggaaagtaaacatgtttcaaaagtgtttcaagttgtttcttgaatggaaatgctattaggttatatcattaagagcaaatttttggcacatcgtggtaagtaaaactttattttttaatatttaaatataagaataatatttaaatattgaaatgagcaaacacaaatgttacctacttgctactgtttaagatacaaatttccaaactagcatcactacaagttcaggctaatgtatgtgaaagtctagatgaaatcagttaagtgtttttctagaagaccagtttatacacaaaagtgtatgcaaaacgacttgggcaaattggtagagcagcagcgagttgagggcttataaatctcaactaactcgagctgctcagccatcaggacccgagggtcctggtccacacatacgtacgtagatgaacgtgcaacgacctccggcgtctggctccgttttaggagcagccgaaggagacgtgccaggaactctatcatctgcatccaagatgcgggcagaatccacaagtcgcaggacattttaatatttgatgggcgtaggccgcagattttcgagtcgctggggaaattaggcgacaactttaaattgcttttgaactatgccgcggcattatgtagattgtttaataaattattaacaaaatgcctgaggcgggtcgtgggcgtggctgttggctaattacagcgacatgtcgggatgaaaagttttccctttttaatggcattttcatggctgtcatggtatttgacagcttttaagccgatttgcgtttggtggtttttgaattaaatattttaataaggagcggcattttaatggataaagtgggggagggaattcctggatgttatctccagtcatgttttacgaaagttgttttctgtgtttcacagacaatttaaatagctttgtggtttattggtttcctttgagttgtcagctgcatgtacttccagtggttttctgcaaccttaagcacgttttttacatccccataatactttaaacagctttctgctgtttaagcggcagataaacaaattaaacaggaaacaatggcccagcagtcaagtaaaacaaatgctaaaggcaaacaattcccaatactcgaatcaaaaggcaaatgcaaagctagacaaacatgtaaaaaaaaggacaaagagaaagaaagcaactaaatagtgtttttgaatttgcaaagtcaaatttcaggcagttaatgcttattactgagctttcggcactctcttagcttgagcttttggctctcttgagttctgaagttcaacccagtttccataagaatccaaaaaaaaaggaaaaaaagtagcgaacgcagcacgcggccaacaacaacaaaggcgaaaacaacaacgcccaaaaatggacatgccaggaaaataatgcatgcacttaaaatgcaattgttcgtctgcggcctttatttccatttacaattacagggggaactcactttgaaaggctttttggagtcgcccgagttcgctgcagtctccatggctttgtttgctccaactaaattacttattcactatgcactttatttccaggcttaattgctccacattaaatgacttttctatagatttgattacttttcgcttgcttcttgcacttgcactcggcgtccgaacaaacaaacttggaatttccttccacaagctgcacttcaaatgggaattaacaatattttctcggctccgcagcggagctttcgttgcgatgagcaccggttttgaaatgagcgcgttttgctcaaaagcactgccttttatacgcagagaaagggcttctaacagatgttgagttcgaactgcgagtgctcgcttttaaatgaatgttaactgataggttcaaataatatttgttttatgtcctattggccatgtttctttttaatcatgataagtaaacatatttttgaagcctaacactttttttttttatatttttttttttataaattattccctgtagattttggttatttaattaattaatattgtatcaattttttgtaaaataggtaataatgtgcttctaaaagaaaacactaaacagattagaattttaaatatattgaaacataaagcttacaaagagaaaacaaacatagtcaaaaacacgttctctctcgctgaatatgttaacatttggctgtggcctagtccctagaaaacacaaagagtttgctggaacaatcctggctgaaaagttaaggtgattccagcaatctaatctctatttccatcggaaggtgctttcggattcaattagtccattgggaggggttgcgcattatcagcccaatgatatccggtgttgtcaattcgaaatcccctcgcccgcttggaacccggccaaaagagcagttggactacgcttaactttctacacaagtggccaacacccatttaaatctatatacatctattgccatgcacacatcaacgaaccgtccagataagaagagcaaaaagcaaacttttgacaaatggccaaaatacatgaaaggaaagccaaagccggaaggtggccccagattgggttctcatcagtttgtgcacggcgaaaaataaagattctgttatgatactaaaaactaataaaaactataacttattgcatacttatcagcgcctaattgagcaaatggattccataaaggataaaggtatgtaggtataaataggaatgagtagttttcttttagtcatacgaatatcaactaac

SEQ ID NO: 18245 - DNA, 2137 bp, DROSOPHILA
ccggtgctcatcgcaacgaaagctccgctgcggagccgagaaaatattgttaattcccatttgaagtgcagcttgtggaaggaaattccaagtttgtttgttcggacgccgagtgcaagtgcaagaagcaagcgaaaagtaatcaaatctatagaaaagtcatttaatgtggagcaattaagcctggaaataaagtgcatagtgaataagtaatttagttggagcaaacaaagccatggagactgcagcgaactcgggcgactccaaaaagcctttcaaagtcaaggacgtaacacgcaacattaagaaggctgtctgcgcctccagtctggaggagatccgcagcaaggtggcggagaagttcgagaagtgcgaccacctgcccaccatccacctggactccgacggcacggagatcgatgatgaggagtactttcgcaccctcgacgagaatacggaactggtggccgtctttcccggagaacattggatcgatcccactcactacgtgacgataaccactccacatggcaacgaggcaggaactggaaacggagagctgaacggaggaggcgagggcgacaccaccgatgccaacaactcggagtcggctcgcatccgccagttggtgggccagctgcagaacaacctctgcaacgtgtccgtgatgaacgatgccgatctggactcactctccaacatggatcccaactcgttggtggacatcacgggaaaggagtttatggagcagctcaaggatgcgggaaggccattgtgtgccaagcggaatgccgaggatcgtttaaatctgctgaagctattgaaagctggtgccattttctgctcggaacgttatcccgaggatgcggaggccattgaccgggagattggacggcagttgaacgaggcggagagtggacagatgagcaccacaacgacgagcaacacccgcaccatcgaggtggtgcagtgcgacaatcaaaacacgacgataacaattacggtgggcgaggccaccaccacttgcgccacagccagtggagcgatgggatcctccgctgccgaagcggctgccaatgaggccaatgccaatccaaatagaaatccaaatgccaacggcgacatctgactgcccattttgggcagtcttaggtaaagtctgccggcggaaaactaacgcaactgggtgcgccaatcaaaatcaagagccaaaaggatataccgaagacatcagtcctgcaacattgggttaacataaatcgtatttgtagcatgtaattaggcactgcgaaatcagcaaaaacgaaacggagacgaaatcaagtcattgaaaatgcttcatagtatctaagagcaaatgaaagttaacgaacaatacacgtactagatttaaacaccgggtcacgaggctcaagagaacaagaggcccgcgcagatttgaaaagtcttttagcaatcacagtcagcggaatcgtatttaaccgcatatacacgagtcacaccaagccgtactagatgaataataatcaaaggttagcgaaataagtattatacttgaggtagaatcccacaaccagagcgaaccccaattggatggagttgtcccaggaaactgttgatttgcttaccgtgtaaattgtgttacgaatagtaggtagagtggaaacgcacatcaaatattgtttttagaccaatgccattgtgaatgtcattcgttaaaggccaattgagactgactgaatttatgtgtaataggttttttcgtggtttgagcggttcgggaaagatcggatggaagcctccagcgctgctgccctgtcctcccagaatccccgtcttcccgcccccgaatccatagccaaatgaatttaagcgacagcgcaaacattgttagctaattaaacaataatggaacacaataacgcaaattgcaattgcccaatcaaagttggtaactgtaactgtctacaattcgaataagcaataagggaaaccgtaaacgtaaacgaaatctaaaaccgaatgcaaacagtgaacaattattaaatatagtgaaaagcatacagtaaatgcaagtgaaaaccccgaggcaaactatatacacgaaaccaagtaataaataaatgattattaaact

SEQ ID NO: 18246 - protein, 297 aa, DROSOPHILA
METAANSGDSKKPFKVKDVTRNIKKAVCASSLEEIRSKVAEKFEKCDHLPTIHLDSDGTEIDDEEYFRTLDENTELVAVFPGEHWIDPTHYVTITTPHGNEAGTGNGELNGGGEGDTTDANNSESARIRQLVGQLQNNLCNVSVMNDADLDSLSNMDPNSLVDITGKEFMEQLKDAGRPLCAKRNAEDRLNLLKLLKAGAIFCSERYPEDAEAIDREIGRQLNEAESGQMSTTTTSNTRTIEVVQCDNQNTTITITVGEATTTCATASGAMGSSAAEAAANEANANPNRNPNANGDI

SEQ ID NO: 18247 - DNA, 9612 bp, DROSOPHILA
ctttaactcgctcctaagacttaatgtagattttttacagtgtgatatacgtcgccaagcgtgcattggatgatgatgtgggtcggttataagagtgtctgttcttgttagctgcttctcgtgttctatttgcattggataatttttaagttaagtttcttctcgcttgctagattgtgttttttgggttgtcaaacaattgcagtcacctatgttaaagatttctcccgcctctcgtgttggttatctgtgttagctagtttttgtgccaggcacctactccacattcctcagaccccagacgactccgactggagtgtctgcgctcttttggacctgttctgcattcgcttgggcttgtagcgagctccggtttttgtatgtacaatcaaaaaatgctgcaccaacgcgattctgggcaggaatacccccctcccccctcttcgaaacgaagtgcacacgcccacgatgaggaccacgcaaacacccacgtccggattcgatcggcagctggttacgtattcaagtgcaacgcatgctagtgtctagtactatccgtagtcgtcaatgtttcatgttaatatgtatacagtttacacttaggcataaatatttttcgtctatttgaatataagtttgtgtataagttgtgttattaaaaatcgtgtaatgcgtaaaaccaattgaacgtaacgctttaaaacttgcaactcatacaggttgttgttttagatgcgaccaaggcatcgcaaaaattaacagatactctacgtaaacctatatatgtctgtatatatatattatataaggtgtgttcatgtgtgtaacgctagttaacatttatgtgtacaatccgatcacttaaccgctaacgtaaggctaactaaaatattacatttaagggaatcgcttacgatgcatacgccccactccgatgacctttttctggtgggtatctgcctgtctccgtccaactgtgctggtgtcccattatgcgctgatgctgttgctgttgctactgatgatgttgctactgatgctgttgctacttttgtgttgctgctgttgcagttgcacgtcccatgtatttacagtttatctgaattactccgcgttcatgtccgcctgctcctgctgctgatcctccggcattacattgcgacagatctcgtacttgattacttttccgtgaatctggccatcaggcattatctgcacctgtacctgctgctgctcgccggcagtcgccagttgctgctgggtggcggcctcctgtaaaagtggggaaggacaaaagatgtttagcttcggccagtgaaagacactttcggccatgtcagcctctcaactagactagacgtctatatatgcataaataatattaactaatatcaactaaggattacgctcaggcaaagagggaacaagcagcgtgtcgtacgcttcgaagaaagggaaaaagaataaggaatgcacaaaaatgtaaagatcatagggaaggagatacagggaagacgcaggcaaagtcgactatgtttaggtaaatctcaagcatacgacaaacaacaaattaaacagcaataataacgaaagacatacgaaaatcatgatatacagaaacacttatagacaataagcgataatttggatatgtcatacacacctaaacgcgcaaactgaagcctttgaatggaattcgatttgatactatacgattagattgtattcattgcagtgttatgggtttcttttagtttatagattttgataagagacacgcatagacagacacaccttcacataggcagacacacccgcgcacacgtgcacacacatctcacccaaatccgaacggaaaggatcaaaaatctccagttcctctcgcatctgagtttgaatttacattcaaacatgtgggtgtgcgcttgtgcaaatggatgttgctcgagttgattttcgtttgattaggttttaatgttcatttgtggttgtatttatcattttttttttcagtttttctgtttcgtttaattcttagtaagaagtagttggtacaacaagctgcaaagtattggagaaggtaatgcgattatgttttaaattggtttctttggttcaatggtacatatatgtatagatgatggataaatgggcgggcattgctgattaaagttggacgcaaaacaagtggaacatttaacttagattacgctaaatctgttcgccgcttcccgactgactgacaaagtcttttaagaatcgttgccaatatgaatcgtttattgttgatttgataacattgcttaggtgcttagtattttacatgaacgttaggaccgcctaacttactcccaactagaattaactctaatcgacttaactctaactaagtagtgtgtaaatatcaaagcattaaagagcggaacggagcgtttcggatcagatccgggattgacgggatatcgagttatgtgggttaactggttatctgatttttttcgggctatcggagaggcgagaggcactggactgaaactggagtctagcatacctgttgctgcgatatggctggcttcgtctccagatgctggcgctggtgcagcatcaggtggttcttctggaagaaggccttgccgcactcgcacacgtgtgtgcgcaccgtgcagccgccgttcgggtgacgccgattgtgctgcatgagaccgtgcttggcggcgaatcccttgccgcagctggcgcagaaatgcgacttcggtttgttggccggcgccacggagacaacatgttgctgctgctgttgctgctgttgttgctgttgctgctgctgttgggccacatgctgcagatgctgctgctgaccatgcacgggcatcgtaggcacagcggtgaccacggcttgtggatgggtcgagttggcggcctgcaccagcgtggtctgcgacatcacctgaccggtggacgatatgatctgcactggcacagggctctggcccaccagattcggattggccgtgaccacggtgcccggattcaggctagccgtgctcaagaagtgacccggcagcgcggctgtcaaggcacacagatctgtcattaggctcttgtcgccagtgtgaaggcgcaagtgaagtgccaaggcttctcggctattaaaagcactgccgcattcgctacaaagataagtcaaggtttaaggtagttccaattgcttgggtagccactacttaccggcacacaaactgcggtcgtgccacgccattggcatccgtggtggatacagtcagcaacgtagagttgcccggattgctcaccacggttatggtctgcggatgcgtttgctgtccagcttggtgatgatgggcctgctgtagctgcttgagtttgtaatttaaatcagtcaatttctatgaaatggttttaataaaggctcatcctacaaacctgttgatttgctatgatggtggcactgctcgtgttgggattgacgccattgtgcgccgtcctcacatgctgatgcagttcggccttggtgaggaatccctcgccacagctgacgcagggatgcgcctgctcgccggtatgcacccgcctttggaaggaaattatttaagaattaataatacacaatataacaatatatgcggcgtccttacctcatgtgggaaactagcgttcgcttttgtagaaactctttgccgcatacggtgcacgaatggggaatcttgccgtgaatacgtccgtggttaaccaattgaaacttgcgtggaaacgaagctccgcattcggcgcaaacaaatggattcaatgaaccgtggaagctgtgcgggaaaaaccaatcaacagtcaagcgagaaaatcatcgatattattaaaagagccaacttaccgagagtgcataatcaggtggttttcctgcgcaaagctctcaccacattcctcgcatacatatggtcgttcgccggcgtggaacttgctgtgcgtgaccaggtgtcgcttaagcggaaatgcgcgtccacactcctggcagacgaatggtcgctcccggctatggacccgcgaatgggtcagcagatggtgcttgagggtgaagctcttcttgcactcctggcactgataaggtctctccgtggagtgaagcagcaggtgagtgttgagacagtgcttgtgcgcgaagctcttgccgcaatgggtgcagatgtgggggcgttcacctgtggggcaaacggaatgattagacctgctcaaatgtttcgggtattctgccaggaacaagaacaaccacctgtgtgcacgcgtgcgtgggttgtcaaatggtgcttgagcagaaaggacttgccgcactcgtcgcaactgtacgggcgttccttcttgatggtggcgtccgtctaaaaataaacagataacccattagtatatcacactaataattcagttgaacttcgtccaaagagattggcttacttcgctgaaatgcattgattcctgtagttcggtcttcggggacaactctaatgtgcctggctccaactttaggttgggtgcttcgccttgcgagtcctcgttatcctccagtccttgtatgactttctgcacttgaactgaaataccaggaagtatgtcacctaagagtgttgttgcaccgccaacggaacaaaagccaaatggaattcaaaggaagatacaaaaaaatagagaagaaacaaaggaaaaaaatcaaagatccgaacaaactgaatatgcaaaatcaaactatttgggttcaattgggttaatcaaacttaaaacaatgttagaccaactaaacaatggcaaaaactatgattacaacgtaaccacgcaaccaggtaaaagcaaccggaaccgagaatgtaccaatatgccgggtattttccggtaggattacttcaatcggggatcagatctgattgtagtgtgtagtgtgtggaggagtaggtggcaggagggactggatcaggggtaacaaacacagatttgagatgcttacttggtgtcccgccggacgcatggtgatgggatccgtcggcagcggtgatcgtgtgcgtctgatggtggccggcagcgatggcgcgcttgatcaggatctcgttgcactcctcttgcgtaagatgcagtgctccgatcgagctgaagtgcgacttggccgccgcagatccggcggttagcaccgtctgtccggtcttcgcatcaacaatgctgccattggtcaacgtatggtggtgggcgagacccgaatccccaccagcggcggctgcagctgctgcggccgtggccggatccactagcagatctgttttttcaattcgatgggttgatacgtttcatttcggttgaaggaaggttcgatcagcccgcgcccgccgcccgccaagtgatgaggtgttgtgtgtgtgttattatatggtgagatggtaatgttgtagtttttatgcggtgcagttaacgagatgatcggtgggtcggtggtggatcgggtgcaatagcaaaatcgggcaaacacacaagcacaatgggatttatcggaggagatggtggattttgggtttcggtttcgggttcggtttttcgggttgaattcaagggcgagcgagatcgagcgagaattaaaaaaaaaaataaattaattaaataaataaacgggagtagagagagaaaaacaatcgattaacagaaaacccaaaatatatagataatcacaacacagtaacagcaatgcgtgcaacactgaatcgattcgatgggtttttgattcgtttagaatcgatccacttacagttcttgtcgaggctcaggacctgctgattgttgtcctgcttcttgaccaccgtcgatgctccgccggcagtgataactctgcaagggattgagaattaggtatatgtacattggggatctctttgggctgctggagcgccaacgcacctttgtgttccaggcggaaatgaaggatcgtttacgacgaacatacgacgaacgacattatttttgccgccagctgtaaggcctttgacatccttttgaactgccaatgatccatccgtcgatagtagatagggcatctggaacaaagacttttagtactcatggctaatggggataaattaaaggtttgtcctaatttctaaataaacttaataatgcttatgttgtaggagttgcatgtttagtttacacgtggtcctgggaattgcgattttaggaaagcctggcttacacattttttttataaatctatctttcattcaagaaatgttacatatcaaacaacaaaggctcttttatataaaagaataataaataatttttaatctatgtacattgcccctagtcatttctacaattttaatgtcccaaaaacgatttaaacaaatgagaggaagtaaacttgtagcagttttattgttcagctcaaacttatgaatgaattgaccttcatgaacctttttttttttgggaaattaaaacttggcagcaagtacagtcgccactcgctaagatctgcaggctgtgatttggagttgttggcggttgatgcttctattggccaagtgcttgtcttttgttttcgctctgattgataataaccgccaataaccacgctacacctgcgcagccagcagtgcggcaacagatgatagacgacgaacgaggggggaagttgggcgctaagagcgggaggggatgttcgcaaaaagcgcgcctttttcactctgtatgtgtgtgagtgcaattggacatcgtggcatgggagtgtgtgtgatgggcgccaaaatggtgcggcaaaagtaatcaaaacacacgcacgacaccaaacgcacactggggagcacacgtcatttctggtcgagtgtgcgtgcatacatacatacacacacatacagagggcagcaagcgcggcgaattcggcactgacgcacacatgcggagatatcgggcgcgcaagtgcggcgaattcgccgcgtttgccattgtataagtgcccgcaaatataaactaaaaaacaacaaacacaatttctcctgtcaattgcacaacaaaaaatattgctctcaaaaaaaaagaaacaaacaacaaaaaaacctatggataagcaataattattaatagaacttaaattaggttagcgatatatgcatgaatagcctagaaaaatatcgattagcatcgattgcctgtaccagctgccagacttttgaaaatttcacgaccttcccgctaattaactgctccgatttgcctgtggggggaatttattgctatttatttatttacttgctcgccaggtgcgcgtgttgtattttgggaatttctccgcacacagagccaattgtgtacgcattcgttttacaaataccaaattatgaatgtttacgaatgaaatggaaacgaaaaaaatccgtatggatgtatgctaaaagaattctaatacactcgctccatcccccccataaaaacatacatacgtacgttcattcgtacatattcgtatattcgcatgacaacgcagttacataaagcgtgtggcgtatgcatatatacgttgtacatgtacgtaagtatgtatatcgcagttgctgtcgctcgttttccacgtataccgtatacgtgaatgccattcgggccgtatacatacacagttcgttgccgaaagcagcgagtgttggtgagacgagcgagtccgtgagcgagtgtaacgcagtgcgtgtgtgcgtttgtgtgtatgcattggtgggccacaacacaattcggtgtgggaaagcaacagcaacagcagcaccaacacccacacacgcacgcacctggagcaatgtcggcaacaggggggaaatatcctcagactggcagctttcaacgggtttatcagtttaatagagctataactttggactcaccgactccccgctgactgtatagttgatgttgggcgatatctccagtaccgattcggcggcgcggttgccgttgtccgcaaaaccccaggtatagccgaagggcggcggattctgggcggcacacattatttagcacaatgcgggttgagaaagatagagagagagggggagcggggggtttttttttttggatgggaggacggaagagaaaaaagcgcaaaatttccaaacgcaaatgtaattgcacttctcgcttgcttgtggtatatgtaggtatgtatgtatgtattctaaagcacgtacaaaatactatcctcctctctagtagtagtaagtggaaattggtaatggtatttttgcggctgtgttcgaagccaaaatgtacacaacaaattcgaatacgtttgggggggtctctctcaagcactttttcatcaattattcgttatgttttcttcgttggggatatcgcactgcgacgaaatcgaaataaaatcaccgaattcgctcgccgacgacgagacgggggcaagcaactactaactatataggaccgaaaagaaagtcaagttgctctggctgcgggcgccatttttttccgtccctcggtctcaacgaaaaaaattcacttggcgttggggaacacacactccattgataacacacactctccgttttgcgtttaggtgtcgccttggcgtgggtgtgcgtgtgcgccgatgtgtgtgcacgcgccccgtgtgacgatgtgcagtttttgcaattaaatttataaacaaaacactctttttccttcaatataattcacagacacagacaccactgaacaaattccttagtgttcgtgcttctcgttctctgacgccatcttgtgtgtgcgcaggccagggttgtcgaggtgccgcaactgtctaacatgggcggtcggaggtggcaacgctgttagggctaactaatagtgtgacccaatcgcttggtattgttaaattttccctcaacggtcatgctttgcataacaattcacattttctgattgaagaatccttattttatgccaaaacttgtattagatatataaaatatcgggatgtctctatcgccagccagtggcattggtcgtttctacgccaagtcggcaaaaatcatacgtttcgtacgcctgggatgcaccaatcggcctttttatcacattgtcgtcatggaggtgcgtacttttaggccattaaaatggttaaaacttttaattggtaattgtattttccggtttagaggcgcaagaaccagcaccagcctgtcatcgagcaggtgggctcctttgatcccctgcccaacgattacaacgaacgactggtggccctgaacacggagagaattcgctattggctgggcaaaggtgcacacttgtccacgccggctgcagaactcctgggaattgccggactactgcccatccacccgcgcacctacatgaccgcctggcggaaccggaggacagctgctgaagcggaggcgtcgccagaaaaggcggaatcaaccgcataaatatagttgtgcctcaataaaagcctccttttcgtttttacgtttaacaaacggagatttcttctggttcagcgaacactggtgctcttatcaacaacaaaatgaatacagaattaaaatttattgcaaaacgtaaccaatacgaggtgaggttggtgac

SEQ ID NO: 18248 - DNA, 3222 bp, DROSOPHILA
cacgccaaggcgacacctaaacgcaaaacggagagtgtgtgttatcaatggagtgtgtgttccccaacgccaagtgaatttttttcgttgagaccgagggacggaaaaaaatggcgcccgcagccagagcaacttgactttcttttcggtcctatatagttagtagttgcttgcccccgtctcgtcgtcggcgagcgaattcggtgattttatttcgatttcgtcgcagtgcgatatccccaacgaagaaaacataacgaataattgatgaaaaagtgcttgagagagacccccccaaacgtattcgaatttgttgtgtacattttggcttcgaacacagccgcaaaaataccattaccaatttccacttactactactagagaggaggatagtattttaatccgccgcccttcggctatacctggggttttgcggacaacggcaaccgcgccgccgaatcggtactggagatatcgcccaacatcaactatacagtcagcggggagtcgatgccctatctactatcgacggatggatcattggcagttcaaaaggatgtcaaaggccttacagctggcggcaaaaataatgtcgttcgtcgtatgttcgtcgtaaacgatccttcatttccgcctggaacacaaagagttatcactgccggcggagcatcgacggtggtcaagaagcaggacaacaatcagcaggtcctgagcctcgacaagaactatctgctagtggatccggccacggccgcagcagctgcagccgccgctggtggggattcgggtctcgcccaccaccatacgttgaccaatggcagcattgttgatgcgaagaccggacagacggtgctaaccgccggatctgcggcggccaagtcgcacttcagctcgatcggagcactgcatcttacgcaagaggagtgcaacgagatcctgatcaagcgcgccatcgctgccggccaccatcagacgcacacgatcaccgctgccgacggatcccatcaccatgcgtccggcgggacaccaattcaagtgcagaaagtcatacaaggactggaggataacgaggactcgcaaggcgaagcacccaacctaaagttggagccaggcacattagagttgtccccgaagaccgaactacaggaatcaatgcatttcagcgaaacggacgccaccatcaagaaggaacgcccgtacagttgcgacgagtgcggcaagtcctttctgctcaagcaccatttgacaacccacgcacgcgtgcacacaggtgaacgcccccacatctgcacccattgcggcaagagcttcgcgcacaagcactgtctcaacactcacctgctgcttcactccacggagagaccttatcagtgccaggagtgcaagaagagcttcaccctcaagcaccatctgctgacccattcgcgggtccatagccgggagcgaccattcgtctgccaggagtgtggacgcgcatttccgcttaagcgacacctggtcacgcacagcaagttccacgccggcgaacgaccatatgtatgcgaggaatgtggtgagagctttgcgcaggaaaaccacctgattatgcactctcgcttccacggttcattgaatccatttgtttgcgccgaatgcggagcttcgtttccacgcaagtttcaattggttaaccacggacgtattcacggcaagattccccattcgtgcaccgtatgcggcaaagagtttctacaaaagcgaacgctagtttcccacatgaggcgggtgcataccggcgagcaggcgcatccctgcgtcagctgtggcgagggattcctcaccaaggccgaactgcatcagcatgtgaggacggcgcacaatggcgtcaatcccaacacgagcagtgccaccatcatagcaaatcaacagctacagcaggcccatcatcaccaagctggacagcaaacgcatccgcagaccataaccgtggtgagcaatccgggcaactctacgttgctgactgtatccaccacggatgccaatggcgtggcacgaccgcagtttgtgtgccgcgaatgcggcagtgcttttaatagccgagaagccttggcacttcacttgcgccttcacactggcgacaagagcctaatgacagatctgtgtgccttgacagccgcgctgccgggtcacttcttgagcacggctagcctgaatccgggcaccgtggtcacggccaatccgaatctggtgggccagagccctgtgccagtgcagatcatatcgtccaccggtcaggtgatgtcgcagaccacgctggtgcaggccgccaactcgacccatccacaagccgtggtcaccgctgtgcctacgatgcccgtgcatggtcagcagcagcatctgcagcatgtggcccaacagcagcagcaacagcaacaacagcagcaacagcagcagcaacatgttgtctccgtggcgccggccaacaaaccgaagtcgcatttctgcgccagctgcggcaagggattcgccgccaagcacggtctcatgcagcacaatcggcgtcacccgaacggcggctgcacggtgcgcacacacgtgtgcgagtgcggcaaggccttcttccagaagaaccacctgatgctgcaccagcgccagcatctggagacgaagccagccatatcgcagcaacagcaacatccatttgcacaagcgcacacccacatgtttgaatgtaaattcaaactcagatgcgagaggaactggagatttttgatcctttccgttcggatttgggtgagatgtgtgtgcacgtgtgcgcgggtgtgtctgcctatgtgaaggtgtgtctgtctatgcgtgtctcttatcaaaatctataaactaaaagaaacccataacactgcaatgaatacaatctaatcgtatagtatcaaatcgaattccattcaaaggcttcagtttgcgcgtttaggaggccgccacccagcagcaactggcgactgccggcgagcagcagcaggtacaggtgcagataatgcctgatggccagattcacggaaaagtaatcaagtacgagatctgtcgcaatgtaatgccggaggatcagcagcaggagcaggcggacatgaacgcggagtaattcagataaactgtaaatacatgggacgtgcaactgcaacagcagcaacacaaaagtagcaacagcatcagtagcaacatcatcagtagcaacagcaacagcat

SEQ ID NO: 18249 - protein, 768 aa, DROSOPHILA
MPYLLSTDGSLAVQKDVKGLTAGGKNNVVRRMFVVNDPSFPPGTQRVITAGGASTVVKKQDNNQQVLSLDKNYLLVDPATAAAAAAAAGGDSGLAHHHTLTNGSIVDAKTGQTVLTAGSAAAKSHFSSIGALHLTQEECNEILIKRAIAAGHHQTHTITAADGSHHHASGGTPIQVQKVIQGLEDNEDSQGEAPNLKLEPGTLELSPKTELQESMHFSETDATIKKERPYSCDECGKSFLLKHHLTTHARVHTGERPHICTHCGKSFAHKHCLNTHLLLHSTERPYQCQECKKSFTLKHHLLTHSRVHSRERPFVCQECGRAFPLKRHLVTHSKFHAGERPYVCEECGESFAQENHLIMHSRFHGSLNPFVCAECGASFPRKFQLVNHGRIHGKIPHSCTVCGKEFLQKRTLVSHMRRVHTGEQAHPCVSCGEGFLTKAELHQHVRTAHNGVNPNTSSATIIANQQLQQAHHHQAGQQTHPQTITVVSNPGNSTLLTVSTTDANGVARPQFVCRECGSAFNSREALALHLRLHTGDKSLMTDLCALTAALPGHFLSTASLNPGTVVTANPNLVGQSPVPVQIISSTGQVMSQTTLVQAANSTHPQAVVTAVPTMPVHGQQQHLQHVAQQQQQQQQQQQQQQQHVVSVAPANKPKSHFCASCGKGFAAKHGLMQHNRRHPNGGCTVRTHVCECGKAFFQKNHLMLHQRQHLETKPAISQQQQHPFAQAHTHMFECKFKLRCERNWRFLILSVRIWVRCVCTCARVCLPM

SEQ ID NO: 18250 - DNA, 2213 bp, DROSOPHILA
gaatgtccaactcccaaaccctggcccacagacaacaagcactccagaattatgaacccatataagttgaattaaaacactatcaaaagacgccaccacaagtgaaagcaccttgctctggcgaggattaaatttgcagcggtgctccacacacgtgaccaacccacgtccaatcagaggagcagcacttgttctccgccacgcgtttggcccaccgccgagctttccaggcccaaaagcaaacatcaatcaggtggaaagcgattgggaagccaacgcgtgacccgtggcgggcgaagcaattaaccaaagttgaatcaactcggcagcagcggcaggagcagcagcagcagcaacaacatcagcagcaagtgcaatatgtgtcaaaaggggcaacagcaacggcaacagcaacaccaacaagaagcaaccaccaccaccaaggcaacgaaatgagcggggctgtggcctaaattgcaaacagctgccactcgaaccgtgggatactttttcccctagcctcaaaaaatcgagatatacgctcaggataggggaaggaaggccctttgctgtcgaaccttatccatgggaaccacaactgctcaacgctctcaatatttattctgtattgaaatggaaaaaatgaggatggttcgagaaaaaaaaaaacaaaaagcaaagggatgcaccaccggagtggggggaaacgagattatcctgcacgtgttgagcttgctgcgtggttccttgcgctgaaagcgtggcaggcgaacgttgggctgatagttgggatgatgttgctgctgctcctgcgcacagtttggacatgtgtccgccacatgtggcacttgttgtgttgggtggttggacttttgggtggtggttatctggcgggctataaaagcgcgccacttgccatcagcccacaacagttgcaattcgagaatcaacgcgctaagaactcttatctgtaaagtgatactacactcttgtcgtaaccatgtcgaaagtaaagaacttattggccaaaatgctgcagcgatttggcaaaaacagctcacaagccgacagtcagcgatacgatagcctggaggagattgcccagaaccaggcaaacgagaggatgttgagggcaactcaagtgggattggaggagcacctggtcatctgcttggagacggaagcgggcagcttctactggcactcgcagtagcagcaaacggaggagcagcagcaacaccacctgcacgaccaatctgaaaggaatcattgctgagaaccaaaacatccgatttcgaaattgctatcatgtcaacagccgcaattatagtaaatagtggagcaaaaccaccttcaatgttagttgcaacatgaggaacgctacaaaacatcaacaactactattattagtagcatcttcaacgtcgataactatacagcaatacaataaggaatacttcagttgaaagacccaactgcaattataattgcaatgtcaaccagccacacctcaagaagctaaaaaaccaattgcaacatgagtaatgactaaccacgaagcaaccgcaaaaaattgccaataatatctacaataacttgtcaaaaagcgagaacattaacagccgaaacagtagcagccacatgaactataacaattgcagcaatgtcaacagtggcaacatctcaagaaatcaaagcatcgatgacaacaacagcaggcaccacaacaatctcaacattatccaaagccacaacaccatgggccaaaaaccggtagttagatgcgaccaaagcgactgaatggatggatgaatgaataatacaagacatatcattcgatgaatgaatggagctgacgatcgatcgtgcgaatcgaattgcgtgccagcaacaagtatccaactagtccaaaggatgccactcagacatcctctccagttggagaccctcgatggttgccaatgatcagtaataaatacatttgtgatatcaactcaagctagttagtgttgtagtataaacgttattagcttataagaaaataaattaaaaagaaaatccactaaaatcgtcactgtttgttacgtgggaagttgggtagttaggaggaaaagtaaccaattggattctaatcaatagaaaatcagtcagcgtagggcttcatcaaatcttttaggcggcttaaaacggctctaaaaaagctttgaacacac

SEQ ID NO: 18251 - DNA, 213 bp, DROSOPHILA
atgtcgaaagtaaagaacttattggccaaaatgctgcagcgatttggcaaaaacagctcacaagccgacagtcagcgatacgatagcctggaggagattgcccagaaccaggcaaacgagaggatgttgagggcaactcaagtgggattggaggagcacctggtcatctgcttggagacggaagcgggcagcttctactggcactcgcagtag

SEQ ID NO: 18252 - protein, 70 aa, DROSOPHILA
MSKVKNLLAKMLQRFGKNSSQADSQRYDSLEEIAQNQANERMLRATQVGLEEHLVICLETEAGSFYWHSQ

SEQ ID NO: 18253 - DNA, 4197 bp, DROSOPHILA
tcgggatttgcacctgcaaaatgtcgccctggtcctcctcctcatcatcatcatcactactgcccccttcggctcgcatggccagaacatgctccaccaactttttcttttgcacgaacatctcgccgaaactctaagcaaaaagcaaattcaccaaaaatcaaagatactcggaatttctctctattcaaaaatcattatagatttactgcgtttttcgatttttgtctgcgcgttgcacaactttttgcctctgtggatttgaataagatgaaaatcctatcgaataaacactcgaaatacgctcccagtagccaaggcaacagtaattgaaagttgaataaagcttaatgttaccagggcaacagatctgagaagtttcgtcgatcgacgatattattagcaactaactagccacctgttgatgacatgtaaaccaaaaattcggaaattggcaccacgttaccacgacaacagaactgacatgttttgtcaatggaatttcatattccacccgttatccgcctgtaaaccacctgttatccaccctttatccacctgttaactacctgttatccacctgttaactaaatggatacacctgttaaccaccaaaccaacaaacattgtaaacaaactccatgttaccaaggcaacatagctaagatgttaaaatatcaaaataccaagtcaacagtattattatcatctgttaaccacctgttactccgctgttgttattcacccgatattcacttcctttcactttcgttgcagataacaggaattaaatttgcaaaatgtaaatactaaatatcaataaatatctcttatttgtatacagattgtaaacaaaaacttactcgcttccttatcaacaatccgttgcacattctactgataagggttttttatatctctgtattattgctctcttgattttattgggattctgccagttttcgttcgcgatttaaatcagtgtgttttataagttccaattgagaagtgttcccataaaatacgcatatgtttcatgaatcactgaagctgatctccctgatgctgctgtgggtcattgtggctgcggttctgacggattgcgaggccaggagccttgtggacaggtccgaaaattccgatagcaatggtagctcgaccaatagatccgcggcagagtaccaactgcaggaatacgcggaattcatgaaatcctatatgaaccaaagtgtagagccctgcgagaatttctacgagtatgcctgtggaaattatcggaacgtaaagccggatcggtactcaccgggcagtagaagcaacctgggcgacgtgacttacacactgatcgacatcacggagcaactgctgggcagaatggatctggcggaggctctaaacgtatccagcgaactggcggtggcccagcgattctacaacgcttgtctgggagcaaatctccatcctttcaatgcggcggatcccgcttacttgagtctaattcgatcgattggaggatttcccgctgtggatggagacgcctggaaagcctcaaactttaactggatcaacatgagtgctcatctggccaactatggcgccaacggtctgatccgcgaaactctccagttaaggtatccctttgagccctacaccaaactgcccgaactgggcttcgatcacatcatcgtacatgaggaaaacatttccagaaataccacacgcgcctttcgcctgaacgaagagcgaatgcacggatatctgagggcgttcggcttgccggaggacaggattagggaggccatcgctggggtctttgccttctggcgggacgcactcgagatcccgccccagtgcgaagtgtttgatccctaccgaattaagcgagtgtttccccaatcggagtactactataacatctcgtggagtggactccactccactaacaaattattctgcgacttttactacgttgaactggacaaagtatgcgcccgacatcgcaaggctgtggccaactacctggccatgaagctgctctatagattcgatcccaaactgaaggcgcccaggtaccaaaggaactactgttcggttacgctttatcaatccatgcggtttctgttcaacaaactctacatggctgtgggtaacgaatgcgtatgatgagaataccaaataatctcaacactcttgtgttacagaacaacttcagtgaggcgaagaggctggagatgtcggaaatggtgcgggaactgcgaaagagtctgcgaaaggcgctggaggatgccgattggctggatgcggagagcagggcgagggcactgcttaaggagtccagaatacagccacgcattggttcgttccaagatgatgcactttcggatcgaataatccgggaaatcaacagtctgaaagtcatcgaggatcgctatgcggagaccaacattaatttgcagcacctagttgtacaaatcaatcgatttagcagtcggcattttcaggagctgaccaatgacaccaagccacagaagatcctgacaggattgcaggttggagcgggctactacactccggacaactccattaatgtgatggctggcgtggtggaaccaccgatataccaacgccacctgccgatttccctgaaattcggcacattgggttttatcgttggtcatgaactcatccacggcttcgatacgaccagctcctatttcgatggcaatggtcacatggagtccttgttgtcggaaatttcgcaacaggcattagaggatcgcgccgagtgctacatggactactatggcaagtaccaggtaccggagatcagcaggcgtgtcaacggaaaaactacactggacgagaatatcgcagacaatagcggattaagacaagcattgacggcctatcgcagtcacaggcagcaactgctggagcatcctgggcaggagaggataagcgacgccatgccgggtctcgatctcacgccggaacagttgttcttcctgggatttgcccagctattttgctcccattacgaggaggagcactactggaaaggtcttagcgatgtgcacaccttcgaccaatttcgtgtcctgggagttttgtccaacagcgaggacttcttccacgcctacaactgctccgtgggcagcggcatgcgtcctggcgccaaaacgtgccgactttggtagatcatagatttataatcatcatcataaattccttgaaccaaataaaagttgatttcaatactttttaccgacaatgtaaaatgttttgacacaacacttcaaatttacgttacacgtaacaagctaacatttgtggtttgagtacaactatcgaagtttcgcaccccagagcaccgttcaaatttagtcacatctccgcagcgcgctcggtaactctgtttctcatgtcaattttgtgcatgacaattttgttcaacagaaactgcctttttttgtaaccaagtcaggctgtcagtcagaagtgttccgacttcgtaaaacataaaccaacaattcacagcaacaacataatgtcggcagcagcagggtgagtccacaaccggccatctcagtgccaatcggcgatagccggaccatctttttgtggcttctttgtgcgtcgcgtgctttgtcgttgcggcggcgtccattttcgaactcccggccgtgaaaaacacataattttcgttcggatgacccttattctcgcgctcatccgcctggccaagcgtttgtgtccacggtgggcgtgtcctgtgcgcatctgcattgcgatatttgtggaactaatcggagggtccagtgtttgaggttatgttttcggctggcggtaatgccgtgcattttcggcatggacttttgcctgggcttatggtttatgcaaatctagctagctgggaagctatttacatagttcgtgcacccgcttccagaaagtccgacgcgagttgccatggcaacggatctcgcacaacgacatgaagctcttatttatgtttatccaacttgatcctccattgcagcttgattccgcctccagtttcctgggcccagcgcaatgacttgatctacgtcatcatcgatgtcgaatgcaaggacatcgaacacaagtatatgcccccatatgtagtatgtccatgctccttgcacatcctaattccatatatttatcccaaaacag

SEQ ID NO: 18254 - DNA, 2138 bp, DROSOPHILA
attgagaagtgttcccataaaatacgcatatgtttcatgaatcactgaagctgatctccctgatgctgctgtgggtcattgtggctgcggttctgacggattgcgaggccaggagccttgtggacaggtccgaaaattccgatagcaatggtagctcgaccaatagatccgcggcagagtaccaactgcaggaatacgcggaattcatgaaatcctatatgaaccaaagtgtagagccctgcgagaatttctacgagtatgcctgtggaaattatcggaacgtaaagccggatcggtactcaccgggcagtagaagcaacctgggcgacgtgacttacacactgatcgacatcacggagcaactgctgggcagaatggatctggcggaggctctaaacgtatccagcgaactggcggtggcccagcgattctacaacgcttgtctgggagcaaatctccatcctttcaatgcggcggatcccgcttacttgagtctaattcgatcgattggaggatttcccgctgtggatggagacgcctggaaagcctcaaactttaactggatcaacatgagtgctcatctggccaactatggcgccaacggtctgatccgcgaaactctccagttaaggtatccctttgagccctacaccaaactgcccgaactgggcttcgatcacatcatcgtacatgaggaaaacatttccagaaataccacacgcgcctttcgcctgaacgaagagcgaatgcacggatatctgagggcgttcggcttgccggaggacaggattagggaggccatcgctggggtctttgccttctggcgggacgcactcgagatcccgccccagtgcgaagtgtttgatccctaccgaattaagcgagtgtttccccaatcggagtactactataacatctcgtggagtggactccactccactaacaaattattctgcgacttttactacgttgaactggacaaagtatgcgcccgacatcgcaaggctgtggccaactacctggccatgaagctgctctatagattcgatcccaaactgaaggcgcccaggtaccaaaggaactactgttcggttacgctttatcaatccatgcggtttctgttcaacaaactctacatggctaacaacttcagtgaggcgaagaggctggagatgtcggaaatggtgcgggaactgcgaaagagtctgcgaaaggcgctggaggatgccgattggctggatgcggagagcagggcgagggcactgcttaaggagtccagaatacagccacgcattggttcgttccaagatgatgcactttcggatcgaataatccgggaaatcaacagtctgaaagtcatcgaggatcgctatgcggagaccaacattaatttgcagcacctagttgtacaaatcaatcgatttagcagtcggcattttcaggagctgaccaatgacaccaagccacagaagatcctgacaggattgcaggttggagcgggctactacactccggacaactccattaatgtgatggctggcgtggtggaaccaccgatataccaacgccacctgccgatttccctgaaattcggcacattgggttttatcgttggtcatgaactcatccacggcttcgatacgaccagctcctatttcgatggcaatggtcacatggagtccttgttgtcggaaatttcgcaacaggcattagaggatcgcgccgagtgctacatggactactatggcaagtaccaggtaccggagatcagcaggcgtgtcaacggaaaaactacactggacgagaatatcgcagacaatagcggattaagacaagcattgacggcctatcgcagtcacaggcagcaactgctggagcatcctgggcaggagaggataagcgacgccatgccgggtctcgatctcacgccggaacagttgttcttcctgggatttgcccagctattttgctcccattacgaggaggagcactactggaaaggtcttagcgatgtgcacaccttcgaccaatttcgtgtcctgggagttttgtccaacagcgaggacttcttccacgcctacaactgctccgtgggcagcggcatgcgtcctggcgccaaaacgtgccgactttggtag

SEQ ID NO: 18255 - protein, 702 aa, DROSOPHILA
MFHESLKLISLMLLWVIVAAVLTDCEARSLVDRSENSDSNGSSTNRSAAEYQLQEYAEFMKSYMNQSVEPCENFYEYACGNYRNVKPDRYSPGSRSNLGDVTYTLIDITEQLLGRMDLAEALNVSSELAVAQRFYNACLGANLHPFNAADPAYLSLIRSIGGFPAVDGDAWKASNFNWINMSAHLANYGANGLIRETLQLRYPFEPYTKLPELGFDHIIVHEENISRNTTRAFRLNEERMHGYLRAFGLPEDRIREAIAGVFAFWRDALEIPPQCEVFDPYRIKRVFPQSEYYYNISWSGLHSTNKLFCDFYYVELDKVCARHRKAVANYLAMKLLYRFDPKLKAPRYQRNYCSVTLYQSMRFLFNKLYMANNFSEAKRLEMSEMVRELRKSLRKALEDADWLDAESRARALLKESRIQPRIGSFQDDALSDRIIREINSLKVIEDRYAETNINLQHLVVQINRFSSRHFQELTNDTKPQKILTGLQVGAGYYTPDNSINVMAGVVEPPIYQRHLPISLKFGTLGFIVGHELIHGFDTTSSYFDGNGHMESLLSEISQQALEDRAECYMDYYGKYQVPEISRRVNGKTTLDENIADNSGLRQALTAYRSHRQQLLEHPGQERISDAMPGLDLTPEQLFFLGFAQLFCSHYEEEHYWKGLSDVHTFDQFRVLGVLSNSEDFFHAYNCSVGSGMRPGAKTCRLW

SEQ ID NO: 18256 - DNA, 2705 bp, DROSOPHILA
tcttcgccttggaaaaccccatttccgacatcccaaaactcgcattcccacgatccctacagaaattgctaaaactttgtctagcaagtagataacagtatgcgtaaattccgtaaaccttaaatttcacgtagttggaaaagccttgaagaattcattcaagcaaggcaccctcaaaattcccgcatgtgtttcatcggtttggcccactgtgccatgtgcataagggctcggaactcggagctcggactcgggactcgcacacgggctacctccgattataacttataacaccaacgagcgagaaaaatcttgtgggaaacttgagggcaaagtgtttcccacgattcgaatgtcagtggaaaggaaaacagagaagcagcatgtgcaaccaccgtcgcaccaccaccactgcactatcgcatcttcatcccctgccgagactcacttacaccgaacaccagtggccatagcaatagtactgagaacatatttaaagttctagataatgtttatattttcaaaatcactactattaagaagtgtgctaatttaattttttaggtgtaaacgtataacattatgttaatttctttttgtttaataaaacgacatttaagtgctttaagggaaacccatttgaagtaattgttaaaaacgtaacgtacttcttaggtatataacaacaaatttgtatattcgctcgaagaactatagctgctttaaacacatttctcatactatttttaccgcaggtgtgttccaaacttgtttgtggagaaaaacccaccaccgaaaatgcaggcgagaggatcgtgtcccagtgactgagtaaaagtagtttgctccgcaggtggtggttcttcggaggctccgcagctctctcttctctctttctccgagcagcgtgcgctgagcacgagacgctctcgcggcggcacgtgcagctataaaagcagcggtaaccggagacgaatgcaacatttcgaacgcaatcgtcgtgcagtcaacatctcaggataacctcctccgaaagatcgaagaagttcttcaacaagtcgttcttccatttacctaaacgcaacaaataaacaaaacaaacacacaatggccaccaaatacgagatgtcgaaaacctatcagtaccgcaaggtgatgaagcccttgctggagcggaagcgtcgtgccaggatcaacaagtgcctggacgagctcaaggatctgatggccgagtgcgttgctcagactggcgatgccaaattcgagaaggccgacatcctggaagtcaccgtgcagcatctccgcaagctgaaagagtctaagaagcatgttccggccaatcccgaacagagtttccgtgctggatacatccgggcagccaacgaagtgtcccgcgccctggcctcccttccccgagtggatgtggcttttggaaccacactgatgacccatctgggcatgcgtctcaaccaactggagcagcccatggaacaaccgcaagccgtcaacactccactcagtatcgtctgtggatccagctctagctccagcacctactccagtgccagctcctgctcctccatcagtcccgtttccagtggatatgccagcgacaacgagtctctgctccagatcagcagccccggacaggtgtggcgtccctggtaaacaaagatctacttggaaggactgaattcccgacgggcaatcacgcaattggaaccgcagctttagaaaaaatgctttacaatgatcctcatttatttgttacgttaccaagttttaggtttctaagttaagtctgtgatagggcacgctttattaacttttgtcttaaatcaatcgagcagaagtctgttttttactctacatatatacaaatgtttaccagctaagagatctcaagaacacaatatgaaaagatacaaaatgaaaaacttaaatacaaatcaaaatatgaaatgaaattatacaagaatcttattatttggggaatctattttacagcacaatccaataggggatattgaacttcagtatttgtctttaaattccaataggaagaagattccattgaaaatatttaatgttggtatgcgcgaactttaaggtccaatataataaaacgatcgtgtgcactagcttatttaggacacgtgtaaaaaaatggacttcccataaattatgttcattatcttaaagcccatcattatcctaaacgagctatattaataacaagtttcaataacagttaaacataatagcaaaacatgctccactaatgtgcacttagttgtcaagcatgcatttaataataaaaaggaatttaatttcatatttttaatggtcgttatttttcatttgcacgatgtgtttacttatattctatttcagtaactattttgtcaacagactatgaaatgaaagtatttgacatcctttagcacaatacaatacattgttataaaccttaaatgcggcattataatttttccaccaataaaaggtcaataagaatggtcaagaaacatacaaatgagtttcagcacgcgtctcgattacttatcacacattataccctattatatttaatcccttaaaatttattcttttacaattaatcaattaaattacatcacatattgagggttgcaatagcattacgtaaaatcataggtaagtgtattcaattccaaattcatacc

SEQ ID NO: 18257 - DNA, 705 bp, DROSOPHILA
gtgcagtcaacatctcaggataacctcctccgaaagatcgaagaagttcttcaacaagtcgttcttccatttacctaaacgcaacaaataaacaaaacaaacacacaatggccaccaaatacgagatgtcgaaaacctatcagtaccgcaaggtgatgaagcccttgctggagcggaagcgtcgtgccaggatcaacaagtgcctggacgagctcaaggatctgatggccgagtgcgttgctcagactggcgatgccaaattcgagaaggccgacatcctggaagtcaccgtgcagcatctccgcaagctgaaagagtctaagaagcatgttccggccaatcccgaacagagtttccgtgctggatacatccgggcagccaacgaagtgtcccgcgccctggcctcccttccccgagtggatgtggcttttggaaccacactgatgacccatctgggcatgcgtctcaaccaactggagcagcccatggaacaaccgcaagccgtcaacactccactcagtatcgtctgtggatccagctctagctccagcacctactccagtgccagctcctgctcctccatcagtcccgtttccagtggatatgccagcgacaacgagtctctgctccagatcagcagccccggacaggtgtggcgtccctggtaaacaaagatctacttggaaggactgaattcccgacggg

SEQ ID NO: 18258 - protein, 186 aa, DROSOPHILA
MATKYEMSKTYQYRKVMKPLLERKRRARINKCLDELKDLMAECVAQTGDAKFEKADILEVTVQHLRKLKESKKHVPANPEQSFRAGYIRAANEVSRALASLPRVDVAFGTTLMTHLGMRLNQLEQPMEQPQAVNTPLSIVCGSSSSSSTYSSASSCSSISPVSSGYASDNESLLQISSPGQVWRPW

SEQ ID NO: 18259 - DNA, 3247 bp, DROSOPHILA
agatccggcttgatatcggccgtacttaaatcgtagtctgctagcgccggatagccgtccaagggttccgacttgatgtccacactgcgtcgcttcaccggcgaccggtgatcgtcctgacgcggcttaagttgctgcttgcgctttcttccggagctggacatttcgtttggctgcgttttctcttccaaataatgtaaatacagaggaaattttagccgcagcaacgcgtgtttttcttcgacctcactgtcactcgtcctctctcactcgagtcacatgtgctgtatgttgtgctctttcgcaccttctcaattcgtttattgcgcgggctgtaagcggcgttgccacctgaacgaaatgttacctgcaaaaatcgttggcgaattcaaatcggtcgtgtaattttgaactctaattaataattattataattttatacatttacctttttacaggaggacagtggtacggcgtcgacatcaacaaggaagacatttcggacaactatgagcagtgcgtctgggagccgtccatcattaagatcaatgcactgacggcggccgccgaggcagcctgcatgatcctttccgtcgatgagacaataaagagtcccaaggccggagaacccccgatggccggcggtggcatgggaatgggccgcggaatgggcaggcccatgtaaatagaatcattcagaaatccagagaacactacaccctaatcatcaaaactcacttgcatttctctcctaatttaacacgtacacgtattactcggtcataccttcgcatttcgcacgcttcgaagcaagaacaacagcaacaataatccactgacctatctgtatatgtttaataataaaacacaaaattgaaatttgtattttcataacatcagaacgtttttagtttaaatgcggggcgaggtggcaactctgcggggagtgctgttaagcagctgcccgtggtgctgttaaacgcaagcaacatattgtcaatccaatccaacccttaaataaacaataaataatgggcaatcataaagttcttcgatcggcaggaagcaatttgcgctattcgatgtacgagttcattgacgcggtacacaaacgttctattatatgggaacgaagccacccaaacttccataaccgcgaactcagagatgaggcctggcagcaaattggccacgagctttgctcgaattttgacgactccagcgagccggagaagcaggaaataggtaggtggtggctacctttttgagtctatatcatacataacttccaattccagttaaaacactgctcaaacgttggaaaaacacgagggacagctacctacgggtcaaccgactacgtcaaagtggcgaggaggtggccagagcttcctacatctacgaaaaggaactgagtttcctgctgaacgtgaaagcagagtcggaggacgatgtagaatccttgaaggagcaacccaagccccaggccaaacggaagcgagtgagcactgccgcacagagatctgcaaagactccacgaaagagaaactccgaccaagaatcgaatattgagcctgccatccgcaatccagccataccaagcaacataaatacggttctgggagatctgggctgcgccaaggaggacaccgccactccggaaatcgcatatattccacagttaccatcagatccaccctgcagtacaaataccgcctacttgtccgccgatcctgatcaggccttcttcgacaccattaagcctcacatgcagcagatgtgcgccgatcgcaagcttgactttcagatcgaggtcctgaaaatcctacgaaacttcaagccgaattgaatattcactacagaagtcaaatcatttacaaatgcatttacaagaagggcaaaattcgtttaacagcaagttaacataagcaataagaatacatttaatcgttatcgtaaatcgtctaatctttagggcgcgaaatttaaataatgaactgtaatttgtaatttaatatacaaacaataatattcacaaaccaggggttaaactttaatgcaaccaatgattcaattattttttttagttcttaataatgcgtcaaatagttttctcatagtaacttctgtgttttgcgcaatgtatatattatacgcttacttttgtaatttttgataataatacaatagttgtagagttatttaagacaatgaaaaaaacattaaaaacaacattaaataatgtataaaaaatatgcattttattttgttttaaaccataaattatctaacgacggcaatatatttttatacgtgggtttcaatatcaatttcatacaacatggatttgtatggaatttcatatgaatatatatgctcatatgtatattaactatgtatgcaagcaaattgtccacatgtgtaattgatatttttacataaatcccatgttctgttattcatccccctagccactactttcttgggccggatgctgtctcaatacatatttatcgcctgcagcgaaattttagtataaacataaactgtcaaaacgatacataagccatcggatggcccatgttccaaagccgtttgaccagtttcggctgatgttgatacaaaaaagagttgaaacctgtattcatacagcttgtacctcttatgccaatcgagttttcattatgtataccgatttcttcatggtttttgttcaacacaaaggcacatttatggattgtacgagcgtatttataagtcgacactccagacgacacccctaaaaagaaatcgctgaaaaccgttaaggaacccataggggtaacacagagatttggatgcggtgtcggctttcaagcgttccacactgctgggaattccctgagtaccatctatggggggtacgacgatatcgttaccccgaatacccgcccccacaattcacccgacaaatggtactcgtaacgtcctgatgatgccgttctcctcgggatcgccccattccatttcccacttaactgcatatggtttttgttagtggttgtttcgggtttcggaaatttctgcccgcgttcgggaccctaccctccacttcatctattagcaacggctctggcagctgttctaccctattaaaaggtcccttagttcctcgattccgactacctgcatctgctgaatggaaatgcactgaaaactttatcgtattttcttttttaagtattttattactgttattttgattaga

SEQ ID NO: 18260 - DNA, 1194 bp, DROSOPHILA
tccaatccaacccttaaataaacaataaataatgggcaatcataaagttcttcgatcggcaggaagcaatttgcgctattcgatgtacgagttcattgacgcggtacacaaacgttctattatatgggaacgaagccacccaaacttccataaccgcgaactcagagatgaggcctggcagcaaattggccacgagctttgctcgaattttgacgactccagcgagccggagaagcaggaaatagttaaaacactgctcaaacgttggaaaaacacgagggacagctacctacgggtcaaccgactacgtcaaagtggcgaggaggtggccagagcttcctacatctacgaaaaggaactgagtttcctgctgaacgtgaaagcagagtcggaggacgatgtagaatccttgaaggagcaacccaagccccaggccaaacggaagcgagtgagcactgccgcacagagatctgcaaagactccacgaaagagaaactccgaccaagaatcgaatattgagcctgccatccgcaatccagccataccaagcaacataaatacggttctgggagatctgggctgcgccaaggaggacaccgccactccggaaatcgcatatattccacagttaccatcagatccaccctgcagtacaaataccgcctacttgtccgccgatcctgatcaggccttcttcgacaccattaagcctcacatgcagcagatgtgcgccgatcgcaagcttgactttcagatcgaggtcctgaaaatcctacgaaacttcaagccgaattgaatattcactacagaagtcaaatcatttacaaatgcatttacaagaagggcaaaattcgtttaacagcaagttaacataagcaataagaatacatttaatcgttatcgtaaatcgtctaatctttagggcgcgaaatttaaataatgaactgtaatttgtaatttaatatacaaacaataatattcacaaaccaggggttaaactttaatgcaaccaatgattcaattattttttttagttcttaataatgcgtcaaatagttttctcatagtaacttctgtgttttgcgcaatgtatatattatacgcttacttttgtaatttttgataataatacaatagttgtagagttatttaagacaatgaaaaaaacattaaaaacaacattaaataatgtat

SEQ ID NO: 18261 - protein, 254 aa, DROSOPHILA
MGNHKVLRSAGSNLRYSMYEFIDAVHKRSIIWERSHPNFHNRELRDEAWQQIGHELCSNFDDSSEPEKQEIVKTLLKRWKNTRDSYLRVNRLRQSGEEVARASYIYEKELSFLLNVKAESEDDVESLKEQPKPQAKRKRVSTAAQRSAKTPRKRNSDQESNIEPAIRNPAIPSNINTVLGDLGCAKEDTATPEIAYIPQLPSDPPCSTNTAYLSADPDQAFFDTIKPHMQQMCADRKLDFQIEVLKILRNFKPN

SEQ ID NO: 18262 - DNA, 3336 bp, DROSOPHILA
aacagccctggtggcgattggaacaacaagttcgacgatttcaacgtcgatgacgaggaggaggactcggatgacaacatcccaagtctgtcccagaacgacgaggatgacgaggagggcggcgagggtgataaggagaagaagccagctgcctagacggtcgctcagatggtgtctcgcaatttggcgtagtcgtagcgttaggcgtggctcttataccataagtcagcacacgatcacaacactcactcctcacatacacaccagaaaagaaaaagaagaaacactcaatcactcataaaacatccacaaacgcatgcgtacatgaaacactattccaatcgaagaaaaccacatttaatatacctgaatattatgcgtattcagaggagagatgttaacaaaaagcaacacaaggaacaagatgatttggcgccgacaagggaaaccataagttttacgctagaatttaacaaccagaggaaagctacaaccaatttattgcaaaaatcagtttgcagtttattatttttgtttcctgtaaataaaggaaattaacaataaaaaaaatgaaaaacttatattcggctttttattttcaatattttataagtttacaacattctataaatgttctagaaatctctaaactgttaaattcggaatgcgcagtccagcttcttaaagatgtcgcaaagaaggctttatctttgaatagatagcgattttaaaaagaaattataggtaatggttaaaaattgtttatgggtaatcccctagaatttgggtttaaaattaacataggtatttttttctttaaattttgcgcccacttaaatgaattttgttatgttggcaacactgttgctgtgacaacgcgggaaagaagaagcacaattgaaatgcaaagcaaacaaacagttatcactcgaaataaaggacttgctgtcaagcgatagaacggaaaagcaaggtataagattcccctcaaaacgataccatgaaacccgctgcgattccggctagcgagcggcgtctggccttcgtggccgagtggttccatgcagaggctggaatcatacgcacctttctgatcacctactatgtatccgacaaggccgtggaagtggtgaggattggtagcacaagttcttcaaagaaacacatttaaccaaggccatgttttccctcagttcgaccagcgcaacaagcgcacatttctgcgacgcaccaagatcccggagctgacccagcgcgacttctttgtgggctccaagatcaatgtctttggccggcagtttgacattgtggattatgctgacgacactacgcggacaaacctagccaaatatcgcaagaagtatgttccttcatcgacagctatccactcgctaatctgtaattcccatctctttcaggggattcgttttgctcaagaacaatatgtggacgaagcacctgggcaagttcctaaagactctgatcgacaacaagattaacataaaccagggcatgatggttcagttctctcccaaaatggtaactcagtttctgtccggcaaggacacgacggatgtctcctcttcgtgagtaaagatggcatgccaaggaacacatcttatcctctaaattccagagtccttatgaacgagctgctggctggtccggccattagtctggagctaatcggcgacaacgtagtggagaccatcaaggcctgcgcccagtacaagagcacagaggcggaaacacccagtgtgaaactgtcgcccagtttggaagagctgtttgaaagtgaggagattcgttatggattttactactctgataacgacaacgacgtggaaatggacctaaagttcatatctgaggcgaggcacagcataattaaagaatgtgtattcaagaatacaacacttgccatcattaagccgcacagcatcaaggatggtctcctgggagacatcatttccgaaatcctgtcgaatggctttcggttgacagccatgcgcatgattctaatggcccgaatcaactgcgaggagttctacgaagtctaccgcggagtggtgcccgagtatatacccatggttgctcagttggccagtggagtatgcatgtgcatggagattgcttgcgccgatcccgaaaagaaaactgatcgcgagttccgcaacttctgtggacccatggatccggagatcgccaaactgttgcggcctcacacgctgcgcgccaagttcggcaagtccaaggtgcagaacgccgtccactgcactgatctgccagatgactccaacctggagctgcagtatatgttcaagataatcgactgatcttagtttagtttttatttgttttcagttaaatgcatgtttgcctgtgtgcgtttatcaataaattacaagtgcaatgaaaatactagaccgtagaaacttctcctatatgctcccgctgcggctggtgctgggcacatcccggtcctccgcttcactgtccatcctcacatacattccggccttgcgctcctgcagagtgtaatcgaaggccaaaagggcatagaggatgatgcaaactagcattaccaccgcatagaagaagtactcggccatctgtgagctaagcatacccagctcggtgaccagaaccacgatcagattgccgaaagcattatttagaaaccaggctgccgtgaccaccgacttcatagaggtcggtgcttgggtgaaggcgaactggagacccggaatggaaagcagtaattcgcccatcatgagcagcaggaactggggcagttgccaagctatattcactgtttggggcggggaattcttcgaatatttcgggttaataaacgatcaggtgaggtatcttattattcctgcttacctttattcgttcctgcaaggctcctgcacagaaaaaggcgccggcggagaagatcccacccacagtcacactatggagcggctggagctcccagttgaagtagcggcgcagcaagggcactgttatatactgccatagagggatgagcatgaacagaaagatgggtcccacggccttggcctgatccggctggatggtcacgcccattaatgtggtattcatctgggtggcctggaatgtccagctggaatcctgttgcgccagcagagcaaagtagaagggcagtgggataaacagcttggatatctaaaagaaacgaaattatgaagttgaaagaatcttcattataacacaagtataactgaccctcaaaactctggacacatcattgacgaaacccatgtcgtaggctacaactgcattgtgtagccagtagttggagcgctt

SEQ ID NO: 18263 - DNA, 1164 bp, DROSOPHILA
atgaaacccgctgcgattccggctagcgagcggcgtctggccttcgtggccgagtggttccatgcagaggctggaatcatacgcacctttctgatcacctactatgtatccgacaaggccgtggaagtgttcgaccagcgcaacaagcgcacatttctgcgacgcaccaagatcccggagctgacccagcgcgacttctttgtgggctccaagatcaatgtctttggccggcagtttgacattgtggattatgctgacgacactacgcggacaaacctagccaaatatcgcaagaagggattcgttttgctcaagaacaatatgtggacgaagcacctgggcaagttcctaaagactctgatcgacaacaagattaacataaaccagggcatgatggttcagttctctcccaaaatggtaactcagtttctgtccggcaaggacacgacggatgtctcctcttcagtccttatgaacgagctgctggctggtccggccattagtctggagctaatcggcgacaacgtagtggagaccatcaaggcctgcgcccagtacaagagcacagaggcggaaacacccagtgtgaaactgtcgcccagtttggaagagctgtttgaaagtgaggagattcgttatggattttactactctgataacgacaacgacgtggaaatggacctaaagttcatatctgaggcgaggcacagcataattaaagaatgtgtattcaagaatacaacacttgccatcattaagccgcacagcatcaaggatggtctcctgggagacatcatttccgaaatcctgtcgaatggctttcggttgacagccatgcgcatgattctaatggcccgaatcaactgcgaggagttctacgaagtctaccgcggagtggtgcccgagtatatacccatggttgctcagttggccagtggagtatgcatgtgcatggagattgcttgcgccgatcccgaaaagaaaactgatcgcgagttccgcaacttctgtggacccatggatccggagatcgccaaactgttgcggcctcacacgctgcgcgccaagttcggcaagtccaaggtgcagaacgccgtccactgcactgatctgccagatgactccaacctggagctgcagtatatgttcaagataatcgactga

SEQ ID NO: 18264 - protein, 387 aa, DROSOPHILA
MKPAAIPASERRLAFVAEWFHAEAGIIRTFLITYYVSDKAVEVFDQRNKRTFLRRTKIPELTQRDFFVGSKINVFGRQFDIVDYADDTTRTNLAKYRKKGFVLLKNNMWTKHLGKFLKTLIDNKININQGMMVQFSPKMVTQFLSGKDTTDVSSSVLMNELLAGPAISLELIGDNVVETIKACAQYKSTEAETPSVKLSPSLEELFESEEIRYGFYYSDNDNDVEMDLKFISEARHSIIKECVFKNTTLAIIKPHSIKDGLLGDIISEILSNGFRLTAMRMILMARINCEEFYEVYRGVVPEYIPMVAQLASGVCMCMEIACADPEKKTDREFRNFCGPMDPEIAKLLRPHTLRAKFGKSKVQNAVHCTDLPDDSNLELQYMFKIID

SEQ ID NO: 18265 - DNA, 9767 bp, DROSOPHILA
agtgcataactgcggcataaatctgccatggttgttaatataatccgcaactggcggatatacatatatgtatacccatcccaggtggcacgttcgaactttttaagggcaagcaaacggtggcaaaacaaaaagttgtatgggaaatgagctggttagctataaatacacatcctcgcatatgtctccagccagccaagggcagccaactttgaccaatgccttccgcatttggcgctggaataccatggcattacctttatctgtcagttttcccggtgtttttccccgaaaacacacattttatgcagccatgtgtaacacttcctgcgcttttgtcgccagcccagaaattatccgcattaagaatttctcgcattctgtgtgtgcgacggatgcccagaggtcctcacacggcttccaatacgactgatggttaaatggaagttccatctcatttccattcaaacttcgacgcctggcagggattcccgagaacatttcaggcacattgcagacggaactttaacatggaaacaataacccggagtggccggcgggcgatgggtgatggggaaactatgtttaccatgtttcacattgtggaatcctttctatctgaatgcaactagtttgccatctgggagtaagctttaagtgcagcacgtgtatgaatcttaaattcgtagaagccccagtcaggtaatgaaaacaaaaaggctgattaaatatatgtactttaatatagtttttgcattcaagcccaagtgcatcagactaatagctcttcaaattgcagaataccctctttgggcagctaaaaatattcgataatgttgaatggaaatatcattgaattgatgtgaaaggtattggcatttcccaaagcagataaataaaagggattactgcacaagttgcttatccttgaaagtgaaaagtagtttctcttgaccgcaacaaatccggacaagattccaaatcagcacataaaatcgcattttattgtttcgataaaaagtaattttcacacatttatccatttatttatttcctcttttgtttttgtattttttgtattttttttttttatagttacaaattacgatttgcaattgatttttgcgggcacaacgtaaatgtaaattgaattaaattcaggtctcgataacctttcgtatggtgcagcaaatggtgcttgttcaatgatgcagcataaatacaaaaaaaaaaacaggcaaaaaccctttctgtgcacctagggtgaaggtttattccattattaattcatttaattgagattcagtaacatcaagttctagttgctccctaataacccaatctgcattggtattcgtgtgacattcacaaggattctgctatggaaaatatatatatatattttttaataactatttgtctagatcaaaatctattctgcagctcgttaatcgtccgctgagtgaggttaggtgaggtgaggataaggtagtccataactggagatcggccttcaaggcactccaggctatgggctcatacacgactattggtctaggaacaattagcggctgattatagacattcggggtgagttgctctacgacaatgtgggctcgaaaaatacacaactttctgatctacggttagcagcaaaaacaaccatccaaatatcggtcgcatcaagtgcctgtcatcaaaacgttttccaaaaatactccgtctagccatataaactcgtacaaattccctatttacataccaattcacacatttcttaagctaacatatgtacgttaattcgttgagggaaaaatgcattcccttagcaagacaattccgttgatagccgtgcggcatcgcttctggctgagtattcgttgtccttgggctcccgacccgtgatatccaccagggagttgggatccatgttcgacagcttatccaaatcatcatcgttcatatagttcggctgcagtttgctcaccagactccgcagacgctgtgcatccagcgatgtgcgacgcagattggcattgtagtcactgggctgtggggcaaatggaagggtttgtggcatgattggtcggatgagtctaagtcaaagtcatatccaggttgcaaaaaaggaaagaagggacgaaagaactcacatcgcgccactgctcgccaggaaagacggcaatcaattcggcatttggctccagagtgctgaagtactcctcatcgtcgacctcggtgccatcgcaatccaggtgtatcgccggctgagcccgctcaaatttcagcgacaccttcgtccgcagctccgacagcgttgtggccacaactgccttgcggatgttcctcgtgatgtccttgatctggaatggaggcgacggattactaggaattttacgccgaattcacgctcagtattgacatgccggaaattgcatagctgtgatggaagaaggcttaactagtacactgcgaaaaatggctacgtaaaagggtatttacattttatagggttatgatacctaaacttttgaaaatcatagggtataacctccgtttaaatagttaaactaacatataaacataagatagggcttgcagattattacagtgtaatatctgactctacttatatcagatatttttcaaagaattttttaataaaagcgaaggacaccttttgtagacttaattaactttggaataaataaaatgcctgaccacttttaacccaaatatttgagctgcaaattggcactttaaggcttttgaggtaaatatgtcaatctggtttttaaaagtatatacttaagcgataagacgttgtttaaaatagtaatatctaccaatcgcaacatggatgtaaagccaaatgtaatacaaattgtttagctagccataaatgtttgtcatactcgtagtcaattgtttagccctccacacattttatccattaagctatagcaacacacagacgaaaagcccccaacatttttttgctttaatttgcgaaaaggcccccaaggcacccatttaatgctgtcgataaaaacaatatgaagttaacgaagcgcggcgacaaagataagtgtaaggatacaaaaagacgcaggttaattgcgatgaacataaatatgaatttgaatattgaaggaagatggatggagacggggtggcagcagccagaagcagcaacaactaatcaatttatcatttgccataacaacaaagccaacgaacaatgggaaggtcaaggcacaagtcgtcacattcaagcgattatatttttcaaccttttctgctttttcggctagcgtccagcctctttctctcctttgttgggcctaaaagattgctactaaaatatttagggcataatgctgtcgattccaaacaggctgtcaaggtcgaatatggaggggggtgggtcaggcgaaaggtgaaagaaaacaaaaaggaacgaagggtcaagcaagtgggagagctctgtcgaaaagttgccaaagcctcctttgtgatccttttgggcattgtgttgcgtatacgccctgtgtacatacatatactgatgaattgccaaggggtgcggttggttctgacagatcttcaggtgtctccagttgacagccaactgtcaagcggtctgtggccatttaatcgctgccttcacagtctgcagtctcaaaagcagagtcatcagccccaaaagagtcattttttctgccatcacagcccatcaatcaatgtgctaaaccaattatacgatgctttggatgcttagtgaatccatcaaatggccaacgccataccgtctggtggcagtctggagctcaattggtgaaaacccaagccaaagcgacaacaatgaaactttatcacgcgcttaatgcgaatttcattggtctgtgggcttgggtgggcattaaagccaagagaactatttggtataacgaaacgtagcgattgtattcattctggaaatctgcgaccacgcacataccattcaatcggcacctcgtgccacgaattctggtccaaatgccaatgtcctgcggctttcattgcctcttaccactttttcgcccttgttgctgccagaaagtcattataacttggctttcttaacggcctgagaccgagcaagcacaatgtgagttttctcgagttttttttctcgagtggcctctgttgaactctgactttttggtcaatcccttcaattggctgccagggcaaaatgaagtgggttcatcttgcagcgcttagtgtctcgacctgatttgcggtttcactttggccaaattgtagcctctgctccagagactggcaaatatttatcccccgtgcggtagttccttaaggctatacatataccctcgcttttctgtttgccagcggacagcgtcaatattgcccctgtaaattcatagtttgcgtagcaggagaccatcattagaacaggcgacaaacaagacagaagtgtggcaaggacaatgcgcagaacgctcgcactgcagccatgaattcgccatgaggcatcacgagatgtggcctgataggactgttgttcaaatagcacttagggtcggtcaggatatgcaaattacggaggatgctagcaattatggcactcgaattcgagtaccccgaatgcggaaaaccgatttcggggcgaggtaacgaaagccgcattaatttggtatggcccatcgtcacaacccccacaaattgccgtaatgtgctgtgcctgcgatgcccattgtccatctcatgttgccttcactcgctgcaaggagtctatcggagacatttccccactaattgctcgtaattgccaccgaaatgtcatagcaacacattgctttaggcactctatatgcctttctacaaaaacctagaattttaaggtttagttttttaaggcttttgttaacacatcttgatttttaaattacacattccttttttctcagtgttctgctttgttttgaggaaatcgttagcatcgctcattcattcgagctccatgggccatgatgagttctcactggtttcaaactcgtcgcattccacacttacacgtacttattagctaacttgagtcggaagacagaggagcgcttagttgcacgcttgtctggacacgaagaatgcccgtttatttggcttaatgcgcaacgttgcgtatacgcgatgtctcagtcacagtacgacatattctgtttgctcttcgtttctatttgtttatttgtttgcctatctccttgctgatgttgttccatgcggcatgtctgctaatttaatatccgacccaactttcatgtaaacctctccataacgaatggatcaggctttatttttaaaccatttgcatttgcagacacccaccgaaaggtgatgcccgtaggtggactgtggaccccaaatgactgtgacatgaaaaacacatttgcgcgttacgccagtggggaaaatgaaagctggatttttcctcgcccaatgagatttgttttacaggaatctaattttctgccaggaccagaagtgttctgggcaaccacagaatttccttaagcaaaatattaactaaaactgcatgcgaagtaaaataatttggtacgcagccaactgaagtctctagtaggcactgttgccgacttagctcttttccaatcaaattttcctttatttcatatattttgatttagtttctgaactgaattccagctgttttttaaggtattcatattttcaagtcaaaaatgtctttctgtgtggcagcactgctatgagttttcagttcagcggtagatctaaaccaatttaaccttgtgagtaaaccaaactgcaaatcagtcatggtaaccatcgaattaattgaactatctgatattaagtagaagagatgcaaattattttcataccgagaagaacctaagggccaatacgtgaacacaggatattattaaccctacctcacgcattcatgtgttggcctctgactaccaaccctttccttaattttcactctcatttagttgtttctggaattagtcaaagggattatatctccaggattatatcatccagtgtttttaatcagaaccttggcaatttccccgagagctcgataaagaagatgcccgtgtcagatggcagacaagatggaggcttattaattagctggaatgcgcatgaattacgcatacgtcacgtggcccacgctcacccatcatcatcatcatcaccggtcggttgccactgacaaatgacatcgcgtttcggccacgtcaagccgtcaattaattgctttcgcctggcaaatttacagccacttgatatctcgtagacgccgatcttttggccagtttatattgttatggccatcgctctgatgccgttaacacacaatacatcgattagggtgttcagctggcgtggccaagacacctacttatagttatcgccgcccacacagacgccacaaggcggcttagatgtgggcgtggcactggaggcgattggcggaatggctggatgattggccagctggctggcccacaatgatatacgagacaattgggcgcccgcatcctgatcccactaccctatgcaactgaacagtttgaacattttaattaaattttcattgttgaccagccacacaggcaaaaaatttgcaagaagctaatctgagtagagggtgaaatatggtctatactatattgtattgatagtgttagtgatttactgagcatggcttactataagtgggtaattggatataggatcatcaaaataaggacattcaagttcaattaagttaaatcatatcaatactaaacagaatcgttttattcttgcaagtgtcgatgtgttgtatctttcacacacagtttttagagttaaaagtttcgtaaataggtaaacggatgcgtaaattgtttcgtaaactttgcagaattgacagcgactatttgtgaccctaatcatttctttctgtgctccaaattgggcagggccacgcaatcctcacaatcaaatggagtttgccatggtgaaggcagtgcggagtgggctgctggtagggcaaaaggaaacagctctgttttcccggattttttcccgcaccaactcttgcagcgaattgaaaagttggacgaatgcttaaagggcgaataaagcaccggtagcaacacttcagcagcagtgccaatgtcgatgatgccactcaacgccgaaggctttgaagtggccgttccgtcggggaacccttcactttgttcgtcctgaccgtcaaactttttcctccattttcagtttaattttttctattttttttttactatatacccatcaagcgtaacaatagcaccgcagtaatcacttaacgaaatgctggcccagatgacggggcgccaggtagcgtggctaaatgccacaaaggacatgaaggatgtgcgagtagcgagtggaatacccaccttgaagggcttgctgttgtccagctgggcgaaatcctcgtcggcggtggtgggcgagggcgtgggcgtggcgctgctgtgcggcgatagggccaactccaaggtgatgctatccgccgcatcgtccaaaccatcgtcggcatctaactcgatgtcctcgcagtccgcgtccagttcggccgtccttgtcagagtccgctgcctgggcggcggagccactattctgctatcaggatcacactgtactcctgctgcagctgctgctccatcgctctccttcttctgctccctctccggttcctgctcctcctcagctccttgaggcattccagccagctttgtctcatccgcattcattgctgtcatgtatttacctcgtctcgagagtttgttcgccttgtctggactccttgctgcactggttgaaaaacatggtcgaaagagaaagagatttatgacgagcaaaacaaatttagacgataattgaaatatgctgtatggcattcggggatgctttcaaagctgagccaagcatactaaaactgccagactttgtgttattgttatttcatatacgcgtgtacgttgtttgcttcgaccggaaaatttataacgaaatcgttgtttggcctttgttttggctttgatttaaaaaagttttgcaattgctgaaattgcttgaccttaaagccacatagaaaacgaagtttatagagaccaaaaaaaaaagaaggagaccatggaatgttattgcattacaatttcaccatcggctctttaaatactgtacatttttaccaacgacttaaaaaaaatatctacaaaatattattatttttttaattttatatagtaatgtaatttgcactatttcaattttggtgtcctgtatttgatagtaaagctccatatatgacgatgcagaaacgtgtttagagtttttcaaacgaatataattggccaacttttttgtttggtaaaacttcatttaaatttatagaggcaattataagtctaaaagaatatagtttgcatgtgcttgcttgttgttttttatcatgaaagctaaactaattattttccataatttccacaagcctcttttagacaaaaagatagttggtttatatactctgaactctagaagcaacattttgtttctcattaccgtgcactttaagttaaaaaccgaattcttcacatcttccggcaacaattacaatacgcgattctggctgagatcgcgagccgactactcacagcagccaagtgcaacaaaagccggccgaacttggaataaattgccagacgtctgtgcgtgctgtatttaaacgtggcaggactcgtcgagtttgccgacagcctcggccagcgcaaacacacacggcgcaaagtcagcaggtcctgcaaacacacagcaaagtctaaccttcgcggagctttggccgtgagagcaggacactcgcaaagagaggcaaagagagagagagagagagagagcgagcgctctgttaaggctcctgttagccaggacacgctgggcgtgccgggccagaagcatagaccctatgccggataaagtaaagttggcacaaaagaactctggcctgggatcgggattctatgacctggaaggtgggaaaagtttactggagcagctgcaaatagttctacttagccgggaccacaagaagataaaaacgaatacaaacagcacagtgtatttgcggggcgtgatggcaaatataaatattttagcctgaactttcaggcgcttaagggcaaagtttaaaaatgcaataaaaataaagtttgcaatttcggcgaaaaactctggcgtccagctgaaaaatgtcacttcggcataatgagactgctgctggctgcataattaaagcatcccagagctgggcaaaagttttcaacaaaggtgcattgcctttgagggcgagacaaaagccgagatttattggcatttgcattggcggaatatttaaaatgcatgagacgctgtacgtcgatcgaatttgttcgcattgggagcaaacaaagccacttagctgcatttatcacagcactgggcttaaatggctgaaatattgcgcatacgccgcgtgagccaaggttaatttgattgcgcccgcttacggaagttcggcattgaacatggactgagcacgtgattccaactgcagtcacgtgatggataacaatatatctgtgggcctgttatctcgtttacgcattttgagcctggtccttgtcccaactacctgaagtgca

SEQ ID NO: 18266 - DNA, 1788 bp, DROSOPHILA
ggcttttgttgcacttggctgctgtgagtagtcggctcgcgatctcagccagaatcgcgtattgtaattgttgccggaagatgtgaagaattcggtttttaacttaaagtgcacgcaaggagtccagacaaggcgaacaaactctcgagacgaggtaaatacatgacagcaatgaatgcggatgagacaaagctggctggaatgcctcaaggagctgaggaggagcaggaaccggagagggagcagaagaaggagagcgatggagcagcagctgcagcaggagtacagtgtgatcctgatagcagaatagtggctccgccgcccaggcagcggactctgacaaggacggccgaactggacgcggactgcgaggacatcgagttagatgccgacgatggtttggacgatgcggcggatagcatcaccttggagttggccctatcgccgcacagcagcgccacgcccacgccctcgcccaccaccgccgacgaggatttcgcccagctggacaacagcaagcccttcaagatcaaggacatcacgaggaacatccgcaaggcagttgtggccacaacgctgtcggagctgcggacgaaggtgtcgctgaaatttgagcgggctcagccggcgatacacctggattgcgatggcaccgaggtcgacgatgaggagtacttcagcactctggagccaaatgccgaattgattgccgtctttcctggcgagcagtggcgcgatcccagtgactacaatgccaatctgcgtcgcacatcgctggatgcacagcgtctgcggagtctggtgagcaaactgcagccgaactatatgaacgatgatgatttggataagctgtcgaacatggatcccaactccctggtggatatcacgggtcgggagcccaaggacaacgaatactcagccagaagcgatgccgcacggctatcaacggaattgtcttgctaagggaatgcatttttccctcaacgaattaacgtacatatgttagcttaagaaatgtgtgaattggtatgtaaatagggaatttgtacgagtttatatggctagacggagtatttttggaaaacgttttgatgacaggcacttgatgcgaccgatatttggatggttgtttttgctgctaaccgtagatcagaaagttgtgtatttttcgagcccacattgtcgtagagcaactcaccccgaatgtctataatcagccgctaattgttcctagaccaatagtcgtgtatgagcccatagcctggagtgccttgaaggccgatctccagttatggactaccttatcctcacctcacctaacctcactcagcggacgattaacgagctgcagaatagattttgatctagacaaatagttattaaaaaatatatatatatattttccatagcagaatccttgtgaatgtcacacgaataccaatgcagattgggttattagggagcaactagaacttgatgttactgaatctcaattaaatgaattaataatggaataaaccttcaccctaggtgcacagaaagggtttttgcctgtttttttttttgtatttatgctgcatcattgaacaagcaccatttgctgcaccatacgaaaggttatcgagacctgaatttaattcaatttacatttacgttgtgcccgcaaaaatcaattgcaaatcgtaatttgtaactataaaaaaaaaaaatacaaaaaatacaaaaacaaaagaggaaataaataaatggataaatgtgtgaaaattactttttatcgaaacaataaaa

SEQ ID NO: 18267 - protein, 266 aa, DROSOPHILA
MTAMNADETKLAGMPQGAEEEQEPEREQKKESDGAAAAAGVQCDPDSRIVAPPPRQRTLTRTAELDADCEDIELDADDGLDDAADSITLELALSPHSSATPTPSPTTADEDFAQLDNSKPFKIKDITRNIRKAVVATTLSELRTKVSLKFERAQPAIHLDCDGTEVDDEEYFSTLEPNAELIAVFPGEQWRDPSDYNANLRRTSLDAQRLRSLVSKLQPNYMNDDDLDKLSNMDPNSLVDITGREPKDNEYSARSDAARLSTELSC

SEQ ID NO: 18268 - DNA, 2540 bp, DROSOPHILA
gggggttgcaggaagttaactatgtgcatcccataggtagacattccggcacaaggcccacctcacctcagcctgggcattgagtactcaacctcggccacgagtgtggcacgcggggcacactttctgcgcccgtttgacccacgtccccctgccaaccacccaaaaacccgagatcagacagcccaaacgatggaacgatcgaacaaccaaggcgacccggcacgaagccaatatgccacatccactaattgtgtccaataaacactcgtcgacggggcactgtgggaacggaaagaggagatctcagagttcgcagttcggaggtcggagcaggagtaggggcttatacaatcatcgtctgctggcattgatgaaacaataagcgagtagatggcacggcaggataacaatgccagagcggcccacgcacaagcagttcggatcccctgcccctgctcatcatgcttcgatcccatgtacccatatatgaacgttcccattccaaacacgacaggatgaggcagtgaagtatgcattaaggataataacaccggcccagaaagcaatgcgagcagccaaaaacagcgacagctgcaaaaatgtgccctgatccttatactcgaaaaaaaatgagaagcggagcggagcgaagcatgtggccaaaagggaaaacaaacgagaaaaaattgtgtgagaaacttactttcagctcggttcccacgccacgagccacaaggattgtcctccgtcctacgaagttgcagctgttccttgtgaaaaagacaacaacaccggcgtttagccgtgcgagcgaaagagagggcaggaaaggtgcgtatcagagggtggatttcagggaccagggagcggtataaaaggacgggacctcgcagagcagaatatcactcacgattacgccgtcgagcaggcagcaacaagccgaatacaaaatttttcaaaaatttttaaaactacgtaacctactaccaaaacaaaaatggaatacaccaccaagacccagatctaccagaaggtgaagaagccaatgctggagcgccagcgacgtgcccgcatgaacaagtgcctggacaacctgaaaacacttgtcgccgagctacgaggtgatgatggcatcctgcgcatggacaaggccgagatgctcgagtcagcggtgatcttcatgcgccagcaaaagacaccaaagaaggtggctcaggaagaacaatccctccccctggacagctttaagaatggctacatgaatgccgtcaacgaggtgtcacgtgtcatggcctccacacctggcatgagcgtcgacctgggcaaatcggtgatgactcacctgggacgcgtctacaagaacttgcagcaattccacgaagcacagtccgccgccgacttcatccagaactcgatggactgctcctcaatggacaaggctccgctcagccccgcctcctccggatatcacagcgactgcgacagccccgccccctcgccacagcccatgcagcagcccttgtggcgcccctggtaaaaacaaggggttaagtggcaggaaggtaagggtggagtggcaatgggaatggaagaaccaaccaacaacgcatctgtgatagcccaactgtgatggcaacaaaatagcaaaattaaaaaagcaattagcaaaacaaatataaaccaatttaaacaaatatcaaaacaatttactttattgggatgttgggaggggatctaagggaccaatcccttagttggtggcaattggaatccttattggtaattaaattattaccaattaggaaatatcaaataatatatctctgctctgacaatggaaatctattttggcaatgaccgaagtgaaatctattttataataataaatatttatttataaatataaataaattatatttatttatttatatctatttaataataaattaaatatatttcacttaattaaaataaaagtgttttagaaaactagcactgataattttaagttttttgaatcggtaatgtccttaacggttcacaagattgaaaatagcaaatcagactgaataataataaactgaataattatttattcatttttaaaaagcgcgccaactgcacctgaagaacatgtacagatctaagttacgtatttattgcggaacttttttcacttttttttcaagatcatggcaaaaaatgagtgttagcatggaatctatttaattagttgttctgcaaccgtagtgtttgtaaataaataatttaatacgtaatagttctttgaacattaggattattatttcgcagagtgtaactagttcgatttcagcgcaggcacttcctaacactggcgcatgcaacactgcgccgctgaagcgagtggcccgcgataacagaccctcgacacatcgataggcgatagcgcaaattgcatacctgagaccgacgcggtctgtgtgtcgcggataggaaaataggaaattataaatagaaacgggccgtgccgatgccccaaaagccacccaattgcc

SEQ ID NO: 18269 - DNA, 540 bp, DROSOPHILA
atggaatacaccaccaagacccagatctaccagaaggtgaagaagccaatgctggagcgccagcgacgtgcccgcatgaacaagtgcctggacaacctgaaaacacttgtcgccgagctacgaggtgatgatggcatcctgcgcatggacaaggccgagatgctcgagtcagcggtgatcttcatgcgccagcaaaagacaccaaagaaggtggctcaggaagaacaatccctccccctggacagctttaagaatggctacatgaatgccgtcaacgaggtgtcacgtgtcatggcctccacacctggcatgagcgtcgacctgggcaaatcggtgatgactcacctgggacgcgtctacaagaacttgcagcaattccacgaagcacagtccgccgccgacttcatccagaactcgatggactgctcctcaatggacaaggctccgctcagccccgcctcctccggatatcacagcgactgcgacagccccgccccctcgccacagcccatgcagcagcccttgtggcgcccctggtaa

SEQ ID NO: 18270 - protein, 179 aa, DROSOPHILA
MEYTTKTQIYQKVKKPMLERQRRARMNKCLDNLKTLVAELRGDDGILRMDKAEMLESAVIFMRQQKTPKKVAQEEQSLPLDSFKNGYMNAVNEVSRVMASTPGMSVDLGKSVMTHLGRVYKNLQQFHEAQSAADFIQNSMDCSSMDKAPLSPASSGYHSDCDSPAPSPQPMQQPLWRPW

SEQ ID NO: 18271 - DNA, 4544 bp, DROSOPHILA
taatcagatacatatatacagatattttggccatatagccccgccgatactcgcgtatatatttccgtttcgatccgatgcgatccgatccgagagttttgcgcgcctcgtgccaaacggaattgggaaaggcagccaacaacgacgacgacgtctccgctcgagagccaaaaagcgtatatacaacaagatttgtacgaagagcgccaagccaaaaatatgaaaaacaaacgagacagcaggaaaacataccaaatttcccgggctggcgttgccaccatactggtccatgtccaaaatatgggcaccatatgagttagtgatcctgaccagggcttttaaatcttcagtttcaattgtgttcggcccggaaaggcataagtcgaacttaaatatgttataatatttgaaaatacctgccagttgatggcaaaacaccagccgtctggcaacattccaccggaattggggaaaattctcagaaaattcttgcggcgggacatgcgcatagaaactttgagcacgacctacaggtcgtatgagtactcagccaaaaaagacgcaacattttcgagcgtgtgataagacacagatactccgctgcggggactttccctttccaaagcgacagagagggaaatgaaaaagccagggagagcgagagtgcgtgggcgcttctagggaggaggcccagttcgggctttcgggccgggccctagacaacggagcaccacattgagggaggtaggaaatttgtggctcttatcaacacagccgcctggccagcgagcaccaccagccacatatatcgggcaatgcaaaccagacgaaactgggtcaaattcaagcagccagtttggaatgctccatccggaaaatgtatcggacggatactggaattatttctaattgcctgcggacacgaacagtttttacggttcaataaaccatgtattatgttgaccctttcagaaaattttaaaatggaatcaataataattagttttttgtatagttttttctttatacaataatccataataatttttaccgctcatttaatttaatacaactatgcagaagccaatggaattttgtgaaaaaaattaaatgtacattttattattcgttattgatcgaatttgtttttaattttacaatttttcatcgatgcactcatgcatgcaggacatttcccaggtgtatggtaatgcaactgttggtcatgtcttcagtgtgatacggtaaatttgatttatctgctggatttcaacactcaggaccttagtgggagcgggtatccatggaggcggttagcataagtaaggttcttaaaagctccctaactttccatagtctgattcgatccgtttagtcgcttgatggctattttggctacacccttcgagcactctgtggatccgcccatgatgacgaggaagagtccgttgtgcgcaactgacttccacaggcgatcaatggtcttgtccagtttggcaacactccgctgtgcactgtccaatataaagtcctgctctggcacgcggaggttggcaattgtcagggcattttccagtgcaacttcattgaccttccgaatggcttccttggccgtagatacctcgtggacatgcaccgacgtactttgatccttgggcgctgcctctcccgccttttcgatcacttcctttagacggggctgcagctcgccgaccgtgacaatggccgtgcgcttatcccgctttgccacatgtgcaaacagattgttggatatggtatcaccgctggatgcgttcgccaactcctgtaattgcttgtgctgcgtgaggatctggtctccgaactcgatgctgtttgccagcttcttcttgacgagcttcagcgtggctcgcgaatcctcaatggaatcgtgaccatcgatgttctcctggataatttcctgtaaaaaggttttggccagatccttcagcttggtcttgcgtcgtcgcaccccagatgtgttaaagcacacgctggtgtcaattacatacgggtgcatcattttcatggcgttcaagtcagaatttagagattgccccaccagaatggcatctggaggcagcagttcggacacttccttttgcacaacatccagcctcttggtcacttgctccataatttctgcggttatgcccgaatattgggttagatagtcggtgatccggttatttggcaacactagcgtttcataaacggtctcgtaattttcgttgacaatagagattcgggttagctcgttacaacccgcctccgtgtgacacatttcacaatcaacgccgaacataggactgcgattggttaccggtgcatacagatccttggtaaacttaaagttttggaaacgagtgtgtagctcgccctgcaatggaataggatagccctcgtcgaccatttgcagcgctgacagcaggagcttagtgcgtgggaacttgtcatcctcatgcatgtcatccgactcagatttagagctttcgattggaaagattgtctttacaaacaaagttggatctttgttcagctccacagccgactccagggagccgtgctcgtctatcagtctgcgtgcctgcgcattggtgagaggaatctgcaagagcaagggatatattattaggcaaacagacagtttcaacgaagccctaccttggctatctcgtcgataatcttctggccctcctcctgcggtggaagtatcatctccagcttcgtgctgaatatcctgttggtggcctcaaactgggtctcgttagacagatagtggtagagagatagtccctccagaatgaccaccacactgtgcgacagactgagccacttctccacgctgcaccagcgatccggacggcaggggctcttctggccaatgagagcgcacatcaacaggttctggatgtcggttagaaagatgggcgtacgagcatcttgcggagtctccagggaggcgcgctgacccatctcacgcagtcgcaaggccggtacgttctccagctcccgtttgcgacgcctcaactctgccgacaactgattgtactgatcctcggatagcgagccaatctccagcggcaggctatctccaccagcatcgtaattgcggattttcttgttcaccggctcttcaggatctgatgttcctggggcagtctgtgaatccgcctccagctcgttgttttgacgacggtttcgcggcttgcgtttgctgcccaccacgatgaaaccgtcgtccccgtcctccgccttcgctgttgacttctcctccacttcgacctctgcatcgcgttttttggccaactctgcctcgtgcaatcgatcgcgatcgttgagctccatcaggttcgccagggccgccagcttctttttcttcttctcgttgcgctcgtgctgcttggtggacatatgttccttcatcctggagcgcttaccgttcaagctgcaggcgaaaatacgcaacttttattaaattaactcgattttcagtagatttcaatttgtcaacacgaagatttaacatgtgcaacgtgctagtgttaccagatggtaaaaacagtttttagccccaacagagctggcagtcccgctattttctcgtcaaatctgacttctttccagccgaaatcagtgcctgccaaaagctggctgctggaaattgcggtttgtacgtaaggttcccaggcgtgagtaagaaagagacaaccatagtatacatcaaccgttatgatgccgcgtgcttttggtacaagttaaatcgtcaaactttacaaccgccccaaaatttttgttttacgcccgaaattaaataaaataaatacgccatcatgtacgcagctgttaaaccgctctccaagtatctgcagttcaagtcggtgcacatctacgatgctattttcacgctgcactccaaagtcacagtggccctgcttttggcctgcacatttttgctttcctcgaaacaatatttcggcgatcccatccagtgttttggggacaaggatatggactacgtgcacgccttttgttggatctacggggcctatgtgagcgacaatgtgactgtgacgcccctaaggaatggagctgcacagtgccgaccaggtgagtttggaaatgcttcaaagattcccatgttcagcacggattcttcatttcagatgcggttagtaaggtagtgcccccggaaaatcgtaactacataacctactatcagtgggtcgtgctggtattgctgctcgagtcgtttgtgttttatatgccagcatttctctggaagatttgggagggcggtcggctgaagcatttgtgcgatgatttccacaagatggccgtttgcaaggacaagagcaggacccatttgcgcgtactagtcaactacttctccagcgattacaaagagacccacttccgctacttcgttagctacgtcttctgcgaaatactcaatttgagcatcagtgtgagtgaccaaaactagtaattcaataatctacgatattactaaaaattgtaattat

SEQ ID NO: 18272 - DNA, 2488 bp, DROSOPHILA
ttaaatcttcgtgttgacaaattgaaatctactgaaaatcgagttaatttaataaaagttgcgtattttcgcctgcagcttgaacggtaagcgctccaggatgaaggaacatatgtccaccaagcagcacgagcgcaacgagaagaagaaaaagaagctggcggccctggcgaacctgatggagctcaacgatcgcgatcgattgcacgaggcagagttggccaaaaaacgcgatgcagaggtcgaagtggaggagaagtcaacagcgaaggcggaggacggggacgacggtttcatcgtggtgggcagcaaacgcaagccgcgaaaccgtcgtcaaaacaacgagctggaggcggattcacagactgccccaggaacatcagatcctgaagagccggtgaacaagaaaatccgcaattacgatgctggtggagatagcctgccgctggagattggctcgctatccgaggatcagtacaatcagttgtcggcagagttgaggcgtcgcaaacgggagctggagaacgtaccggccttgcgactgcgtgagatgggtcagcgcgcctccctggagactccgcaagatgctcgtacgcccatctttctaaccgacatccagaacctgttgatgtgcgctctcattggccagaagagcccctgccgtccggatcgctggtgcagcgtggagaagtggctcagtctgtcgcacagtgtggtggtcattctggagggactatctctctaccactatctgtctaacgagacccagtttgaggccaccaacaggatattcagcacgaagctggagatgatacttccaccgcaggaggagggccagaagattatcgacgagatagccaagattcctctcaccaatgcgcaggcacgcagactgatagacgagcacggctccctggagtcggctgtggagctgaacaaagatccaactttgtttgtaaagacaatctttccaatcgaaagctctaaatctgagtcggatgacatgcatgaggatgacaagttcccacgcactaagctcctgctgtcagcgctgcaaatggtcgacgagggctatcctattccattgcagggcgagctacacactcgtttccaaaactttaagtttaccaaggatctgtatgcaccggtaaccaatcgcagtcctatgttcggcgttgattgtgaaatgtgtcacacggaggcgggttgtaacgagctaacccgaatctctattgtcaacgaaaattacgagaccgtttatgaaacgctagtgttgccaaataaccggatcaccgactatctaacccaatattcgggcataaccgcagaaattatggagcaagtgaccaagaggctggatgttgtgcaaaaggaagtgtccgaactgctgcctccagatgccattctggtggggcaatctctaaattctgacttgaacgccatgaaaatgatgcacccgtatgtaattgacaccagcgtgtgctttaacacatctggggtgcgacgacgcaagaccaagctgaaggatctggccaaaacctttttacaggaaattatccaggagaacatcgatggtcacgattccattgaggattcgcgagccacgctgaagctcgtcaagaagaagctggcaaacagcatcgagttcggagaccagatcctcacgcagcacaagcaattacaggagttggcgaacgcatccagcggtgataccatatccaacaatctgtttgcacatgtggcaaagcgggataagcgcacggccattgtcacggtcggcgagctgcagccccgtctaaaggaagtgatcgaaaaggcgggagaggcagcgcccaaggatcaaagtacgtcggtgcatgtccacgaggtatctacggccaaggaagccattcggaaggtcaatgaagttgcactggaaaatgccctgacaattgccaacctccgcgtgccagagcaggactttatattggacagtgcacagcggagtgttgccaaactggacaagaccattgatcgcctgtggaagtcagttgcgcacaacggactcttcctcgtcatcatgggcggatccacagagtgctcgaagggtgtagccaaaatagccatcaagcgactaaacggatcgaatcagactatggaaagttagggagcttttaagaaccttacttatgctaaccgcctccatggatacccgctcccactaaggtcctgagtgttgaaatccagcagataaatcaaatttaccgtatcacactgaagacatgaccaacagttgcattaccatacacctgggaaatgtcctgcatgcatgagtgcatcgatgaaaaattgtaaaattaaaaacaaattcgatcaataacgaataataaaatgtacatttaatttttttcacaaaattccattggcttctgcatagttgtattaaattaaatgagcggtaaaaattattatggattattgtataaagaaaaaactatacaaaaaacta

SEQ ID NO: 18273 - protein, 681 aa, DROSOPHILA
MKEHMSTKQHERNEKKKKKLAALANLMELNDRDRLHEAELAKKRDAEVEVEEKSTAKAEDGDDGFIVVGSKRKPRNRRQNNELEADSQTAPGTSDPEEPVNKKIRNYDAGGDSLPLEIGSLSEDQYNQLSAELRRRKRELENVPALRLREMGQRASLETPQDARTPIFLTDIQNLLMCALIGQKSPCRPDRWCSVEKWLSLSHSVVVILEGLSLYHYLSNETQFEATNRIFSTKLEMILPPQEEGQKIIDEIAKIPLTNAQARRLIDEHGSLESAVELNKDPTLFVKTIFPIESSKSESDDMHEDDKFPRTKLLLSALQMVDEGYPIPLQGELHTRFQNFKFTKDLYAPVTNRSPMFGVDCEMCHTEAGCNELTRISIVNENYETVYETLVLPNNRITDYLTQYSGITAEIMEQVTKRLDVVQKEVSELLPPDAILVGQSLNSDLNAMKMMHPYVIDTSVCFNTSGVRRRKTKLKDLAKTFLQEIIQENIDGHDSIEDSRATLKLVKKKLANSIEFGDQILTQHKQLQELANASSGDTISNNLFAHVAKRDKRTAIVTVGELQPRLKEVIEKAGEAAPKDQSTSVHVHEVSTAKEAIRKVNEVALENALTIANLRVPEQDFILDSAQRSVAKLDKTIDRLWKSVAHNGLFLVIMGGSTECSKGVAKIAIKRLNGSNQTMES

SEQ ID NO: 18274 - DNA, 2763 bp, DROSOPHILA
tgcgaaagtacgcgtggactgctaagactacgcttatctattttccgatagatttgcacatcgtattaatttcattttaagtctagaaaaatgttaacactaagaactatctaaattttacaacataactataataataacgtaactaactgatcgccaatatctgtttttaaaaattttgtaataaatcgatgaatcgattaaggaatccgttgtaccacaactattatcgacgcgtttcacagcactgaataagttgcgcgaatattcacgaattttttgacaatttgcgttttgtttcttctgttttacggaaattctataaaaatgcccaaaacaaagaagaaggattcgtcctcagatagcgatagcggtccagatgatgtaagttaactagaaatacaccaaaactaggtataacaagttaaaacctctttcagcgtatcaagccggcaagcaagaaggcgaaggaatctgatgctccaaattcagatccaaaagattcgggcgaaaatggtgctacatcttggaccctggaaggacttcgccaggtgcgaatcaacgagttccgcggtcgcaaatcggtggacattcgagagttctacgataagggcggccaaattcttcccggcaagaagggcatctccctatctttaattcaatggaagaaactccttgaagtggccgaagaagtcacccgcgcgatcgagaattaattgaagttcatccacatgccaaactaagtcgtagccatatgtactaactatagacatatccactgaataaacgttatcttaaacactagtaattgaaaatctgtattttcacagttgctgaagcattaatgaatgaccaacttaattgcctgataggtattttccttatctgctttgtggtgggactacaaaaagcacacatatacataaatgaatgaatcctttattggacgtcatatgtacatagatttgtacattgatagcatttgatatagatatgaatattaaaaatagatgcccagaatggtgaagatggacaggagaatggcaaacggcagccaggtcttaataaaaccccctattccgacgtagcggccgcagacaaagagccacatgctgaggataatcatgttccatgcggtgctgtcgtagtagcgcatgtagatgagtgccgttgccacatgcgagtggcagttgtcacagaagatattgtggatgcgggtgccgtagagcacagatgctttggagaccgcctcgtcccaggcgtaactgccgcccaccatgtgcttggggtgcaaccttatgtaccgggtgggtcttccaaaggccatgttgtcctctgatacgaagtaggggccggcgaagtcacgaatcacaccggacgaagtgcaaatgcccatatgtccgatcatgggcatcagccaggtgagaaccggaatgggagtccaaacgatgcagtaggggaagcgttggtcctttacgttgatcggaggcagtctatccggaacgccattgccggctcctcctccggaactggccatcgagatctgaacgtcctcggactgttgccgctgcggacttgggtttgtcgacattattacactgtattaggttgatatttgtgcggggaagccacaagaacagtcactcacggtcttcccggccgtaatgcccatgaaacgagtcgctaacaattccaattgggctttaattgtacgataaggagaaaataaagcagtcgcagttcactcacatctacctcagtatttattgacatggagattgacagtgttggaaagcattgctgtatggcagaggcgtctgaaagggggatccagagaccacgtacaaacgtagtcacacgaaattttcaactccgcaaagttgacaaattcttttttttatttaggtatgtatttggaaatatgtttctacatttgtggaacagcaatgttagagccccataaactttacttctgtgtacgcccctgcagcgaacagctgttgcagcagttgccattgcgttggaagtgagaactggtgctgtgtttattggctgagctgctacttctattgtgaaatattcattaacaatcgcttggccatgacacaggtgtttatcaatggtgccagagacgatctcaatgtacgggaattccagagcctgggtacgaagtcgtgaaacattgccatgtcactataatttgtggtcctttctgcagatccttcgattcaagagatcatcctggcagccacggaagccagaaaacaggcttattgtccgtacagtaactttgccgtaggagccgccctgaggaccagcgatggcaccatatactccggttgcaacatcgaaaacggggcgtatgccacctgcatttgtgcagagcgcactgcagccgtcaaggccatcaggtcagtgggtcaatattctctgggtcacatacgcatcgcttgagatctatccacaggaaatactgaaagtaaagcgttagtcacagtaaagcttatcttggattaaaaacttagatttcaatatattgagataacccttgacagcaatgaggaatgttaatctgtaatgacaacactattacttaaattcttacatacttaattatcctctccaagtcctttcgaataactaaaataacacatttttacagtgaaggcaaacgcgactttgtggcttgtgcagtggtggcccagcaggataatggcttcaccacgccttgtggcgtctgccggcagttcctctcggagttcg

SEQ ID NO: 18275 - DNA, 689 bp, DROSOPHILA
atactgaggtagatgtgagtgaactgcgactgctttattttctccttatcgtacaattaaagcccaattggaattgttagcgactcgtttcatgggcattacggccgggaagacctccgcagcggcaacagtccgaggacgttcagatctcgatggccagttccggaggaggagccggcaatggcgttccggatagactgcctccgatcaacgtaaaggaccaacgcttcccctactgcatcgtttggactcccattccggttctcacctggctgatgcccatgatcggacatatgggcatttgcacttcgtccggtgtgattcgtgacttcgccggcccctacttcgtatcagaggacaacatggcctttggaagacccacccggtacataaggttgcaccccaagcacatggtgggcggcagttacgcctgggacgaggcggtctccaaagcatctgtgctctacggcacccgcatccacaatatcttctgtgacaactgccactcgcatgtggcaacggcactcatctacatgcgctactacgacagcaccgcatggaacatgattatcctcagcatgtggctctttgtctgcggccgctacgtcggaatagggggttttattaagacctggctgccgtttgccattctcctgtccatcttcaccattctgggcatctatttttaa

SEQ ID NO: 18276 - protein, 178 aa, DROSOPHILA
MASSGGGAGNGVPDRLPPINVKDQRFPYCIVWTPIPVLTWLMPMIGHMGICTSSGVIRDFAGPYFVSEDNMAFGRPTRYIRLHPKHMVGGSYAWDEAVSKASVLYGTRIHNIFCDNCHSHVATALIYMRYYDSTAWNMIILSMWLFVCGRYVGIGGFIKTWLPFAILLSIFTILGIYF

SEQ ID NO: 18277 - DNA, 2823 bp, DROSOPHILA
tgttacatctgccgttataagaaaacaaagtacgcggcaatttgaaattgaatataatacgacagctggcattttggaatggatttcggcctaaatccggattatagttatcttatgtaaataaatattcaatttgttttagtttggcgcataagcggttgtttttgtatatcattatatgaatagttaataaaaattgtgcatgtaaattcaatagattaagtgcacgtaaaatgagagcattacgtttgcaattaaaaattaagccattaaacacgaaattgaatcaattaaagaatgtcatcttctccatattcggattactgtcttaattttaatggttgaagctcaaattgaattcaacgcccttgctatttttgtgtttttggcaaataaattagtgttacacaatctttttaaaagagaagataaatgtgatattacattttattgaacaggatcagttgcacatatcttttgaaatcagccgaagtagctgaataacacaagtaattaccttatacaaattcaatgcatcaagaaatctgacacaatggggtatagtgggatgccccgtcaagaggataaataaaataaaataggatgatgagaaccgcttacaaccggcgacgcgtgtcactcaaaacccgcccatgctcagatccagcctgatcaaacccattatctatccaaattgctgcgacagcatcgtcattatcatctcgttgacccaccattgttatcccccgttgggttacccatataaacaagtgcactttatgtttacttgcttgtttttaatacacaccgatccgcgattgtgtgggttgaggtgagagatacgattcctatcacacttacttatatgtgtcgccggtttgcccatttatacatatattctgcggctgtgtctgtgctgcttttctattgttcatgagtccggctttgtatataaaggtgatcaatctcgcagtctaaaattcagttcacttcaaacgcgactcgaagccggtttttgcgaaagtcaaatcttttttattctagttgtgatttcgtggaaatttcgattattattcaaaatgcgtttcgctctgtttgcttttctaggtacataaaaacaactctttccattagcatctataaaaaatacaaagggtatagttagtttagggatcgaaaataaacaaaattataaatacaattttggatcaaacgaagcaatttgttgtatgattggaaagtgcaaaaataattggctatccattaagaccaaaagcccaaatgaatgatctcacggacagaattatattccgatctacaaaaatataatttgctccgaacggtgatgcaattaaattaaataaagtactaatacatatttatctagttttcatttaaacaaacataattgagcgggcttaagaattttaacatgaccaaacttatttagcactgtgcttgctggcattcgtcctggctactccggccaaggacaccaagaagccggccaccaacagttgccagcacaactgcggtgaagtctacgagcccgtttgtgccaaggccaaaaacagcagcaaggagcgcctcctcacctttggcagcccgtgcgtcatggccaactacaactgccagcatgccgacgatcgtaagagatcctctacaatatccttacagaattaaatatgatttaatccttttgcagcattcgagcagaagtccaagggcgagtgcggcggtggagtgagcgttcgcctgtcctagaagtccaatttcaacacttttgacgattaaacatctttcactgattgtgcaataatatattcatgtattttttattccaacgggaacgctttatttgttttcgacacaagcttgtatttcgcataacagaacggaaaatttaattagctctcgggactacttagaattcccctacaaaacacacacgtgcatatgcattcatacaagatcagttccagctatcctttagtatcaatgacagacgattcctaaacttctatgcacttatcagcagtcacgcggccaatctgcaatcaaaatcaaagcattaatcagttggtatgattattattgttattatttcagtaaaagtgtgttaagagcaactagccaataggcaataaacgaggattattttgcattgtcatacatattattaaaaaatatgtatgtagttcctcttaaccaccattcactgtatccataccatttgactcaccactcacagagctctagcgaacaataatcgcatactacgacctaatgccaagtaatatatagtatatggtattgtattgtatggtagagtacttatagttgttttttttttagtagttgttcagagaaacgctccactacattcacagattccgttccgcctctcagttggccaccttcttctgctgcttgaccttgtagtcagccagggccgccttgatggcatcctcggccagcatggagcaatgcagcttgacgggcggcagacgcagctccttggcgatgtccgtattcttcagctttccggcctcgtcgatggacttgcccttcacccactcggtggccagggagctgctggcaatggccgatccacagccgaaggtcttgaacttggcgtccactatcttgccgttctcgtccaccttgatctgcagtttcatcacatcgccgcaggctggtgctccgaccaagccggtgcccacagtgacatccttcttgtccaaagatcccacgttgcgcgggttttcgtagtgctcaacgacctgtgggtgaaaataggtaggtgtgttagtcaccaggggg

SEQ ID NO: 18278 - DNA, 423 bp, DROSOPHILA
actcgaagccggtttttgcgaaagtcaaatcttttttattctagttgtgatttcgtggaaatttcgattattattcaaaatgcgtttcgctctgtttgcttttctagcactgtgcttgctggcattcgtcctggctactccggccaaggacaccaagaagccggccaccaacagttgccagcacaactgcggtgaagtctacgagcccgtttgtgccaaggccaaaaacagcagcaaggagcgcctcctcacctttggcagcccgtgcgtcatggccaactacaactgccagcatgccgacgatccattcgagcagaagtccaagggcgagtgcggcggtggagtgagcgttcgcctgtcctagaagtccaatttcaacacttttgacgattaaacatctttcactgattgtgcaataatata

SEQ ID NO: 18279 - protein, 94 aa, DROSOPHILA
MRFALFAFLALCLLAFVLATPAKDTKKPATNSCQHNCGEVYEPVCAKAKNSSKERLLTFGSPCVMANYNCQHADDPFEQKSKGECGGGVSVRLS

SEQ ID NO: 18280 - DNA, 5536 bp, DROSOPHILA
tgccttggctccatttccatttcccccactggcgtcacagtcagccttcgggttctcgttgcctgggattggattggaatgaattggatagggtctggttttggtagtagtggtggtataggtggtagtggttcaactgctgggtcggttgcatttatttgttgccattataattcgcctatgtatgtatggcatgtgtcgcgtgcgatgtacgtacgtatgtatgtacgctggtatgccagttttcgcgctagtttcttattgggattcgccccgtgccatcccaaccatcccacaaccgcctccaccccccttcccacatcgacgtctttacacagtacctggcgcagaaaatcgcaaggccttttgcagcagtcccagaaaacgcgaatgcgactgcgaccacgacagcgattggattcgattcgaatcgagtcgatttaaatatataacacaatcacaatagggaccgcgagtatagcattagtattatagtagctataaggtgtagttgctatagtcgccgtcggccacccgcgcccgcagcagcgacactatgtcgacgtcgatccaatattgccagtaatgagcgctggcagcaggcaggaaaatcacaattacaaaacaaagacgatgagaaaactttcactcgattttcagtttggggggttttctttcttgctttccttctcaattttcagctgtacttgcttggggcgcgtgaaacgaaactgcccgcacacattcacggcgacgaacacacgcacggtggatcgtagtgcaaggaatttggaatttggattatttggaaacagctaattatttattttttacattattgcgaggccaatcatctggttctctgtccgcctatcgacaactatcggtgctccgtccctggcgctcagtgttgaaaagtgtctcggttagctggttagtcaagcttcacacctactggtgttcagtggttttcatggcaagtcttagagatcgggggatggtcatactagtaaataaaatggcgggagctgtacatgaatttcatttggtaaacaaattatattcttaaaatggtaagaacacggccggtgccgtgtgttccgtcgccagatgtgaacaccgcaacgagacgcaatcccgggcgtcccaagaaacagtccatcggagctgacttaagcacaacgataagcaaacccgggcgtcccaagaagctgtccatcggagctgatttgaccacaatacgtaaacccgggcgtcccaagaaactcggagctgatttgaccacgataatacgaaaacccgggcgtcccacgaaactatcaaacaaacaatctttgacagccctaaacgagccagagtgtcgcataagaaaatgcgtggtaaaaataaggcgcattaaggtaaaaaacggtgtcgtatccgaaatttctcgaaatgatgcgcctgatgtggatgccagcacttttgagccggctcgcaactcgacgatgtacattccttcgaaggtacagaaatcaacgcaaccccaaaatatcaaggaaaatgtggcaggtaagaggctctcaccaggcggatgatggacttttcttgataagcacaactacttgcaggtcccgaaacatcgccatgtcagcaacgcataaggagtaaaagccctagtggaccggcagctgagatttcgcccaaaaaaccacctcgtttcttccacagagatcagcctttaaccaggacacgatcatcggtgacccgcaacgttttcgattttctgtcgcagtcgcagatcgaagatgacagtgacagggaggatccggcggcagacataattcagcgtttggttaaggatggaaaggcctgcgtaatggtgcggtcaagaaaaatcggcaaaccgagagccaaaagaacagcaaagaaggtccgacctgtgggtaatcgaagaaaggtttcgacaaaagacaatgagcctgagccagtcaaggtcgttcccaagtccatagaaccgcgccttcaaaagccatcacgctccttatcgaccattttcgagcccgaggaagattatagcaacgattcggagcacggatacgtgcagcccatcgaagtgcccgtccaggtacatgtggagccgagcacttctaagcaagcgcacgaaggagcctacagtaatttggcccgatccgtaatgcttaaccagacccaggcgcaaaatccactgccatctacagacagacgtcgagaacttatcaacatggcgcgacaattggttagcacgccgctgaatcgcagagctcctccggtgacagatgttagtgccaccaccactgcattgtcgcctattgcccaccagtctccaaatgcagttaggaccgcgggaggcaaatccccctggcgcgtttccgacgattcaccattgcccaatactttcatgtttggtttcaacaactcccagatgccatcgtactccagtgatcatgtgcaacgtcggcatgtctatgtgccagattcgccggtagagcatgctgagaacatccctcacgaggaatccatttgtccgcctttgcacgagcaaaatcatgactcaaatgcgaacgactcgaatgaggagaaccgtccccctcccacaattagcaaatcgatgtcgatcaatgaccaggaaagcgaagagaatgcggagaactttgtgcacctgccgaatcctcggagaacgctgcagaaacgaacgccctttaaggatattaacatactagaagtagtgacactgccgtcttggaagaagaacgtgacggccactgtttcaaaagaaatcactcctaccagagtggcacctcgtccaatggcgacgtcatccccagcgcaacgcagtcaaacgcggtcgaatctttttggtttcgatgatgattttgcatgtgaagatatacctagaaagtcaactactccctcaaaaggtatcgctcctaccagtatgtccttaaacagagaagtgactcctgctttagctaatcgtaatcaaacggaagtaaatactttcggatgcaacgaaatattgccctgtgaaaatataccaaaagaaaaggaaacgaatacggaagaacgaacatcatcttcacaaaacctctttggattcgatgaatttatcaccgaaagccaagattcgccagccaatttcacggggctgagtcaaaatgtaaatctgcatgataagctccatcgtcttgcggagctgcgacccagagatggtgagcttccacaagtatcatatacctctattcgttccgattgcctgggcgaatcacattcgaagcaaaccgacatcagatatatgttgtgctccactatgattgcgccgccccgaccggcgaaacggaaacctgctgcacccactgctagggaatcgatgggattgtttagggttgaccaggacgagccggagcaatcatttgccgataaggtaggatttatgtaatgggttcgtccaagcgttgggaaagcgtcgacactgtaaacagtgagtgtagacactgacctcataacgctagattaacttaaaactgagacgttaacgttttagttgagcaaacagggccgcaaagatttaagtctttctttgatcggtagtaagccgctcacacaaataaaaattttagtcgtaagtctgtagttttgtatacaacatttgaaatcttttattttggcaaacggcgcctaattgttttaaaaattcaacctgttctagcaacccagacgaacctatgtgaaggagcgtccgcaacgtaagcgaaagaagcgagtgcagatattgtacatcgaaagtgaaagtgaggacgaggacgagcaggactcgcacgacaagagcttggattctccggagaagaagcggcatcacgttaaacggccacgcagagacatcgagcatgaggctaaattggagcagttcgtcaccagtttcaacaagcaatgcgaggaagtggagaagttcccagtgatcattgaataatcgcattgcctgtttattatttatatttttttgtgtcgctgataaggggaagtagtcgtttttaatttaatgtgcttcgtttttatgagttatttgtggtaccttattgttttgtgtataaatgtatttaggaagattgcgtttcctcgaatatttataaggacaacagtctaatgtaactaaccaagtgcttgcagtgcactttatgcaattctaggttaagctaagcatgtatttttattatcaaaagcttggattatgtacagctttgatgtttcggtattatagcctatcattatgactaaactaaataaatgaaaaatcttaatctttgtgaattgaactatttgttagtccaagggaaaatttttccaaatgaaatagaagtcaattttatatcatacataatttccataaggtggacttatttttattggttttttcttcaaatttctattgaatcgatatcgataaatatacatgtgcataagtcatactttagaaaacatattttatttaaaagtttaataattaaaacataggcttcctattacctaattggccgttttattggttacaatggatgttggggagtttcatatttttactacacgttgggtcaagcaagaccgtcatgacccgagccaatcttgttcaataatgttacgtacaaattgttcaaattcgaataaattttaaacaatatataatccgaaatgggaatggtatggttaaatatgacgaaagtcgaaactcaaaaaaaaactaaagttaattaagaaatgaatttgaagcttatacagatgggaaagacttccaatcgcttatacaaatccaaaatttttggatttaatggccatcagcattttactgcgtaaaatagatttgctggagtaaagagggatatacagccgagagatacaagtattcgcagtcggtagatgggagtcatccgcaggtcttatggtgacagatggcaatggttggaatccctcctccgaagctggaagcgcaggagagccggtccagaagtaaacctgcaagaattgtgtttgttatgaatgtttgaagctcattggaccatctttcttcttaccaaatcctggcgttccataatgttcattttctccacaatactccaaaaccatttcttaaattttaaaagtttatcaggaccctcgctagattcgtcgttaaaggtagtgtatgaaattagtgtcgaaacatttatatcaccaacaccgtttagcagcagacgcaagtcctcagcggttaagttaatcatgctgttatcgggcaaaacgtcaaaaactccgtccttcagtgcctgtgaatggtagacaatattttgttgtaataaggctatacatttttacgcaatatttgcccatacctccagtgccttttcttgggatttgattagtctatattctgtatagcgtctgacgtactcgaatatattactcgatgtgacagcgacatcgcgccctcctgggataagctctctgttaccacagccctcctccttcatcaaatcgatactgaaat

SEQ ID NO: 18281 - DNA, 3192 bp, DROSOPHILA
gtcatactagtaaataaaatggcgggagctgtacatgaatttcatttggtaaacaaattatattcttaaaatggtaagaacacggccggtgccgtgtgttccgtcgccagatgtgaacaccgcaacgagacgcaatcccgggcgtcccaagaaacagtccatcggagctgacttaagcacaacgataagcaaacccgggcgtcccaagaagctgtccatcggagctgatttgaccacaatacgtaaacccgggcgtcccaagaaactcggagctgatttgaccacgataatacgaaaacccgggcgtcccacgaaactatcaaacaaacaatctttgacagccctaaacgagccagagtgtcgcataagaaaatgcgtggtaaaaataaggcgcattaaggtaaaaaacggtgtcgtatccgaaatttctcgaaatgatgcgcctgatgtggatgccagcacttttgagccggctcgcaactcgacgatgtacattccttcgaaggtacagaaatcaacgcaaccccaaaatatcaaggaaaatgtggcaggtcccgaaacatcgccatgtcagcaacgcataaggagtaaaagccctagtggaccggcagctgagatttcgcccaaaaaaccacctcgtttcttccacagagatcagcctttaaccaggacacgatcatcggtgacccgcaacgttttcgattttctgtcgcagtcgcagatcgaagatgacagtgacagggaggatccggcggcagacataattcagcgtttggttaaggatggaaaggcctgcgtaatggtgcggtcaagaaaaatcggcaaaccgagagccaaaagaacagcaaagaaggtccgacctgtgggtaatcgaagaaaggtttcgacaaaagacaatgagcctgagccagtcaaggtcgttcccaagtccatagaaccgcgccttcaaaagccatcacgctccttatcgaccattttcgagcccgaggaagattatagcaacgattcggagcacggatacgtgcagcccatcgaagtgcccgtccaggtacatgtggagccgagcacttctaagcaagcgcacgaaggagcctacagtaatttggcccgatccgtaatgcttaaccagacccaggcgcaaaatccactgccatctacagacagacgtcgagaacttatcaacatggcgcgacaattggttagcacgccgctgaatcgcagagctcctccggtgacagatgttagtgccaccaccactgcattgtcgcctattgcccaccagtctccaaatgcagttaggaccgcgggaggcaaatccccctggcgcgtttccgacgattcaccattgcccaatactttcatgtttggtttcaacaactcccagatgccatcgtactccagtgatcatgtgcaacgtcggcatgtctatgtgccagattcgccggtagagcatgctgagaacatccctcacgaggaatccatttgtccgcctttgcacgagcaaaatcatgactcaaatgcgaacgactcgaatgaggagaaccgtccccctcccacaattagcaaatcgatgtcgatcaatgaccaggaaagcgaagagaatgcggagaactttgtgcacctgccgaatcctcggagaacgctgcagaaacgaacgccctttaaggatattaacatactagaagtagtgacactgccgtcttggaagaagaacgtgacggccactgtttcaaaagaaatcactcctaccagagtggcacctcgtccaatggcgacgtcatccccagcgcaacgcagtcaaacgcggtcgaatctttttggtttcgatgatgattttgcatgtgaagatatacctagaaagtcaactactccctcaaaaggtatcgctcctaccagtatgtccttaaacagagaagtgactcctgctttagctaatcgtaatcaaacggaagtaaatactttcggatgcaacgaaatattgccctgtgaaaatataccaaaagaaaaggaaacgaatacggaagaacgaacatcatcttcacaaaacctctttggattcgatgaatttatcaccgaaagccaagattcgccagccaatttcacggggctgagtcaaaatgtaaatctgcatgataagctccatcgtcttgcggagctgcgacccagagatggtgagcttccacaagtatcatatacctctattcgttccgattgcctgggcgaatcacattcgaagcaaaccgacatcagatatatgttgtgctccactatgattgcgccgccccgaccggcgaaacggaaacctgctgcacccactgctagggaatcgatgggattgtttagggttgaccaggacgagccggagcaatcatttgccgataagcaacccagacgaacctatgtgaaggagcgtccgcaacgtaagcgaaagaagcgagtgcagatattgtacatcgaaagtgaaagtgaggacgaggacgagcaggactcgcacgacaagagcttggattctccggagaagaagcggcatcacgttaaacggccacgcagagacatcgagcatgaggctaaattggagcagttcgtcaccagtttcaacaagcaatgcgaggaagtggagaagttcccagtgatcattgaataatcgcattgcctgtttattatttatatttttttgtgtcgctgataaggggaagtagtcgtttttaatttaatgtgcttcgtttttatgagttatttgtggtaccttattgttttgtgtataaatgtatttaggaagattgcgtttcctcgaatatttataaggacaacagtctaatgtaactaaccaagtgcttgcagtgcactttatgcaattctaggttaagctaagcatgtatttttattatcaaaagcttggattatgtacagctttgatgtttcggtattatagcctatcattatgactaaactaaataaatgaaaaatcttaatctttgtgaattgaactatttgttagtccaagggaaaatttttccaaatgaaatagaagtcaattttatatcatacataatttccataaggtggacttatttttattggttttttcttcaaatttctattgaatcgatatcgataaatatacatgtgcataagtcatactttagaaaacatattttatttaaaagtttaataattaaaacataggcttcc

SEQ ID NO: 18282 - protein, 857 aa, DROSOPHILA
MVRTRPVPCVPSPDVNTATRRNPGRPKKQSIGADLSTTISKPGRPKKLSIGADLTTIRKPGRPKKLGADLTTIIRKPGRPTKLSNKQSLTALNEPECRIRKCVVKIRRIKVKNGVVSEISRNDAPDVDASTFEPARNSTMYIPSKVQKSTQPQNIKENVAGPETSPCQQRIRSKSPSGPAAEISPKKPPRFFHRDQPLTRTRSSVTRNVFDFLSQSQIEDDSDREDPAADIIQRLVKDGKACVMVRSRKIGKPRAKRTAKKVRPVGNRRKVSTKDNEPEPVKVVPKSIEPRLQKPSRSLSTIFEPEEDYSNDSEHGYVQPIEVPVQVHVEPSTSKQAHEGAYSNLARSVMLNQTQAQNPLPSTDRRRELINMARQLVSTPLNRRAPPVTDVSATTTALSPIAHQSPNAVRTAGGKSPWRVSDDSPLPNTFMFGFNNSQMPSYSSDHVQRRHVYVPDSPVEHAENIPHEESICPPLHEQNHDSNANDSNEENRPPPTISKSMSINDQESEENAENFVHLPNPRRTLQKRTPFKDINILEVVTLPSWKKNVTATVSKEITPTRVAPRPMATSSPAQRSQTRSNLFGFDDDFACEDIPRKSTTPSKGIAPTSMSLNREVTPALANRNQTEVNTFGCNEILPCENIPKEKETNTEERTSSSQNLFGFDEFITESQDSPANFTGLSQNVNLHDKLHRLAELRPRDGELPQVSYTSIRSDCLGESHSKQTDIRYMLCSTMIAPPRPAKRKPAAPTARESMGLFRVDQDEPEQSFADKQPRRTYVKERPQRKRKKRVQILYIESESEDEDEQDSHDKSLDSPEKKRHHVKRPRRDIEHEAKLEQFVTSFNKQCEEVEKFPVIIE

SEQ ID NO: 18283 - DNA, 10162 bp, DROSOPHILA
cctcaatggacaaggctccgctcagccccgcctcctccggatatcacagcgactgcgacagccccgccccctcgccacagcccatgcagcagcccttgtggcgcccctggtaaaaacaaggggttaagtggcaggaaggtaagggtggagtggcaatgggaatggaagaaccaaccaacaacgcatctgtgatagcccaactgtgatggcaacaaaatagcaaaattaaaaaagcaattagcaaaacaaatataaaccaatttaaacaaatatcaaaacaatttactttattgggatgttgggaggggatctaagggaccaatcccttagttggtggcaattggaatccttattggtaattaaattattaccaattaggaaatatcaaataatatatctctgctctgacaatggaaatctattttggcaatgaccgaagtgaaatctattttataataataaatatttatttataaatataaataaattatatttatttatttatatctatttaataataaattaaatatatttcacttaattaaaataaaagtgttttagaaaactagcactgataattttaagttttttgaatcggtaatgtccttaacggttcacaagattgaaaatagcaaatcagactgaataataataaactgaataattatttattcatttttaaaaagcgcgccaactgcacctgaagaacatgtacagatctaagttacgtatttattgcggaacttttttcacttttttttcaagatcatggcaaaaaatgagtgttagcatggaatctatttaattagttgttctgcaaccgtagtgtttgtaaataaataatttaatacgtaatagttctttgaacattaggattattatttcgcagagtgtaactagttcgatttcagcgcaggcacttcctaacactggcgcatgcaacactgcgccgctgaagcgagtggcccgcgataacagaccctcgacacatcgataggcgatagcgcaaattgcatacctgagaccgacgcggtctgtgtgtcgcggataggaaaataggaaattataaatagaaacgggccgtgccgatgccccaaaagccacccaattgccagctgccccaatcggcgaggataccaagtgctaccgaggtgaaaatcggcgtgccgaaattgttgcaaaaatatttgagacgagaacgccatttacaagccgcgtttgtacagcgagtgcgcgtgtagtagagccggagagagagccgctgcgtgtgtgtgtgcctgtgagagagcgagagagcgccgccgccaaagctgcccaacacatacacgaatgttagacacttcgcggtcggtcggcagaaacaggcaattttatacgggcgaaaagttacaaaaaataattttcccacttttcggtggcgaaaacgaagaaactgtaaaaaatggaccagagatttaagtgcaaaacatagaaacatcttgcgataaagcgtgctaatccggggcataaaactggtactgccattatctcgcttttttaattgcttttgtttattttttgtataggacacagtataatttttcttttgcgctgcgcgcgtgtgagtgagtgtgtgtgtgtgatttggccactcgctggtttctatgtatgtgcccgtatcgccgaacagagttgccgcctccagggcaaatcataaaaaatatattggctgtacaattgaaaaatattgaaaagggccaagcaagtgaattatatgcggataagcggaaaaataacaaacaataaacatcaaagtaatgtgcaaactgtgtttctgctgctgtgcgcgtttcaaacggcatggcaaccctgtttaattgcagtctgtctgtatatgttcgcatgttgtttgtgcggagtgtgctgcctttacgaaagaaaagtgttttattttcattggattaatcccgcccggttaactgcacaatcggattagtgcgtccagcggcccccgaaaatcaaacagtgattttgcgtaacaatttcatgggccacatgcaactgtgcgcttgatttttcggcggtaaacactcacactcgtaccctcgctcccgtttcctgtgctagtgtgcgtgtgtctcgctggctcagcgcgcctgtgtgtgtgcgtgtatgtacgtgcgtgcgaacgtatcgaaaaaaatggtgcaaaaatatgaaaaagcataactaagcaaatatgttgttgtaaaattccattcgcaggatatgcaaaatgcgaagtagcccggacatggagtgccactaagtgccggttccgtttgtgggaatactaataaagcggatcaactgccatcgaaaaatattattaaaaaaaaaaacagaagaaaaagaatagctaaaaaacaagtaccataaaacgctggcaaacagatagatattagtccacgttttgcaaggagtttctgtgcaggagtggagtgctcagggataaccggaaggaaggaagcggcgtacgcagcaggaggagcagcaggacttccgctccggcaaatcggtgtccacctcggaactatcgctcttgctctagccggcaacataccagcctaacaacatgtatccctcaccggtgcgccaccccgccgccggggtaagttcacccgacagtgggtcccacctctgacccccgaatccgtgctaattgtgtttatgtctctttccaccacgccgcgccatgtgccgcccacgtacggaacaccaaccacctctattcacatctaaatagggaccaccacctcagggtccaatcaagttcaccatcgccgatacactggaacgcatcaaggaggagttcaacttcctgcaggcgcagtaccacaggcaagtatccggtggaatactctatacacggcaatgtttacatatgtaaacattacgcgaatcatatttacaagggatatacaaggtttatcattataattgtgaatacaaggcaaatctttactataaagatttgcaaggaaatatttgccatcataatgacactctctgcaaatgtcatctttgtaattgctatgtcaagaaaaaactacattgaatattggccctaagaactattggcccactaaaattgctatgatcgcaaatttatgtcagataaaagtaaaattcttcacactttcaaataatccaatggcatagttttcatgggttaagcaatacgcaattagagattaggccccaataattaagttgaggttaaacctattagaagcctttacaataacatgccccaaagaaatcacattttaagccttagccttaaccgccatcgtatggaagtgtgcgagtgtgagtgtggatggatgctgcgtctgcgttttgcgaaaagtaaaacaaaaagctgagcaaaccggtttggcgcgccatatgcgccgctgtcataggattaacctgcgccgccccagccgcaactcaatgctccatgctccacaatcgccgcttccttgcgttcttgaattcagttcgcttccgtcgtccaactaatttgcccgttgatcacttttcctgtgaattccagcattaaattggagtgcgagaagctgtcgaacgagaagacggagatgcagcgccattatgttatggtaagtcgtcatgatccgcaaattatcgagatcccttagctaatgccacggcttgccttccaactttcagtactacgagatgtcctatggccttaacgtggagatgcacaagcagaccgagatcgccaagcggctgaacacactgatcaaccagctacttccattccttcaggccgaccaccagcagcaagtgctgcaggcggtggagcgggcgaagcaggtgaccatgcaggagctcaacctgatcattggggtaagtcgatcgaggacggatgatggattctgcggcagcagcaatacggtttcagccattctcagatagacactaatgggggcatggccgattggaaattcggttgccacaccgaaaaggcagagaaatttagtttgccgggtactttgtaatacagtctttcaaagaataacaaatatcttgaaaattgtataaaaaataagaaatctaacgtatatatgaaacagtacatatcataaatgtggcaaccgttaagtgggaacttcgtttcggtttagtttgttccttgggccgcatttgatttgagtttgtttttctacttcctaatttgttatgatttcgcattcgaccaatccaatccaaacaacgttgtgcagcatcagcagcaacatggaattcagcaacttttagtaagtttgtttcgttgcaagttaatttcttattgtttgtttactgttgccgtctgccgctgcatccgccgaatgtgccactgccacaactacaacaacagctccagtgcctcactacctcctcttccttttctgattgtcaacgtttatattatttgaataacgcttcaaatgccgccaattgttgttgctgtttccattaaccccagatggtctttgcttatgcttatgaatcgaaagataaataaattaaattttgatacaaaataaaaatatggcaaataccatttagtgttaatgtcgttgttgtgtttacacacatatgtacacacatttcaatgctttcatattcccactaagcacgatgttcattattccgaaagccagcaacgcgcacgcccgatttcatacgatctcatggttccattgcagcaacagatccacgcccagcaggtgccaggtggaccacctcagccgatgggcgcactgaatccgtttggcgccctgggcgccaccatgggcctgccacacggaccgcaaggtctgctgaacaaaccgcccgaacaccacaggccggacatcaagccgacgggtctagaggggccagcagccgccgaggagcgattggtgagtaccacgccctagatcaaaattctgcatatttcaagctaattttcatgctgatcttgcagcgcaattcggtttcgccggccgatcgtgagaagtatcgcacacgctcgccgctggacatcgagaacgactcgaagcgtcgaaaagatgagaaactgcaagtgagtatcgagcttttttcagtgttagcattatacacttgtagtatcatagatcatcgcgttgatggtgattgccataaccgattactgtcatctcatctgagctgttgctgtctctcaactcaccagaaactcaattccgtagtttacccattgttgttgtctaattctgctaacactctaccccaaaatcatgctaaacaaaacctaaattgctaatttttaagagacaaaaaaaacatcacgatctaatggtgcctgttccggttttcaatttctagtagttggtttaaggtgtatctcaacttatagaattttgtttctaatattccacaaattgtaaagctaatgtgtaaatgtaaattggagatgatttataattatgactggtttactttgttttagattataaattttaatagtagtgtggaacatgtgtaaactatatacattttctatgcttttaactagttttatttctttgattttattgtcttacttaaaaaaggaacactaatcgtaacttcatggtttgtttgcgtttttaaattgttaaccatgtaaaatgatgtgaaaaccagaacagggcctaaaatttagatactaactatttctattgtggttgttgttattgctgttgttcgttgtgggtttttgtatgaattttgatttatattgtttttgtgtttttttcaaaattatttccaggaggatgaaggcgagaaaagcgatcaagatttagtcgtagatgttgcaaatgaaatggtgagttgagtgtcggcccagattcaatgcaaccactcccaaatttccccaaaaaaaaaaagaaacaaaaaccacacctttgctattacatttatcatcaaatgcaaaaacagtacttaatgcatacatgtgccttgcaggaatcccactcaccgcgtcccaacggcgagcacgtgtctatggaggtgcgcgatcgggaaagcttgaatggcgagcgcctggagaagccaagcagtagtggcatcaagcaggaacggccgccctcacgctccggctccagttcgtcacgttccacacccagcctcaagacaaaagatgtgagccaaatgtcaaatgtcgaacccagaaagtgttagagctaattgaatctcgttcatttagatggaaaagccgggtacaccgggcgccaaggcacgcacaccgacaccgaacgccgctgctccggcgccaggcgttaatcctaaacaaatgatgccgcagggaccaccgccagccggatatccgggtgcaccgtatcaaaggccggccgatccctaccagcgtccaccgtcagatccagcctatggacgaccgccaccaatgccgtacgatccgcacgcccatgtgcgaaccaatggcattccacatccctcggccctaacgggtggaaagccgtaagtcatttatgtcaatttacggtccgaaaagtagactataggaattttgtcgtgcattgttattaagtatttaaagtaattcaatgcaactgattaaaatgcaaagtgcaatgtagtcgattggagatgataaatgtatgaatcggcacagataggagtatataatatcgctatttctacgaacgttaaacgtcttatcactaattaaatggttacattaattaataaacacattttgccgttgcagtgcatactctttccatatgaacggcgagggtagtctacaaccggtgccgttcccgccggacgcgttggtgggtgttggaattccgcggcacgcccgtcagatcaacacgctgtcgcatggagaggtcgtctgtgcggtaaccatctctaatcccacaaagtacgtgtacacgggcggcaagggctgcgtcaaggtatgggacatctcgcaaccgggcaacaagaatccagttagccagctggattgtctgcagcgcgacaactacatccgctcggtgaagctgctgcccgacggccgtacgctgatcgtgggtggtgaggcgtccaacctgtctatctgggatctggccagtccgacgcctcgcataaaggcggaactaacatcggcggcgcccgcctgctacgctctggccattagccctgactcgaaggtgtgcttctcgtgctgcagcgacggcaatatcgctgtgtgggacctgcacaacgagatcctggtgcgccagttccagggccataccgacggcgcttcatgcatcgacatcagtccggatggctccaggctgtggacgggcggcttagacaacacggtgcgctcctgggatctgcgcgagggtcgccagctgcaacagcacgacttcagctctcaaatattctcgctcggctactgtcccacaggtatgatgacgacttccttacgagatataatcatctagaaataacataatttgtattatccattaggcgactggctggctgtgggtatggagaactcgcatgtggaggtgctgcacgcatcgaaaccggacaagtatcaactgcatctgcacgagagctgcgttctgtcgctgcgctttgccgcctgcggcaaatggttcgtttccaccggcaaagacaacctgcttaacgcatggcgaacaccttacggtgccagcatattccaggtaagcacacatccttatcatattaaaggaaatcctcaattaaaatactggacgtttttcagtcgaaggaaacatcatccgtacttagctgcgacatatcaactgacgacaaatacattgtgacgggttcgggcgataagaaggctactgtctacgaagttatttattaaatccacaaaaccatgcagttttttcattttgtaataagctcgtatagtttttattacaacatgttcgaaatcatgcaaataacaacaacaaaaacaacagcagcagcatcggcagtaaaacaaaaaaagaaaagcagaaaggcggcagtagcaacgcatcaaaaagcgaagcaaaaatgaaaattctataatatatatacaagaaaaaggaaaactaaaattttaagcgtacttgtagctactaagcctaagctaagtccaataaataaaaacaaaccaacaagttgaacacacaaattgcaagtaaagaagaattcaagtaaaatgagaaccagagcgaaataaaatgataatgcatgcgagcaacagaaacgagtatgttgtaaaattaacaaaatgaaaccggaaacagaaacataaaaagtcggcgatacctacctacgttcatcttaacataaaaacaaataggaggataagtggaattagtcagtcattgcaattgcaggagcgttgagattatgattaccagctgaacaaaaggagttaaatacaaatacgatgcgagtgcttttagtttgttttatgtgagcggtttttgtaatttagctgaaaagtcagacagcgaatgcaacaacaaatgtaattttaagttgtcagtttccttacctcccaacgtccctccaaacacacaccacacacacacaaacacaacatacgaaaaacacaaaacacatttgcataaaaggtatatatatatatatatatatataattataaatgaatatacttagtaagcattttagttaagagttttacattataaattaaacacggaaaccactttcgaaacactcactcgcattgggggtcagtagttagaagctcagagcagtccgctttgcttgtatgtaatttgagaaaatgtgtaatgagaaaatcgaggaattaattgtgtgaatcaaactcaactcttcagaaccaagtgtaaaatcctatattttgagcagctaaacccaacacagagagagccgcatcaacaaccgaaaccgaaaagtagaacacagctaaattgtttagtgtttagagtatatatatgaaaaacagaaaacgaatcgatttatatatatttacaattatatatataatgcgagcggcgaaattgtaataagcaagagatagagtgcagcacacgcttcgatttttaattttacaaatattattattattgtggttatatatgtatataattatattataaataattgaagcaaaacgaaaaaataaaaaattatatgtaatcgaaagtaaatcccacggcgtgcatctaaaacacatctgtggtgtagacgctgcgctggcgcggcactggagcaccttgctggcgggacattttcgtgtgcaactcgcgcaatccctcgcactggcgtccagaaatctgtcgaaacttgtcgatggcgatgggcagcaggttgtccaccagaaaaatcttgttcttcattacaaagttgggctgaaaatggcattcttgaagagagcggttttatttaagctgctttctaacttacatccacggccatgtcgctgggcggtttcaacgaatgctgggcaatgaacagctccttaagaagcagttccaggctctgcagcagggtttcgcacttggccagacagccgcagtactcggtgagctgcaggaagtgtctgatgaaaaccactgtcgactgggtgagattaatccatgtgtcgcccgtcgcctgggctcgcacatcgatacccaagacatcgagctccaggagcagacgcttcaggttcgacttggtctgcaaattgtacggctgccagctctcctcggtgcgacccacggagtccagcagtcgctccttggattcctctatgagcgactcgagtgtagtgcgcaacagaccttccaaatgataactaatgtccagcccgatctctgtgagctttgtcgagggcttgcgcactcgctccacacatttggccactgactccagggaggttcccttggtcaggtaatgctttatcagttggctggcaaaatattgcagctccgcattgcaccaaaccacgagcgctgcaagaattagatagtagtaatacttaaatgtagacagaaataggaatgaagcttaccgctaacgcacgccggttgcttctcaaaggcggtgagaaaatcacaggccacctgcgtcaggtcacaaaagaagagttccgatatatccgcattattcctgcgcgcctcccgttgcgccacccgcaaactgacggcgcagaccttcagcagag

SEQ ID NO: 18284 - DNA, 3967 bp, DROSOPHILA
atagcgcaaattgcatacctgagaccgacgcggtctgtgtgtcgcggataggaaaataggaaattataaatagaaacgggccgtgccgatgccccaaaagccacccaattgccagctgccccaatcggcgaggataccaagtgctaccgaggatatgcaaaatgcgaagtagcccggacatggagtgccactaagtgccggttccgtttgtgggaatactaataaagcggatcaactgccatcgaaaaatattattaaaaaaaaaaacagaagaaaaagaatagctaaaaaacaagtaccataaaacgctggcaaacagatagatattagtccacgttttgcaaggagtttctgtgcaggagtggagtgctcagggataaccggaaggaaggaagcggcgtacgcagcaggaggagcagcaggacttccgctccggcaaatcggtgtccacctcggaactatcgctcttgctctagccggcaacataccagcctaacaacatgtatccctcaccggtgcgccaccccgccgccgggggaccaccacctcagggtccaatcaagttcaccatcgccgatacactggaacgcatcaaggaggagttcaacttcctgcaggcgcagtaccacagcattaaattggagtgcgagaagctgtcgaacgagaagacggagatgcagcgccattatgttatgtactacgagatgtcctatggccttaacgtggagatgcacaagcagaccgagatcgccaagcggctgaacacactgatcaaccagctacttccattccttcaggccgaccaccagcagcaagtgctgcaggcggtggagcgggcgaagcaggtgaccatgcaggagctcaacctgatcattgggcaacagatccacgcccagcaggtgccaggtggaccacctcagccgatgggcgcactgaatccgtttggcgccctgggcgccaccatgggcctgccacacggaccgcaaggtctgctgaacaaaccgcccgaacaccacaggccggacatcaagccgacgggtctagaggggccagcagccgccgaggagcgattgcgcaattcggtttcgccggccgatcgtgagaagtatcgcacacgctcgccgctggacatcgagaacgactcgaagcgtcgaaaagatgagaaactgcaagaggatgaaggcgagaaaagcgatcaagatttagtcgtagatgttgcaaatgaaatggaatcccactcaccgcgtcccaacggcgagcacgtgtctatggaggtgcgcgatcgggaaagcttgaatggcgagcgcctggagaagccaagcagtagtggcatcaagcaggaacggccgccctcacgctccggctccagttcgtcacgttccacacccagcctcaagacaaaagatatggaaaagccgggtacaccgggcgccaaggcacgcacaccgacaccgaacgccgctgctccggcgccaggcgttaatcctaaacaaatgatgccgcagggaccaccgccagccggatatccgggtgcaccgtatcaaaggccggccgatccctaccagcgtccaccgtcagatccagcctatggacgaccgccaccaatgccgtacgatccgcacgcccatgtgcgaaccaatggcattccacatccctcggccctaacgggtggaaagcctgcatactctttccatatgaacggcgagggtagtctacaaccggtgccgttcccgccggacgcgttggtgggtgttggaattccgcggcacgcccgtcagatcaacacgctgtcgcatggagaggtcgtctgtgcggtaaccatctctaatcccacaaagtacgtgtacacgggcggcaagggctgcgtcaaggtatgggacatctcgcaaccgggcaacaagaatccagttagccagctggattgtctgcagcgcgacaactacatccgctcggtgaagctgctgcccgacggccgtacgctgatcgtgggtggtgaggcgtccaacctgtctatctgggatctggccagtccgacgcctcgcataaaggcggaactaacatcggcggcgcccgcctgctacgctctggccattagccctgactcgaaggtgtgcttctcgtgctgcagcgacggcaatatcgctgtgtgggacctgcacaacgagatcctggtgcgccagttccagggccataccgacggcgcttcatgcatcgacatcagtccggatggctccaggctgtggacgggcggcttagacaacacggtgcgctcctgggatctgcgcgagggtcgccagctgcaacagcacgacttcagctctcaaatattctcgctcggctactgtcccacaggcgactggctggctgtgggtatggagaactcgcatgtggaggtgctgcacgcatcgaaaccggacaagtatcaactgcatctgcacgagagctgcgttctgtcgctgcgctttgccgcctgcggcaaatggttcgtttccaccggcaaagacaacctgcttaacgcatggcgaacaccttacggtgccagcatattccagtcgaaggaaacatcatccgtacttagctgcgacatatcaactgacgacaaatacattgtgacgggttcgggcgataagaaggctactgtctacgaagttatttattaaatccacaaaaccatgcagttttttcattttgtaataagctcgtatagtttttattacaacatgttcgaaatcatgcaaataacaacaacaaaaacaacagcagcagcatcggcagtaaaacaaaaaaagaaaagcagaaaggcggcagtagcaacgcatcaaaaagcgaagcaaaaatgaaaattctataatatatatacaagaaaaaggaaaactaaaattttaagcgtacttgtagctactaagcctaagctaagtccaataaataaaaacaaaccaacaagttgaacacacaaattgcaagtaaagaagaattcaagtaaaatgagaaccagagcgaaataaaatgataatgcatgcgagcaacagaaacgagtatgttgtaaaattaacaaaatgaaaccggaaacagaaacataaaaagtcggcgatacctacctacgttcatcttaacataaaaacaaataggaggataagtggaattagtcagtcattgcaattgcaggagcgttgagattatgattaccagctgaacaaaaggagttaaatacaaatacgatgcgagtgcttttagtttgttttatgtgagcggtttttgtaatttagctgaaaagtcagacagcgaatgcaacaacaaatgtaattttaagttgtcagtttccttacctcccaacgtccctccaaacacacaccacacacacacaaacacaacatacgaaaaacacaaaacacatttgcataaaaggtatatatatatatatatatatataattataaatgaatatacttagtaagcattttagttaagagttttacattataaattaaacacggaaaccactttcgaaacactcactcgcattgggggtcagtagttagaagctcagagcagtccgctttgcttgtatgtaatttgagaaaatgtgtaatgagaaaatcgaggaattaattgtgtgaatcaaactcaactcttcagaaccaagtgtaaaatcctatattttgagcagctaaacccaacacagagagagccgcatcaacaaccgaaaccgaaaagtagaacacagctaaattgtttagtgtttagagtatatatatgaaaaacagaaaacgaatcgatttatatatatttacaattatatatataatgcgagcggcgaaattgtaataagcaagagatagagtgcagcacacgcttcgatttttaattttacaaatattattattattgtggttatatatgtatataattatattataaataattgaagcaaaacgaaaaaataaaaaattatatgtaatcgaaagta

SEQ ID NO: 18285 - protein, 719 aa, DROSOPHILA
MYPSPVRHPAAGGPPPQGPIKFTIADTLERIKEEFNFLQAQYHSIKLECEKLSNEKTEMQRHYVMYYEMSYGLNVEMHKQTEIAKRLNTLINQLLPFLQADHQQQVLQAVERAKQVTMQELNLIIGQQIHAQQVPGGPPQPMGALNPFGALGATMGLPHGPQGLLNKPPEHHRPDIKPTGLEGPAAAEERLRNSVSPADREKYRTRSPLDIENDSKRRKDEKLQEDEGEKSDQDLVVDVANEMESHSPRPNGEHVSMEVRDRESLNGERLEKPSSSGIKQERPPSRSGSSSSRSTPSLKTKDMEKPGTPGAKARTPTPNAAAPAPGVNPKQMMPQGPPPAGYPGAPYQRPADPYQRPPSDPAYGRPPPMPYDPHAHVRTNGIPHPSALTGGKPAYSFHMNGEGSLQPVPFPPDALVGVGIPRHARQINTLSHGEVVCAVTISNPTKYVYTGGKGCVKVWDISQPGNKNPVSQLDCLQRDNYIRSVKLLPDGRTLIVGGEASNLSIWDLASPTPRIKAELTSAAPACYALAISPDSKVCFSCCSDGNIAVWDLHNEILVRQFQGHTDGASCIDISPDGSRLWTGGLDNTVRSWDLREGRQLQQHDFSSQIFSLGYCPTGDWLAVGMENSHVEVLHASKPDKYQLHLHESCVLSLRFAACGKWFVSTGKDNLLNAWRTPYGASIFQSKETSSVLSCDISTDDKYIVTGSGDKKATVYEVIY

SEQ ID NO: 18286 - DNA, 6201 bp, DROSOPHILA
gaaagtaaattaaaaatatttttgagaaacggatctcagcagttaatccttttaaaaaagtttgcctaactaattgagcacacaaatcaaatggctgccaaaaccgcaagaataacaaaaaggcggccaagaaaaatcgagcagtatgccaagaataataaaggctaattaaagccataacaaagaatagtcgacaggggaaaccaaagttttggccaatgtaaatgaacaagatgggcgagaaggtagaagaccaaagctcttgccaagtaaattcaaatttgccgttaaacattttaaaagcttacaaaacaagcatagctttaagcttataagcttatatatcgctttttaagcttaaatttcactatatttataacgtatatttaaatttaatctcactgttagtaaacaaattatttgcataagtttcatgtgagtaaaatgacttcttgaccatacagcgtgaaaatattcttgatagttttttagatccagatatgaccgaaaataaaacacataatttgtaatttgtatttgttttaacgtttacttgcagacacatacatactttaatcatcttttaacttacatacgctgcgtaatattcaatggatttctgctaactcgttttacttagaggagaacttttctagtaaatactgcaatagcactaaacaaaaattcactaacttaaaaacgattgatggaaatatatgatgcaaaagttgtttggtaagaacaagttcagaaaacattaataattttaataataggataaacacagatattttgtagttgtcttaaacatagtggatcgagacccaaagtggcattccgaaaaaaaatttacaaacaaaaaaaaatcggtatgtgtgtgtgtgttgtttctggcgtagtgtataaattacaattaatgatttttcggtttgttttggtttcggtttggggaatagcatacatatatataaatatattttggacacatcctccggccagcttacgcctccttcttgtgcttgaacttgttcttgagtagaccgggcagcaaggatgcacaggcgcaggccatcaggatgcccattgaggtccaggagaaggcctcgctcgaactagtcatcttctggagcgtcttgcccgcctggatggcgatcaccgagggcggtgccacgccgcagaaggtgcccaatgcgaagatgtgcagcggcacaccgatgactggcgatgccaggttgatgaaccagttaggcaggatcggtgtcatgcgcaggaatagcatatagttgaacaaactgtcccggtactcctcgacatgcttcgaccactcgctggtcttcttcggccagaagtgacgaatcagacgacgtccgaccagattggaaagtgtatagcatagggtagcgcccagcgccgaacagaaacatatgaggaacagggcgatcgggaacttgtacaggaatcccagcagaatcgagaggaacagcgatccgggaatggcgaatgtttgcaggctataaatggatttcaattgggtcaaggtaaccagtcgtaggcggtttcatctgatacctgcagtggcaactaaatttaatgacctattcgacgtattgccacattgatatgttttatatggcaaaattagcgaaactattagagagatgttttaggagattgccagtattctttgtttattttttggctaaaaacatgtcatgtcacattggctagcaaaatacgttctttcttggaaccactgtgcttgggattaaagacagatcgtacgactagttggacgcgtgctcgaacgtctgtgggcgggtatttatagacgcaaagagttgacaatgacacccccatcgtccgagaatcccccacagtctcgttccatctggcatcggaccacgtattcaacaaatgcccgataacaaatgcacgggccaataaaaaatgctcactaacacactggcgcaaggctataaagttacgtatgtgctttagcttttgatttcgcttctaggttgcctctttatttttttgtttattcctgctaaaaacgcacttgagtgcggaagaagaagagcaataaacaaaatacaaaaaatcaaaacactgacgacaacaaaataatgtccagctcagctgattttcgcgacgaaaacagcaacaaatacaaagaatgcgtcatataaacgaccaaagtcgatttttaggtagcacatgctgcgtgcactggagtggaccttattaaaacgataaacttgacacgcaccgataaaaactaatcattttaaaatatcttaaacccagttgggttagcaaaacattttctaaataaactaatagcaacacagttaacattgcgtatacgttattttattactcatacgcacagtgaagaaccagttttgagcattgtgggtttatttttttgtttgcattgaattctagtaacacgaaatgctagcgtgtgaggaaaatccaaagaaatacggtccaccccagagagtgcaagtagtaagtaagagcaagaaggcaacctcagcggctcccctgcttcctacagctatctcactcgcacttccccgtgctacccacgtatttaatatgcacactatgcgcttcaaacggtgatcgtgaattaattaaggtggaaacacacacaaacgcccgactgaccgtgaatagtttgtagtggcggggtcttcatttttggtaatcgggtcaaggtcaccgccgaacgatagaactcttttattatctaatcagtcggcgaccgacttttcatgccatttttcgtactttggatttgtacttttggatttggtaaaaggatacaatacgtaggcgaccacgacgccaaacatcacttcgaagtagtacatgtccttgtagcgatcaaggaccttggctagcatcttagcatcttggatatcacgcggaattttcaagtgttgtttctccgacctgcagaagttgggcaagaacaaaaccgagacgaggtgtaaacacagtctatgtatatatgtatatatatacaaatacttcatatatcggtggcgtgactcgatgtgtgtgtgtgtgtgtgtgcgagtaaaccctctcgccagatagctctgtaatttcagccattttccagtcaaatctggctactcaactggagcttaattgaaatatttcttaatttacaaatttagataagtttggttgctagggactggtatataatattactatttgattaactatctaaatagaaaaccattgttatttattgaatactatactttaataactctttgtaaatagttcctatctttactgcccaaaaacgcctcttaaatggaagcaaactcacgatatacagataagtgtttttataatgccgtaaaaggtatcatgatttggttactatttcaattactttataatcactgtatgccaatgcagtgaaaaggcacgaacacaaaaaagaacaacaaaatagataagtaaaatttcacagcattatcaataagaataatgggtctgccaagggactttgaaaaagattagagggatctgcacttatagttttcaacacgttacgtttgctgatcaaatttgacaaaaaaaaaacaaagattgttctctgacttgctgattccatgcaaatcaaattctgatgaattcaaattgatagaagtatatgtacacaaacgtcttgaactttaaacaaaataagtttactcactcacagaaccagactatcaaataacaatccgctttaggtaaagtttaaagataataataatcgtgtgcagaaagtttttcttatgcaaagcgtgacatttgagttaagttacttatttaacatggctgttatagtaaatatttggacaattaaatggcccttttctcactacatacaaatagttatgtctgatctagccaataataagtatttgcaataagagttttacatcctacaaatgtaatatctatgatatttaaacataaaatattgttttagaagcgaaatggagataactagcattaggtaaatgactacctagcatatctaatcatagttggatgtagcctagctattttaagcggatcattggtcgacatctctgctcgcaaatcaagcgagacaagctaagcatacacacacacacacatggaggccacttaacaccttacaggtgcacgaatgcgcaggggacacacatttgtggcgctttagcaccagaaagacccacttacgcgttgagctcggggaatatggcgtacacatagcacatggtgaccaagctggccacaaaaatgcccgctacgatgaccagggacttcttggtggccttcttctcgtctgcggacatggcctgcttttgcggagtggcctgttgttgttgctgctgctgctgttgttgctgtggattaagatcttgttgctcctgtggcggcacctgtggcaacagtggagtagccacctgatccggggagtgttcctggagcgcctttgccctgccattgcgcattgtaatcccctcgtcagcggaaatggctagaaaaaaaaaacagagacatgcagatgtaatatgcattccaaagcagaagtggtggtggtgaacagaatgcacggactaagggttaatagtcgtttttggcttcacgggctgcgcactagctgcgggttaatcaccgttccttcgctcagctgataagtaaaaacaactaaaacagcacactcacccacaccactgcagtaagacattgtggctttgacacgatgtacgtaagcccgagttgaagaaggaaaatttaataagccttctatatccgattttaattcacgattgactcatttagcgtctaggctatttatcaattgttaatgctatttgtgtgcctatttgcgcgccagtcacaatttgttgttcttctctctatccgcgtgcctatgcgtatgtgtatgtgcgtgtgtctacaacaatgaatttaatcaatataaaaaaaataggaagttggctaaaactgcgttaactagagtaattgtagttgactactgcgctaatagcaatttttttaaattttttctattgcttttcactttagccgactttttcggcgaacgatcacgcttaaaagtcaatttaaaataaattaatttcagaaatttccgtcacgaccagtgtggccgaaggcgcagtgttgattaagtccaagcgtgtacacagctaccgcacaaaactgaacgtgggtttctaataaaatctggtcatactgtcatatttagcgccactttttagtttctctaaattttatttatattttttaatgttatacgtaaataaaaaaatgtgagtgtctgcataagcaagtgaagtactttttttgtatctataaatatcaacataatagtgccctttttctttttgccaaaagactccatattaattaccacctccatgaaatactgatagaaatagtggaattaaacagtgcactttttattttgtatgaaaatagatttaataaaaatctcatcaatatatttaacattctataatgaaactacgaccttcagtgggtagcaaacgcattcacgaaacttaagggattaggttaacttgttttcatgtaaaaaaaaaagtacgttggtatctagtctagaatctgttaggaatctgctgttgtcttgtttttgagctgacggtatagctgaaccattttgctgcgctcggtttcaagcattgacctcgtagccaagggcagatctttccgcttgcccttcatctgggccttggtgggtgctttgaaggcgctcttagattgggcagccagctttagtcgactgctgtcgtcgtcctccggcccacgatttgactgaccctggtcgggattcagcatggactttagaaggagattggctttgcgtcctggacgcggcacggtttcacttttttccgctttgcgcggcaggattttgagggaaggtggggcatggacgatctcaccaaatgccacagcatcctgtttgaattctgttggcccggcattctgcttctcctcggtatcaacctcttgctgggcctccttgtaggccctcttcaccaattcgcgactggtcttcgcatccatgggcttgtgtacgacttgaacctttttgcgaccccttttgcccgccagccgttgctccttttgcttctgcttgagcag

SEQ ID NO: 18287 - DNA, 1408 bp, DROSOPHILA
ttaatcaacactgcgccttcggccacactggtcgtgacggaaatttctgaaattaatttattttaaattgacttttaagcgtgatcgttcgccgaaaaagtcggctaaagtgaaaagcaatagaaaaaatttaaaaaaattgctattagcgcagtagtcaactacaattactctagttaacgcagttttagccaacttcctattttttttatattgattaaattcattgttgtagacacacgcacatacacatacgcataggcacgcggatagagagaagaacaacaaattgtgactggcgcgcaaataggcacacaaatagcattaacaattgataaatagcctagacgctaaatgagtcaatcgtgaattaaaatcggatatagaaggcttattaaattttccttcttcaactcgggcttacgtacatcgtgtcaaagccacaatgtcttactgcagtggtgtggccatttccgctgacgaggggattacaatgcgcaatggcagggcaaaggcgctccaggaacactccccggatcaggtggctactccactgttgccacaggtgccgccacaggagcaacaagatcttaatccacagcaacaacagcagcagcagcaacaacaacaggccactccgcaaaagcaggccatgtccgcagacgagaagaaggccaccaagaagtccctggtcatcgtagcgggcatttttgtggccagcttggtcaccatgtgctatgtgtacgccatattccccgagctcaacgcgtcggagaaacaacacttgaaaattccgcgtgatatccaagatgctaagatgctagccaaggtccttgatcgctacaaggacatgtactacttcgaagtgatgtttggcgtcgtggtcgcctacgtattcctgcaaacattcgccattcccggatcgctgttcctctcgattctgctgggattcctgtacaagttcccgatcgccctgttcctcatatgtttctgttcggcgctgggcgctaccctatgctatacactttccaatctggtcggacgtcgtctgattcgtcacttctggccgaagaagaccagcgagtggtcgaagcatgtcgaggagtaccgggacagtttgttcaactatatgctattcctgcgcatgacaccgatcctgcctaactggttcatcaacctggcatcgccagtcatcggtgtgccgctgcacatcttcgcattgggcaccttctgcggcgtggcaccgccctcggtgatcgccatccaggcgggcaagacgctccagaagatgactagttcgagcgaggccttctcctggacctcaatgggcatcctgatggcctgcgcctgtgcatccttgctgcccggtctactcaagaacaagttcaagcacaagaaggaggcgtaa

SEQ ID NO: 18288 - protein, 304 aa, DROSOPHILA
MRNGRAKALQEHSPDQVATPLLPQVPPQEQQDLNPQQQQQQQQQQQATPQKQAMSADEKKATKKSLVIVAGIFVASLVTMCYVYAIFPELNASEKQHLKIPRDIQDAKMLAKVLDRYKDMYYFEVMFGVVVAYVFLQTFAIPGSLFLSILLGFLYKFPIALFLICFCSALGATLCYTLSNLVGRRLIRHFWPKKTSEWSKHVEEYRDSLFNYMLFLRMTPILPNWFINLASPVIGVPLHIFALGTFCGVAPPSVIAIQAGKTLQKMTSSSEAFSWTSMGILMACACASLLPGLLKNKFKHKKEA

SEQ ID NO: 18289 - DNA, 10718 bp, DROSOPHILA
tacatctttattatttctttaactactttttcttgaatgtatttcttgttgtgtggttgatgctttgcttcattgatatttcgcactggaatcgctgtttcaacctatgtatgcatataacgtgtggcaacttaggcgaaaacaattcgaggcgttctttgctctaaacattaactaataaaatgcattaatctgttaacaatttgtgtgtttcctctgcgctttgctggtgtgcttacataagtaattcgctatgattaatgctaatctgattgttattgttatttatgcgatttagctatagcacttcgttataggagttaaagccaagaaccgagtaacggcaacatagttctgatttcaacgcatttgctctctatatacatacatgcatgtatgtgtatatagtatttatgtatgtgtgtatcgtatgaatgctggtgagtgtatatataaattccatatgtcgacaattgcacaacagttaaaagtatagtaaacaattaatataaatgactttagatatggccgggcccaaatacgatttgcactataatttttgtgtgttgattaacttgatgtactttgtgagtgagatatccctagcaatatgcagtaagttcctaagtactgtaattagttttacttttttttcggtttcaatttgttatgttaggtttgtattttgagtccagctacaaaacgttgcataaagttgtataaaagttttggtattaccattgtttccatttgactagcgagtaaatacaaaaacccaatcgatttgcaggcaacagttagttcgacctgcacacaccgcatatatctgcgtgtatataaataacattatatagtattgttagaaacggctgctataaaatcactgccacagtaatggccaatatccccataagactaacgtaatcgttaactctatgtataagtaattcataagcgctaatattcgtttaatgcaacaagtctatgtgggatcatcatctcatcctccgtcgtctctggatcgatttctgcccgctctatttccatttccattttcctcatcggatccatcatcttcctcctcgtcatcgccgtcctcctcctcctcctcctcctccccatcggactgctcggatcagtcaaatatgcagacgaagatgcggagacagttcattcccaccttctcccagcatccatcctccgtgggccgaccctcgtgggccagccgcatcttcttgggatagttcttcggactgctccggtcgctcaggtggacgggcatccgggcgtattcggcacgcggctggcggaacttctccagcagctccgcctgctgatcggtgaggttctttagctttttgcctgcaatgtaaaaagaaaaaatattagtaaatacatcatttttcacaactgtgcacattagtaatagttgaaaataaaacattattgcttgtattttaaagtagaaaatcaactattctaaggcatactcccgataagactgcatccttactgcgtttgtcactttaaattaaatattattcatttttaaatattcaatgcgccattaaaatatttatctacagaatgtatattagctagctgataaaaaatattcatattctgtgtaaacaaataatgaataagcattcaaaaaatgtttaatatgattaaattgtaagctttcaaatttttaagattttatttttaacttataaatataaacttcctagcttgcaatagtgatctagatcttggttcactgaactgcaatagataagcctacactactgttactccaagaggttactcaccatcgagggcgtcggtgataagagatatctcagtgggtggcagtagctccaggcgttcgcagcatcgccggaattcgctggcggtcatccgcaagtaacgaggtgtgaggcatagtggaccgaggacagtgcgacggttctccggcgtggcatcgatatgcttgcgggcgcactccgccagactccacgtggccaggcactcgaacagagtgacctccgacctgagctgcaaggtatccctcttgaccagcgtctccagctcctcgaacctgagatcactgatctccggcatcgaaagctgcagctctgcgtgcatatcgatcagctggagcgtgttgtgcagcagcgccacgccgtaatcttcggtggtaaagggatttgggttaggaatgaggttctgctgggctccatcgccctccgctccgttttcggtggactgagaggccttggcagccgccagctgcttggccgccgccttcgccttggtcgccttcttcctggccagctgctggcccgtctcctgggtggtgatcaccgtttggtgctggttggtcagtgcgatgccctggtagaaccacagcgctttgaagatgtccagtgccgtggcgctcgagattctgagatcaagttcgcgaatgcagtagattatctggaatagtgaacgacaggaatgttagtaaacatgtcaatatattggctatccactagtaataacttaccagatctggaacgttgaagcgatcggatagctccagtatcttgagcaggtgcttgtgatcgcggtagggaatgaagtgcttctccatgtagcggacgatcagctcgaagtcgttcttgtccacgttgagtatctggaaatgattgtcgctcttgcgaccgctgttcggaccggcgtggataagcttggccagctccacgctccgctcgagtaccgactttcgttcgcatctgatcatgtatcgatcatccccgttgaccacgatgaagtctatgtagggattcacgatgatcggaacacctgtgtatatgtttgtttgtccccgggcgtaggctggtggcatcatgtgggcggggggcgcactgggcgccggagcactctgaatggcatccacgtgatggccatcgggtccaagtccaaacggtagcaccatcctgttcggctcccaatcgttgttgttgttgttttgttggtgttggttgtcctccggacctgtgatctgcaccttctcgtcctctgcctcctcccgacgccgcagtgccttgtggaccagggcgcccaccagagggaatttggtgatacgcttttccttaaccagatgctcctccagatgggcgctgaagcgacgcgggttgtatttgttaccaggacgtggctctaggctgtccttgtcgtgaaaggcagtgatggagctggagaactaaaatagaagcatacagtggtaaggtttccaaacatttatattgttgctgtaaagttatcttaacatcttaaatgctgtttacctaatgatatatattatttaatataacatttttaatttgataatgaaagacttcctgattgattattaatcactgcacaactcgcatttcaagtacccaagcttaatgtggctctaactcgaagagcttttggaggtaaagggctgctctgtggctatcaatagtctcccgagggaactacatttttaagctaaagaaaaagttagatattatttacgacccttacgaatggccagttagtcatgccggccggtcgccggtcgccgatttcgccacgccgagaaatctataggtagttattttgatggccgttgtaagtactttcccacctgactgattgattcattggcccgcttatcagtcaattggcacactccaaaacataaatcgtttagtggtctaaacagcctttaatcgctgatttttgcactcgacaataaattaggcgtgctatctaaaagtacacaccgactaattagccaactaaccaagccccatgcccattttttttttttttttttttttgggtcctgtttcagttagcatatgttccaatcgtttgattaccgctaaatcatctgcaatccatcataatatagccataaatcatgttcaatatcgaaaacgggtgcactgctaccagtttgacagctaagttcccgcgtgattatttaattcccctaaaaatactaaccaatgatagggacagtaccgaatcgaaggagtagctccgcgattaagttggctttttggcgtataaattcatcagacaacgcaagtcacataagcagaaggtactacatcaaatttatttctgattattttaatttagttaagtctcaaatgccaatctattcaaatttatggtaggctgggtcaaatgcctttaagacatgaatagtaaattgggtctcaaactgtttgcatagttatttaaattaatttttaatcgataacttggtctttaagttttgaatatttaattacagttcttattacatagaaactttcacgaacttttacttgtataatgctgtgtttgtcacgggaatactaaaatatggaagcatttggggacttgagaatgataagattgtcagtctgatatgccattaatatggccgatatcgaagataaaaatagtttggaacataaaaaatttccaaaagtaaaagtatttttattataaaacacacacgtcctagattattggcatattattgatttattttataacatgaatgacctgcataaagaaattcttgttcctaaaaggtaaacatttatatctaagcgaatttcagaggaaaacttgctgaactaatgcctttgttcgttcgaaaagtttgaattatatagttcctgttcttgttattttcctaagtacaatgcaaacaaaattaattgtggcacagtgagattgcgagcaaattcgcgccggtcgagcaaaacattaaaaaagaatgtacggaggtatgtatattaataaataaaataaattatacggcgatgtttgaacagttgtaaggaagacggaatcggtcttgaagtgttgacgaccgtttctcgtggttcaaatgtggagctttctagagaggggacgtccgtattcaaatatttacccagtgaaccacaaggggaactgtgacgacttgtgatagtctgatagtgcaataaataaattatcgtatgcaaataaatttatggctgttcatcgctcgacttgagactttatcatctgcacagcaaccacaatgggagatgggttttatgtacagcacaggcatcgaattagcacttgggagtcattagttgatttccttttgtttatcagcccgctctatatatatattgttatttggggcgtaggagggttggtcaaaaccctaattgccacccagaccttgtccaaatttaaacttgaactttacaacgcacatgtcactcgatttcactatcgcaaattatcatttatatcatgcacttcttacgctctatttgttgtttcggcttatcgctgtagacgctttgttccaccaatcaatcaaaagcgatttattttggcctaagatatgttggttccaacttcccggaaaccttttgatttatacttttggcaaacgaaatttgtaataatttcttatattgtaaatcacgcactaattgtttgattccagttctggacagtgggtgccgtattttcgcacgatttcgaaccgaacaccatgagtttaaaatatcgactgccattcaatcccatttgcgaactgcgacgtcggcagtggcagcgaagtcgtcagcgaaccctgcggatgttcgttcggaagattacgtcatgatcgttgaaaatgcacgaaattcgaggaaatgcaccaaataggcatgcaaaaaccatttcaaagactattttttaatattatatttaagctgttttcatgtttttatagaagtttgcataaagtttcattcagcaaaaacgcgataggagcattgattcaagtgcttttttattattattcatatcttagattgcaaacttttttttcaattgaccctgaacagctacaactgcttcagttagttaatcaaaattaaatatattaggggtaagtttagctcgcccgcatattcacaaactttgaagttgcaaaaaaggccgagggaagctggcaaaatgcaggtcgagcggaaatgagctcggattctccgcttaagaagcactcacaacttgagttatcaactcaattcggtggacaaataaatcaatttgtgtggcaaagaggcaaatggcatagttaaacgcagcaccagcagctggaggaagatttcacagttggatgaatcaattagcacgccgattgtgggtggatggaggatcggatttcgggtggtgtgtggtgggtgtgggagtgtcatatttgacaactgtaattgtcgctggcgctttgtgtacgcacgaaattcgccccattgataagcaatgcaaacagaacagtgggcataaaaagtacacgcccacatacacacacacacacgagtgtgagcgtaataatagcaacgaagagcagttttccaagggccaggcagaaaagcaaagtagttattatcagcggccaaggccaggacaaagctgaaaatctgctcgagttgcttctgtgtgcacacgtatttatgcagccagcgagggctgccacagaagttggggaaggtagctggcaaaattgcgattagataaaactaactagctacaaagtaccaagtttatcactatttttatcgattcgcttcatagtgctgcacttaacgactcgatgacaaccttaagtagtactcgcacacaaaatgtttaagctgattaatgcaattatttgaacagtaaaaacctttgtctcagaactctaattttacagttcatagttccagcttgagtcgtatgtgactgttaataattaactattaaggtatatctgcctaaggtaaccacagatatgaaagactgatactcttcgatctgccctcgctgaggcatatgccactagtgtttacatatgtatttcatgtggggctactggagcagcgaagactgctaatgagtccccatgtaaagcggaagctccagatgggaaaaaacatatgaaaccggccagaacaacagcaaaaactgttaacagttagcactcgaagttcgcctcacgaacgaccttgacattgggtggctgggcggttgggtgacaacagggtccactgtgcacgcatttccccaagatcaacatagcgattggatcgctcgaaaacccgtttacgatcgccgggccgaatcaaatatttgcatttataagggaaaatttaattagcagcatcaacaatgtggagcaatatcgatatttacgccaaacaggcgggcggcgaaaatgtttaattagtcgaaatttaacataattactcactttgttggctgccggtaaacatcacgcaatgtgcgcggttcaaagcaaacaatcgaacaaatgaaactgctaaaaaacaagccaaagaattcgatgggaaagaactgggagcccaacccatctaatcccagtacaattcgcttcctgatccgccgaacactgccaacttcaaattccacctgctattgccgcatagttcaaaaataaaccacttgccacattcttcggcggagcaggaagagttcgcagccagtgcaatggctcctctatttatacccatcctaatgaggtggtttattaaaattagcccatgggcagcagtctaagtactacgagattatgaaactttggaaacagttgaagctaaaattacttaaaattatatgcgcgctcgctgttaatgcaacaaaaatgcaaaaacatgaaattatatgatcatctttacttggttttatcattaccatttatcacactatacggttaacgaactccttttcgcagtggcaatcttattattggcgtgaagcccatcattctgatagtcacactaccatactttattaataagcaaacattcttatctgtaacaaatacgatttggattttgaacttctcacccgaagccgcctaactgcagtacttcggatgcgtaattcaatttgccatgggtagacacctccatcccgtaacttccactgactcatccattcatggagcgtttgttccgcgaccaggcaccatattactacacatatactacgtatcgatggcactatggacaccttcggacaggatggcttttcacaacgggaaaatgacatcatttgatttgattgcggacaaaccgaatgccgcggagcaaatacaacaaatggaatttgttgtttgttcttggcttggaaaattgcattactcatccatcccctgcgaagatccagccaaatgacgaccgaattgctcactggtcttttggcaacgcgccaaaaatgccaatttcaaagtataggaattgattggagaaaaggtggcaatattatttacataattgcctaaacagaaactagttgtaacaagcaaaatgaaaaaattatgtataaaattttccatcgatattataagagtatgaataaaaacctatattagttatctctagtacttcacaaatattctgctttatggtatcgaagattaccaaaaataacaaaaccatataattacaaaaattgggtaaaattcaatttcccttcggctttcatagaaatcaaattttaggggactttggagctaacaaaagtgctgcctcccgaattgcaaacaaaacacgaaaacgggaagggcggaaaaaaagcgaaaaactcaccctcgacgcgcaggaaaatcgctgggggtgtggaaggtgaaggaaaaaccctacgcaacatgttccatgttcggcggggaaaacaaaagggtgagtggccactgaatgaaagtggaacaaacagttgaaacaaatttgcaaaagctggcaaaagaaagaggagacctttgctaaattcatggggtttggcatgggccaatagagcaatatcaagagcgcgattctgggatttctggcggggattggggtcggttggcgctggggcaaccagttggtgccaagggcgaagctggggaatgggcgtgagtgctcgtaacaattgacaatgcggcgtatgcgcgatggatgcccagctgatgatacaatgaaacactgacacagtgaacgacttttccatacacccatacacgcgcataattacacccacacacacacagagacgcagagagtcggaaaactttcctttgaacaggctttcattcgccagtgtctgtgtattttatggatacacaatttatgttggccaattgctcgcctctgtttgtatacagcatttcattcctttgcattctgattaattatacacagagacttaccccagtttatgaatttgtcggatgggccaactctcgattttcgaaatttattcgccaattttcagctgagataactatgaacttccgcctcgatgtcaaaatcttcaaacttaatgcaaattctgtttacgccgatttgtttatgccaataatcagatacatatatacagatattttggccatatagccccgccgatactcgcgtatatatttccgtttcgatccgatgcgatccgatccgagagttttgcgcgcctcgtgccaaacggaattgggaaaggcagccaacaacgacgacgacgtctccgctcgagagccaaaaagcgtatatacaacaagatttgtacgaagagcgccaagccaaaaatatgaaaaacaaacgagacagcaggaaaacataccaaatttcccgggctggcgttgccaccatactggtccatgtccaaaatatgggcaccatatgagttagtgatcctgaccagggcttttaaatcttcagtttcaattgtgttcggcccggaaaggcataagtcgaacttaaatatgttataatatttgaaaatacctgccagttgatggcaaaacaccagccgtctggcaacattccaccggaattggggaaaattctcagaaaattcttgcggcgggacatgcgcatagaaactttgagcacgacctacaggtcgtatgagtactcagccaaaaaagacgcaacattttcgagcgtgtgataagacacagatactccgctgcggggactttccctttccaaagcgacagagagggaaatgaaaaagccagggagagcgagagtgcgtgggcgcttctagggaggaggcccagttcgggctttcgggccgggccctagacaacggagcaccacattgagggaggtaggaaatttgtggctcttatcaacacagccgcctggccagcgagcaccaccagccacatatatcgggcaatgcaaaccagacgaaactgggtcaaattcaagcagccagtttggaatgctccatccggaaaatgtatcggacggatactggaattatttctaattgcctgcggacacgaacagtttttacggttcaataaaccatgtattatgttgaccctttcagaaaattttaaaatggaatcaataataattagttttttgtatagttttttctttatacaataatccataataatttttaccgctcatttaatttaatacaactatgcagaagccaatggaattttgtgaaaaaaattaaatgtacattttattattcgttattgatcgaatttgtttttaattttacaatttttcatcgatgcactcatgcatgcaggacatttcccaggtgtatggtaatgcaactgttggtcatgtcttcagtgtgatacggtaaatttgatttatctgctggatttcaacactcaggaccttagtgggagcgggtatccatggaggcggttagcataagtaaggttcttaaaagctccctaactt

SEQ ID NO: 18290 - DNA, 1753 bp, DROSOPHILA
tgaagatttaaaagccctggtcaggatcactaactcatatggtgcccatattttggacatggaccagtatggtggcaacgccagcccgggaaatttgttctccagctccatcactgcctttcacgacaaggacagcctagagccacgtcctggtaacaaatacaacccgcgtcgcttcagcgcccatctggaggagcatctggttaaggaaaagcgtatcaccaaattccctctggtgggcgccctggtccacaaggcactgcggcgtcgggaggaggcagaggacgagaaggtgcagatcacaggtccggaggacaaccaacaccaacaaaacaacaacaacaacgattgggagccgaacaggatggtgctaccgtttggacttggacccgatggccatcacgtggatgccattcagagtgctccggcgcccagtgcgccccccgcccacatgatgccaccagcctacgcccggggacaaacaaacatatacacaggtgttccgatcatcgtgaatccctacatagacttcatcgtggtcaacggggatgatcgatacatgatcagatgcgaacgaaagtcggtactcgagcggagcgtggagctggccaagcttatccacgccggtccgaacagcggtcgcaagagcgacaatcatttccagatactcaacgtggacaagaacgacttcgagctgatcgtccgctacatggagaagcacttcattccctaccgcgatcacaagcacctgctcaagatactggagctatccgatcgcttcaacgttccagatctgataatctactgcattcgcgaacttgatctcagaatctcgagcgccacggcactggacatcttcaaagcgctgtggttctaccagggcatcgcactgaccaaccagcaccaaacggtgatcaccacccaggagacgggccagcagctggccaggaagaaggcgaccaaggcgaaggcggcggccaagcagctggcggctgccaaggcctctcagtccaccgaaaacggagcggagggcgatggagcccagcagaacctcattcctaacccaaatccctttaccaccgaagattacggcgtggcgctgctgcacaacacgctccagctgatcgatatgcacgcagagctgcagctttcgatgccggagatcagtgatctcaggttcgaggagctggagacgctggtcaagagggataccttgcagctcaggtcggaggtcactctgttcgagtgcctggccacgtggagtctggcggagtgcgcccgcaagcatatcgatgccacgccggagaaccgtcgcactgtcctcggtccactatgcctcacacctcgttacttgcggatgaccgccagcgaattccggcgatgctgcgaacgcctggagctactgccacccactgagatatctcttatcaccgacgccctcgatggcaaaaagctaaagaacctcaccgatcagcaggcggagctgctggagaagttccgccagccgcgtgccgaatacgcccggatgcccgtccacctgagcgaccggagcagtccgaagaactatcccaagaagatgcggctggcccacgagggtcggcccacggaggatggatgctgggagaagtccgatggggaggaggaggaggaggaggaggacggcgatgacgaggaggaagatgatggatccgatgaggaaaatggaaatggaaatagagcgggcagaaatcgatccagagacgacggaggatga

SEQ ID NO: 18291 - protein, 564 aa, DROSOPHILA
MDQYGGNASPGNLFSSSITAFHDKDSLEPRPGNKYNPRRFSAHLEEHLVKEKRITKFPLVGALVHKALRRREEAEDEKVQITGPEDNQHQQNNNNNDWEPNRMVLPFGLGPDGHHVDAIQSAPAPSAPPAHMMPPAYARGQTNIYTGVPIIVNPYIDFIVVNGDDRYMIRCERKSVLERSVELAKLIHAGPNSGRKSDNHFQILNVDKNDFELIVRYMEKHFIPYRDHKHLLKILELSDRFNVPDLIIYCIRELDLRISSATALDIFKALWFYQGIALTNQHQTVITTQETGQQLARKKATKAKAAAKQLAAAKASQSTENGAEGDGAQQNLIPNPNPFTTEDYGVALLHNTLQLIDMHAELQLSMPEISDLRFEELETLVKRDTLQLRSEVTLFECLATWSLAECARKHIDATPENRRTVLGPLCLTPRYLRMTASEFRRCCERLELLPPTEISLITDALDGKKLKNLTDQQAELLEKFRQPRAEYARMPVHLSDRSSPKNYPKKMRLAHEGRPTEDGCWEKSDGEEEEEEEDGDDEEEDDGSDEENGNGNRAGRNRSRDDGG

SEQ ID NO: 18292 - DNA, 4848 bp, DROSOPHILA
ccaccttcttctgctgcttgaccttgtagtcagccagggccgccttgatggcatcctcggccagcatggagcaatgcagcttgacgggcggcagacgcagctccttggcgatgtccgtattcttcagctttccggcctcgtcgatggacttgcccttcacccactcggtggccagggagctgctggcaatggccgatccacagccgaaggtcttgaacttggcgtccactatcttgccgttctcgtccaccttgatctgcagtttcatcacatcgccgcaggctggtgctccgaccaagccggtgcccacagtgacatccttcttgtccaaagatcccacgttgcgcgggttttcgtagtgctcaacgacctgtgggtgaaaataggtaggtgtgttagtcaccagggggttgtgctatcgcgcttatcactttgcgtgccgcctgaaacgctgtctttcagaacgacaacaaagtcgtttcttatctatattatacagcttctagatattacgaaagaaccttccgcgcggcaattgcgagttctaacttacattttcatgatacaatgccaccgggacactttgtacgcgcttcagctgcgatcgcagcaaccgggaggagtttcgcaccagggacatatttaaattaaataaatcaatttaatgaagaattgttgtgaaattcaaagagatcgaaaaaacacaggcaactgcgtgttagaaacagctgatggacagtgtgcccgttttaaggcagatgtgaaagaccagctaacgccgttgtcgatatgttttcgattttttaaaagatttcttatattattattatttactccttaaaaacagttcagtataataagttatttactataagtaataaattgtttttatcaataatgagccataaaaaagcttgaataaagcaccctcttgcatttaaaatcacactctgagttggcagcttgccaggtattttgtaaactcactcctatggtcactccccaatcacaaagtttactattgcccatccacaaattctgccaacttccgatatatttttacagcagcagactatgagtttctgaaactagtcccctaggtcaataatatccacatccagtcatgacctctcgcaagcgcagtggcagcggctccaccaagcggcccaaggagaaggttcgcccggagcactggatttcacgagctccgccctcgaagatttgtgctttgcttgactaattggaatttattgcaggtggtctatatatatgagctgttgtgccggggcgaggatcccagcagcgagagtcccgaattttggaacgagttcttcctgctgcagccgaacttcgaggcgctggagaatgagattggcaaactcaacaacgagcagctgcagctggtgaaaccgaacctgaacaccctcttccagaggtgcatcgaaatgcttgacacgggtagaccagtttgacctattaatatatacctccagccacctataatccgtgatttcccccagaagatcatcctaagcggctgtgcaacagcctacacacgctgtgctccctgttctacgggatctttaagaagtccaacgcagaaccaacattaaacatcctaaacgagatcttcggccatgagaagatggacgaatggctgaagctactcatgcagtactgcaatcgcatcctcctgggcgatgtgcccgaaaacgctcgatttatgtgcctcaaactgctgcaggttctggttacgggcacggataacgtcaaccagaacgccctcttcgagcatctaatgatgcacagcatgttcgacgcctttgttcggctactcagtgatcctacgttccgtagccagcatggacacgacatcgttatcctacttactatcctggtcaactatcgcaagcatgaagccactaacccctatgtggtgcagctctccatactcgctgatgagctggctttaaatgggtgagtccatttagtcaatgtaatgtatgtatgtatatttctggcaacttatgtgaaagcaattggcttaaagaatttataatcgagggtaatcaaatatttaaactgaatcacaaagttcttttatgtggcagcagttggtgactgacgtcatcaaacagataacttgccacgagcttgcatatcttatttcgatagtaacccgaactttatcttgattccagctatggccaaatgatatcgcaatcgctaattgatttctgtcgccagtacattcagagccttaacaatgtgcaatcctcttcctggttttcgtcgctgtcgaatattgtgggcaacatgtttgtgtcggatgaaggatgcgaacgggtgcagcagatcaaggcgaataatggccttctacttgccctctacgaggcagtgcacctgaatcggaacttcatcacaactctggctcacacgcaggcagagtccagtgccccgccctcgcccagtaacacattgagtctggcccaacctgtgccggatctatctaatgcacccatcattgacattacgcagtatcccaccaatctgctggtggccgtatttcagtactgttccatcgtgatgcaggacaataagaacgaatcgagcattgctaatctgaagctgtgtttcctcatcctcacctgcatttccgaggaccagtacgccaactccatgatgcacgacagcaatcttaccttcaaagtcatgctgcatcgggcgcagatgcgtcatcgcaagctgaatgtggatcgggtgggcaagtcccagcctttggctgccactctactggacctcctggtggagttcattgtatcgcatttgatgaaaaagttcccgatggagctgtatctgctctgcattggagttatccatcgaatcttgtgctatcaaaagagatgtagagtgcggctcaattatccgtggaaggaactttggtcggctctcattggtcttctgcggttcttggtcaaccaagaacagacgctggttaaaaagtgcaacatttttcatctgtcgctacaggtggtgaatatatttaatctgtttattacgtacggtgatactttcctggccacaacaaatagctatgatgagctctactacgaactgaaccgcgaggagaaggtatttacggaaatacatgccatgggtaaggttgttaagattctatctgtagaaacaaaattaatcattttcaaattagttcttcgctatacaacgatgccggactgcgaatacaaagacgatgtaatcaagctcttaaacgctttggtaaatatcctggccattgttaagcactttcagaacaagatcaaggaatggctggccgaacaaggcctctctacgcccacggaggagcagatactcgacgtggtgcgcaagaactacgacctaacgctcaaactgcaggactccctggaccaatacgaacgttacacagaaacgccgctgcacaccaacttctttaagttgatggttcgcgatgttgtcaacgatacgcgcaagcacatctacggctatgtgaaggaggcagtatctgttattccggaccaggaaattctcctcagttcctctatgacatccgtttcggccggtacagccactccggcttcagcaacagcagtgccagaagcaaaagcgttgccttcttttgcttagttttgtaattatattttaaatattcaaatctctggatgcgtaaactcgatgtaatctataagatttaaagtgctttgcgagacttttatagctaaaacagtgcacttaaagcaaaaacatattctgtgcaagttttttacacaagtatacaaaatatataaatattacgtgtatataaaatcaaaccagatcacctcttacgaagtcataaaccattggcgacttatttaaccatgggggtagaactcaagttttttaatatcgatctgttaaatgtcgatatttgtcactatgtggaatgtcgtccacctccttacctatataagatgatttaggcaatatgattattattgttgctcttttatttattcccaaactttccacgtgtgtataatctttaattcaaaaatgcgtataaatatttataaagtatgatttctttctggttatacaggcgtgtgtgtataggctctaaggatatcgctacgatttataaatggtatatatgtttaactttagcatgcaatacttgcacgcatttaacaatttgaatgcaattaaaattgatcatgggtcgaagcaatatgcgaatatctaataaaatgtcgaatatatcatttaaaatgcgttaaatatatgaatacatttaaaatacatagtaattggatgatttaaaatatacaaaataatttgtgtatgaaattaaattctagtcgctttatacaagtatccattgcattcgattgattaatttctagctcgatataatagttcagaggcagagccaaacgatcacttaaaggcacaattaacagacaatatcgaattaaatttattatattatataagcaatgcctatactacctctttgctcagctcatttcgtctgccctggaattgcggccctaagactacacatatgatactacggatctatttacaatttcgtatatcgttcaagttggctggtgaatggtagtgctatgaatcttaatgattagaagtgatccaccttgacggagaccgtgtgagcggcggcattgctgggcaggtcgatgttgtcccactcggtgtgcagattcttctcgctatcggtcgccttgagggccagtcccagtgatgcagttcgtccggcgcagtggggtatgttgagcgtaaccggtacgaggaactcgaggccct

SEQ ID NO: 18293 - DNA, 2480 bp, DROSOPHILA
ccccaatcacaaagtttactattgcccatccacaaattctgccaacttccgatatatttttacagcagcagactatgagtttctgaaactagtcccctaggtcaataatatccacatccagtcatgacctctcgcaagcgcagtggcagcggctccaccaagcggcccaaggagaaggtggtctatatatatgagctgttgtgccggggcgaggatcccagcagcgagagtcccgaattttggaacgagttcttcctgctgcagccgaacttcgaggcgctggagaatgagattggcaaactcaacaacgagcagctgcagctggtgaaaccgaacctgaacaccctcttccagaggtgcatcgaaatgcttgacacggatcatcctaagcggctgtgcaacagcctacacacgctgtgctccctgttctacgggatctttaagaagtccaacgcagaaccaacattaaacatcctaaacgagatcttcggccatgagaagatggacgaatggctgaagctactcatgcagtactgcaatcgcatcctcctgggcgatgtgcccgaaaacgctcgatttatgtgcctcaaactgctgcaggttctggttacgggcacggataacgtcaaccagaacgccctcttcgagcatctaatgatgcacagcatgttcgacgcctttgttcggctactcagtgatcctacgttccgtagccagcatggacacgacatcgttatcctacttactatcctggtcaactatcgcaagcatgaagccactaacccctatgtggtgcagctctccatactcgctgatgagctggctttaaatggctatggccaaatgatatcgcaatcgctaattgatttctgtcgccagtacattcagagccttaacaatgtgcaatcctcttcctggttttcgtcgctgtcgaatattgtgggcaacatgtttgtgtcggatgaaggatgcgaacgggtgcagcagatcaaggcgaataatggccttctacttgccctctacgaggcagtgcacctgaatcggaacttcatcacaactctggctcacacgcaggcagagtccagtgccccgccctcgcccagtaacacattgagtctggcccaacctgtgccggatctatctaatgcacccatcattgacattacgcagtatcccaccaatctgctggtggccgtatttcagtactgttccatcgtgatgcaggacaataagaacgaatcgagcattgctaatctgaagctgtgtttcctcatcctcacctgcatttccgaggaccagtacgccaactccatgatgcacgacagcaatcttaccttcaaagtcatgctgcatcgggcgcagatgcgtcatcgcaagctgaatgtggatcgggtgggcaagtcccagcctttggctgccactctactggacctcctggtggagttcattgtatcgcatttgatgaaaaagttcccgatggagctgtatctgctctgcattggagttatccatcgaatcttgtgctatcaaaagagatgtagagtgcggctcaattatccgtggaaggaactttggtcggctctcattggtcttctgcggttcttggtcaaccaagaacagacgctggttaaaaagtgcaacatttttcatctgtcgctacaggtggtgaatatatttaatctgtttattacgtacggtgatactttcctggccacaacaaatagctatgatgagctctactacgaactgaaccgcgaggagaaggtatttacggaaatacatgccatgggtaaggttgttaagattctatctgtagaaacaaaattaatcattttcaaattagttcttcgctatacaacgatgccggactgcgaatacaaagacgatgtaatcaagctcttaaacgctttggtaaatatcctggccattgttaagcactttcagaacaagatcaaggaatggctggccgaacaaggcctctctacgcccacggaggagcagatactcgacgtggtgcgcaagaactacgacctaacgctcaaactgcaggactccctggaccaatacgaacgttacacagaaacgccgctgcacaccaacttctttaagttgatggttcgcgatgttgtcaacgatacgcgcaagcacatctacggctatgtgaaggaggcagtatctgttattccggaccaggaaattctcctcagttcctctatgacatccgtttcggccggtacagccactccggcttcagcaacagcagtgccagaagcaaaagcgttgccttcttttgcttagttttgtaattatattttaaatattcaaatctctggatgcgtaaactcgatgtaatctataagatttaaagtgctttgcgagacttttatagctaaaacagtgcacttaaagcaaaaacatattctgtgcaagttttttacacaagtatacaaaatatataaatattacgtgtatataaaatc

SEQ ID NO: 18294 - protein, 724 aa, DROSOPHILA
MTSRKRSGSGSTKRPKEKVVYIYELLCRGEDPSSESPEFWNEFFLLQPNFEALENEIGKLNNEQLQLVKPNLNTLFQRCIEMLDTDHPKRLCNSLHTLCSLFYGIFKKSNAEPTLNILNEIFGHEKMDEWLKLLMQYCNRILLGDVPENARFMCLKLLQVLVTGTDNVNQNALFEHLMMHSMFDAFVRLLSDPTFRSQHGHDIVILLTILVNYRKHEATNPYVVQLSILADELALNGYGQMISQSLIDFCRQYIQSLNNVQSSSWFSSLSNIVGNMFVSDEGCERVQQIKANNGLLLALYEAVHLNRNFITTLAHTQAESSAPPSPSNTLSLAQPVPDLSNAPIIDITQYPTNLLVAVFQYCSIVMQDNKNESSIANLKLCFLILTCISEDQYANSMMHDSNLTFKVMLHRAQMRHRKLNVDRVGKSQPLAATLLDLLVEFIVSHLMKKFPMELYLLCIGVIHRILCYQKRCRVRLNYPWKELWSALIGLLRFLVNQEQTLVKKCNIFHLSLQVVNIFNLFITYGDTFLATTNSYDELYYELNREEKVFTEIHAMGKVVKILSVETKLIIFKLVLRYTTMPDCEYKDDVIKLLNALVNILAIVKHFQNKIKEWLAEQGLSTPTEEQILDVVRKNYDLTLKLQDSLDQYERYTETPLHTNFFKLMVRDVVNDTRKHIYGYVKEAVSVIPDQEILLSSSMTSVSAGTATPASATAVPEAKALPSFA

SEQ ID NO: 18295 - DNA, 4637 bp, DROSOPHILA
gccctggtcgactttgagaaagtcagcgtcccaggatgagatgtcatcagtgcgcttctccttgttctcaacctcttcggtaaccacaggatcgtccttgtgataggtggcccagtggagcactttcttcaggatcagcgagttgacattcggcaacggcagcacactgttgtcgctctcatcgcccaaatcctctattgcaatgcgaatcgtttccgagcacttggcgatctcctgatccgtgtcaaagatctccttgtccgcagactccagccgaatgatgggcatctctgcgtaaaaatttttatttttgcttatatctatattttcaattttattcgtacacacctcctgctgatttggatcccaagatttgatacgaaatcggtttgatttatttgcagacgcagccaaacaaaatttttagacacaacacgatgtcacttagctgtggcctactggctaaaaataatattcccttgccttcaacttgaaccggactggtgcggcggccgcctgagaacagagcgtttgttaaataaagaacttggctgccaataattccccggattcttagaaaactagaacgtcgtacgatttgaagaggaaatttgttagtgaaacggccgccagtgtgcacatactcggaatggctttaaaagatggcgcctattacagttaatggtgtggagacactgtgacagctagcggtaaacaaaagctcagttatatttttttataatgtatatatatatattttttttaaacatatatattttggcacaattcaagcgtgctgggcgttgtattatttaaacagaaacctacaaaattctgcctttatagttagtttttatcctgtttttatttaatgaatttcaaatttcaaatatttttgtaaacaattttaagctaggccaagggtttgtgtcgcggctagtgcaagcagtcaacttgcggcattttttagtacatttccctctgtgctgggttatatattcgcaggctatactccacactgcttccagcggaatcgtcaaaaaaataacattaaaatcgccgtgtgcataattagaatatttccgaatagtaatcgcccgtgaaatcgctaattagcggtcagcacttgcgccagttaaagaaatcgcggcaccggcagtgggccaaaagaacattttttccggctgaaaaaaacaggcggcggcgtcgacacgcggaccgaaccaaaggatccgaagccatccgatcagatctaatccgatccggagaaaattccaggacactaaggacttccgaaactaccccgcacaagagatggacgtgtacgacgtgagcgatgatctgataaagaagctgcaggactggaaactaatcggcatcatatccggcaagttcaacgagctgaaggagaaccatcgcaaggttgacttcgtgatgcgcgctcttattgacttcaagtacattgaaaagatattcctgaatgtaacgcttcgagaggacaagtgcaacaagcggagcgtggagttccgtatgctgggcaacgagcagttttcgctcaagaacaggaattacttccaggtaatcattgccccctcaatcggcaaacttaagctaatccctgcgactcgtttcaggctctagagctgtacaacaaaagcatctgttatgccgaaccgaattcggagcacctgtccatcggctatgctaatcggtcggcggtactattcgagtggaagcgctatcggcaatgcctggacaatatcaagctggcaaggcaggccaactatccggcgagactgagccacaaactagacaagcgagaaagggactgccaacagctactcgatcagcaaccgccggatgtggtgccctatgagttcaagctcagtttcgaaccgcatgcccaggtgcccttcatcgccgactgtttggagttgcgcgaaaccgccgccgagggtcgctttgtggtgaccaatcgggatttggccgttggggatcttgtgtccgtggaggagcccttctgctccacactgctgacgccgatgcgatacattcggtgtgccacctgcaagcgggagaactatctgaccctcataccctgcgacagctgctgttccacgatgttctgctccgaggagtgcaagtcgattgccatgcaaacctatcaccgctacgagtgccccatcattgactttctgaaccgcatgttcaacaagatccactgtatcgcactgcgcaccacactggtcgcgctgaatatctttcccagcatcgaggagctaattgacttctgtgagcaggagcagaaccaggacaagtgcgcctttgacctcaactacaacgagctgacgccggaggagcactaccgggccatccatggactggtgacaaaccagcacctgcgctccgtctccgatctcttccagcgctccgtggtctgtgctgtgctcaagcacttcataatcgaatacacacccgtcaaggaatatttgggcggcgaagaaggcgtgaacttcttcacggacctcctgttccgacatctgcagacatctccctcgaatatgcacggcatcgacctggtcgagcaggttaacgagaccaaggacgaccagacgcactcgtctggggcgtacgccttcctctcgctcataaatcactcttgtgcgccgaatactgtaaggatatacgagggcaccaaggcgtacatgttcgtcctgcggcctattaaggcgggaaatgtgctctacgacaattacgggtaagtagtaaccaaagcattctgaccacaccactttagttcaagctaataggggtccaagtcactgcagctctcttcaaatactaaaactaatagatatccaactttttagtgctcacttcgccatctgcagcaaggagcagcgtttgaaaaggctgtccctgcagtaccgcttcgactgcaaatgcgagggctgcgagctgaactatcctatgttcggaatgatgccgcacaaggcgacggtgccatcggttaccgatgacacggaattggcactgagctcctacaactatgatttcgcggtgagcaactatcgaaagtactgcgacttcctcacgcaatacggtgacgactatccgtgcgagcagattagctccgcggaggagtgcctaaagatggccctgcatatcatggcggacgcagtgccgctcaaggcgaagatgtaatcggatcctgccgctgaaccaacccacacaaccaacacggacgaacttttcctttgctaactttaactggagacagcgtattacaagcgagacacaaatcaaggagagtaattgattatacatacatgttgttgccataagtctgtagcgcaggcagcagcgcgatggggagggagcatgcccttaacttttatatttgtaattgtacattttcgacctttgattatgttttaccccgcaccaagcccgcacaccacacccacacaacgcccagcacacccacacaacgcccagcacacccacacaacgcccagcacacccaccacacatttcacaacaattcgaaagttcaaaattctaaagtttatttattttttgatcacaacaatgtcttcgatgaaaacaaacaaacaaaggattattatgcaacctacgtcgtttttataattattttacaaaaaccaactgaagcagaaataaaatattttcaaaacgaagtgactttggcctcaaggcattttgctgtacaggtccagcaggttctggttcagcaaggatcctccccgggacatggacgtcgccaccttttccgaggacgatgccgatgtcgtgggctgcagctgtacaaactcgcagccagaggagctggccgctgtgtcattgaaaagcacattgccgaaggcctgctcgaactgctgctggaactggcgggcgttgatgggctgcagatcctcactttgcgccggatttatgttcagctgagcggccagctgatccatgctgttgggctcccgttgttggcgctcccgctggtcggcactcttcgcatagatattatcgccggctgactcaacgtattccgcgtagtaatcttgatccacgtccctgatgaaactaccgtccatggcctgaaagcccatgcgaatcaaaagcgatatctttgtgttaaagcactgcagccaggcccgattcgtctggtagatggacagctgcgcatcctcaccgctggcattccaaaagtccagcagcgtgtttttcgtgaagtcaatcagcatatgccgtttggcatccggatacaacctgttgatcgcctccaagtgccgaaatgtaatctccagcagatggtgctgatggcgggaaacgaaaagctgccacttgtagaccatagtcatcagattccacagcttggacatcgactgctcgtcgagtcgcatcaaggagcaggtggcaatgtcgttcagcataaacttgcaatgctcggcggtcaaaagctgcgcactattgtgtttcgatccgtttaggagcgagtctataaactttggttcgagcagcacagaagtcacatcgtggataactggtggaagatatatatatagtgtcttttaaatttgaatttgaatttgaattgaagcatatagctatgcagaagactc

SEQ ID NO: 18296 - DNA, 2469 bp, DROSOPHILA
cgcaggctatactccacactgcttccagcggaatcgtcaaaaaaataacattaaaatcgccgtgtgcataattagaatatttccgaatagtaatcgcccgtgaaatcgctaattagcggtcagcacttgcgccagttaaagaaatcgcggcaccggcagtgggccaaaagaacattttttccggctgaaaaaaacaggcggcggcgtcgacacgcggaccgaaccaaaggatccgaagccatccgatcagatctaatccgatccggagaaaattccaggacactaaggacttccgaaactaccccgcacaagagatggacgtgtacgacgtgagcgatgatctgataaagaagctgcaggactggaaactaatcggcatcatatccggcaagttcaacgagctgaaggagaaccatcgcaaggttgacttcgtgatgcgcgctcttattgacttcaagtacattgaaaagatattcctgaatgtaacgcttcgagaggacaagtgcaacaagcggagcgtggagttccgtatgctgggcaacgagcagttttcgctcaagaacaggaattacttccaggctctagagctgtacaacaaaagcatctgttatgccgaaccgaattcggagcacctgtccatcggctatgctaatcggtcggcggtactattcgagtggaagcgctatcggcaatgcctggacaatatcaagctggcaaggcaggccaactatccggcgagactgagccacaaactagacaagcgagaaagggactgccaacagctactcgatcagcaaccgccggatgtggtgccctatgagttcaagctcagtttcgaaccgcatgcccaggtgcccttcatcgccgactgtttggagttgcgcgaaaccgccgccgagggtcgctttgtggtgaccaatcgggatttggccgttggggatcttgtgtccgtggaggagcccttctgctccacactgctgacgccgatgcgatacattcggtgtgccacctgcaagcgggagaactatctgaccctcataccctgcgacagctgctgttccacgatgttctgctccgaggagtgcaagtcgattgccatgcaaacctatcaccgctacgagtgccccatcattgactttctgaaccgcatgttcaacaagatccactgtatcgcactgcgcaccacactggtcgcgctgaatatctttcccagcatcgaggagctaattgacttctgtgagcaggagcagaaccaggacaagtgcgcctttgacctcaactacaacgagctgacgccggaggagcactaccgggccatccatggactggtgacaaaccagcacctgcgctccgtctccgatctcttccagcgctccgtggtctgtgctgtgctcaagcacttcataatcgaatacacacccgtcaaggaatatttgggcggcgaagaaggcgtgaacttcttcacggacctcctgttccgacatctgcagacatctccctcgaatatgcacggcatcgacctggtcgagcaggttaacgagaccaaggacgaccagacgcactcgtctggggcgtacgccttcctctcgctcataaatcactcttgtgcgccgaatactgtaaggatatacgagggcaccaaggcgtacatgttcgtcctgcggcctattaaggcgggaaatgtgctctacgacaattacggtgctcacttcgccatctgcagcaaggagcagcgtttgaaaaggctgtccctgcagtaccgcttcgactgcaaatgcgagggctgcgagctgaactatcctatgttcggaatgatgccgcacaaggcgacggtgccatcggttaccgatgacacggaattggcactgagctcctacaactatgatttcgcggtgagcaactatcgaaagtactgcgacttcctcacgcaatacggtgacgactatccgtgcgagcagattagctccgcggaggagtgcctaaagatggccctgcatatcatggcggacgcagtgccgctcaaggcgaagatgtaatcggatcctgccgctgaaccaacccacacaaccaacacggacgaacttttcctttgctaactttaactggagacagcgtattacaagcgagacacaaatcaaggagagtaattgattatacatacatgttgttgccataagtctgtagcgcaggcagcagcgcgatggggagggagcatgcccttaacttttatatttgtaattgtacattttcgacctttgattatgttttaccccgcaccaagcccgcacaccacacccacacaacgcccagcacacccacacaacgcccagcacacccacacaacgcccagcacacccaccacacatttcacaacaattcgaaagttcaaaattctaaagtttatttattttttgatcacaacaatgtcttcgatgaaaacaaacaaacaaaggattattatgcaaccta

SEQ ID NO: 18297 - protein, 573 aa, DROSOPHILA
MDVYDVSDDLIKKLQDWKLIGIISGKFNELKENHRKVDFVMRALIDFKYIEKIFLNVTLREDKCNKRSVEFRMLGNEQFSLKNRNYFQALELYNKSICYAEPNSEHLSIGYANRSAVLFEWKRYRQCLDNIKLARQANYPARLSHKLDKRERDCQQLLDQQPPDVVPYEFKLSFEPHAQVPFIADCLELRETAAEGRFVVTNRDLAVGDLVSVEEPFCSTLLTPMRYIRCATCKRENYLTLIPCDSCCSTMFCSEECKSIAMQTYHRYECPIIDFLNRMFNKIHCIALRTTLVALNIFPSIEELIDFCEQEQNQDKCAFDLNYNELTPEEHYRAIHGLVTNQHLRSVSDLFQRSVVCAVLKHFIIEYTPVKEYLGGEEGVNFFTDLLFRHLQTSPSNMHGIDLVEQVNETKDDQTHSSGAYAFLSLINHSCAPNTVRIYEGTKAYMFVLRPIKAGNVLYDNYGAHFAICSKEQRLKRLSLQYRFDCKCEGCELNYPMFGMMPHKATVPSVTDDTELALSSYNYDFAVSNYRKYCDFLTQYGDDYPCEQISSAEECLKMALHIMADAVPLKAKM

SEQ ID NO: 18298 - DNA, 4927 bp, DROSOPHILA
ccacttctccattctgatgggtttcattggcagcttcactggcacaatgctcagctttatctggccttgctatttccacatcaagatcaaggggcatctgctcgatcagaaggaaatagccaaagactacctcatcattgggctcggcgtgctcttcggcgttattggtatctacgattcgggcaatgccctgataaatgcatttgaaatcggtcttccattttaaattgaatgtaaactatccaatcaaaagattcttatttatgatactcgactcatttgggcatggcatggtcttccagatgctttgtcatcaatttggctgtgtccaaaatgtcgaggatcgagttaaataaatatcatacatgcgaaacgaaattataaaacaataatgttagtctgtaagaaacgaaacgcaagtcttccaaacaagcgaaaaaatgtcttccaaacaaaagtaatattgatatatgatatacacaataaataagttaagagaaacgatgaatatataaaagtatacctaagtatgtacgaatatgagaaaaagagaaatatttattgtgttaatatgcattataagatatagacaaattgaacagagtaaaacgataaactgcaaatgtacatcattatacaaatgaaaaacaaagtgtatgagtatgttatagatagaactcattgtttatatatagccgaacggatttttttaacgtttaaatatacagttacctttacatactagcccttaaaacgacactagcatcttttaaactctcaataaagacatcatctccagttgatcctaaaagaaaaccccattcttttggtgcaaagaaagtgaaagacgtcgatttaagaatgttgtctttattgttaatattcattttcggattggtttgtatattttataaaacgtatattgtcatggaagcttatgataacattaatatgggttttctgtattagtaaagcaaaggatatgtataatatactcgtagtcgggctgtgttagtttgaggtcttgaagaacttatgttcttgagtacttcttgtatgttggaatgcaccttgtttaatcttatgcacagcacacgtcgtttttggggcagttatatattcgctcttgtacaaactggagccggtaaacttttcattgcccagactaattgaggactgatttcctcgacgggttaccacacgctcggcgccatggccatgggcactgtaggaggggaaatcgatgccaccgcccaagctggacacctgctgatttcctcctcgatgtcggctggtatggcttccggtgtgggaatgtgattgagacgaaaaatcaatgccgccaccacccgaaacatggctgcgtgtcaccgttgatcgttcggcattcgaaccgctggttccaccagaaatgatgcgggtcattgaggatgagttcttcacagtctgctccctgttctctttgtgcacgttgcacgtacgacgctcggtcgaaaaagttgcatttgcgtcagagtctcgattttggcgatggatgctgctgtaactctgacgctcgccaccataggtggtggtgctcgatggctgctcgtgtagattcagtatgctcttgcgctgcatcttgccattggacgtcaggctgccattggctgtattcgaatcggtggttacgttcttgcgatggaagaccgtattggagacgtcggcttctgacgagaattcgctctttcgatgatggaaatgctttgaagtggtcatgtgcgaggatgtgctaccagtcacaatattgttggcagaacttctaccccctgagacggttcgcgatgttgaatcttcgctgatgttatgtccaactgtgcttccagacagaacccggcttgttgtatcgccggtaatgttattggcggccgatcttccggatacaacacgagtggtggtttcgccaaatgcatcactcgatacgtttctgccagacatcacgcgtgaagtcgaattctcagttatattagacgtaacatttctgccagaaattacgcgagacgatgtttcacccgttacgttattagagactgagccaccggaaataacttttgagcttatgtcgccagtgttcttgtcggttaaatgactacgattagattcaatagcggtactggatacatccgtacccgtaataatttccgtacctttaatgaccttttgatttctttgcaaggacgtggattccttatggatgttttgagtgttttcgatatttgtcgttgtggtatttttcgcaacattttctattacgtttatcttagcgggcctcttgacatactcggtttctggttccttcttatgacgccctcctatgacagtagttacctttgttgtagatacaacaatgagaccatcaaccggattttggccattcgaatcgacttgtttgacagcgtccttgccagaaacatagttcatctgatttgttgtttttcggattgttgtgtcacttcccaaagtaatagatgaactattgtggttaattttttgagtacgttgtactttgtcaaccgttgtgttcgccgtagatttataatcatttcttctggtcactgtcatagacccttctagcttaagattgtcaacaggacgttttggcgtttctctcttaatggtttctgtaaccatcttgctatcggtctcgcttcggtctgttctcttataaaattctccttccggcttaagattgtcttttggtttcttttgaactggtcgctcggcgggtgtaaaggaagttttattgggtgtatagaattcaccttcgacttttaggttatcacttggctttacttgttccggtcgtttaacatgatggtattcttccttctgggtgaatgtcatttcgccctcggttcttaaattatcttttctaataaccgtcttcaccttatcggcaggccggtacccatccttttcgggaatgtgcatcttaccctcaggtttcaagttgtcggcatacttcttctgctctggacgggaagcgggctcatatttcggtttttccggggtatacataacaccttctggtttcaaattgtctttaggcttaaccggctcggggcgttcaccatttgtatgaacgggcttttcaggtacgtaaagttttccagaggtccgcaggttatcttctggcttcactggggtgggtctaacaacattatggtactcagttttttccgtgaaagtcatttctccttcactacgaaggttgtccttatgaataactcttgtcaccttatcggcaggcttatatttgcccttttccggtataaccatttcgccctctggttttaagttatcatgaggttttttctgtttaggcctttcagctggtttaaagacctctttttcttgaacgtagaattctccttccaccttcaagttatctttctgccttacaacagttactcgatcggctggttgatattttggtcgatcgggagtaaagaactcgccttcagtctttagattatcaacgggtttcttaggtaccggtcggtctccggccttatatcctggcttttctggagcaaagaatttcccttcgggtctcaaattatcctcaggtcgaacttgcgttggacgttctccaggcctgtaaggttgcttttctggactgtaaaagtctccttccggccgtaagttgtcctctggtttcttttgctctggcctctcagcggtcctgaatcctggcttttccggagtgtagaattcaccttctggtcggagattatcttctggcctaacctgggaaggtctttcgccgggcttgtacttgggtttctcgggactgtagaattctccctcaggcttaagattgtccaatggtttaacctggtcaggtcgtaccacatattgatattcttccctctctataaaagtcatttctccttccgtacgaagattatctttccgaataattctttccgttttatcggccggcctgtaaacttgtttctcaggcttcacgaattcgccttccggctttaagttgtcctgtggttttttctgtactggtctttcagctggcctgaatcctggcttttccggagtatagaattcaccttctggtcggagattatcttctggtctaacttgggaaggtctttcgccgggcttgtacttaggtttctccggactgtagaattcgccctcggggtttcaagttgtcctctggtttcttttgctctggcctctcagcgggcctgaatcctggcttttccggtgtgtagaattcaccctctggcctcagattatcttctggtctaacttgggagggtctttcgccgggcttgtacttgggtttctcgggactgtagaattctccctcaggcttaagattgtccaatggtttaacctgatcaggtcggtaccacatattgatattcttccctctctacaaacgtcatttctccttccgtacgaagattatctttccgaataattctttccgttttatcggccggcctgtaaacttgtttctcaggcttcacgaattcgccttccggctttaagttgtcctgtggttttttctgtactggtctttcagctggcctgaatcctggcttttccggtgtgtagaattcaccttctggtcggagattatcttctggcctaacctgggaaggtctttcgccgggcttgtacttgggtttctcgggactgtagaattcgccctcgggtttcaggttgtcctgtggtttcttttgctctggcctctcagctggcctgaatcctggcttttccggtgtgtagaattcaccctctggcctcagattatcttctggtctaacttgggaaggtctttcgccgggcttgtacttaggtttctccggactgtagaattctccctcgggtttcaggttgtcctctggtttcttttgct

SEQ ID NO: 18299 - DNA, 2927 bp, DROSOPHILA
atgacttttatagagagggaagaatatcaatatgtggtacgacctgaccaggttaaaccattggacaatcttaagcctgagggagaattctacagtcccgagaaacccaagtacaagcccggcgaaagaccttcccaggttaggccagaagataatctccgaccagaaggtgaattctacactccggaaaagccaggattcaggaccgctgagaggccagagcaaaagaaaccagaggacaacttacggccggaaggagacttttacagtccagaaaagcaaccttacaggcctggagaacgtccaacgcaagttcgacctgaggataatttgagacccgaagggaaattctttgctccagaaaagccaggatataaggccggagaccgaccggtacctaagaaacccgttgataatctaaagactgaaggcgagttctttactcccgatcgaccaaaatatcaaccagccgatcgagtaactgttgtaaggcagaaagataacttgaaggtggaaggagaattctacgttcaagaaaaagaggtctttaaaccagctgaaaggcctaaacagaaaaaacctcatgataacttaaaaccagagggcgaaatggttataccggaaaagggcaaatataagcctgccgataaggtgacaagagttattcataaggacaaccttcgtagtgaaggagaaatgactttcacggaaaaaactgagtaccataatgttgttagacccaccccagtgaagccagaagataacctgcggacctctggaaaactttacgtacctgaaaagcccgttcatacaaatggtgaacgccccgagccggttaagcctaaagacaatttgaaaccagaaggtgttatgtataccccggaaaaaccgaaatatgagcccgcttcccgtccagagcagaagaagtatgccgacaacttgaaacctgagggtaagatgcacattcccgaaaaggatgggtaccggcctgccgataaggtgaagacggttattagaaaagataatttaagaaccgagggcgaaatgacattcacccagaaggaagaataccatcatgttaaacgaccggaacaagtaaagccaagtgataacctaaaagtcgaaggtgaattctatacacccaataaaacttcctttacacccgccgagcgaccagttcaaaagaaaccaaaagacaatcttaagccggaaggagaattttataagagaacagaccgaagcgagaccgatagcaagatggttacagaaaccattaagagagaaacgccaaaacgtcctgttgacaatcttaagctagaagggtctatgacagtgaccagaagaaatgattataaatctacggcgaacacaacggttgacaaagtacaacgtactcaaaaaattaaccacaatagttcatctattactttgggaagtgacacaacaatccgaaaaacaacaaatcagatgaactatgtttctggcaaggacgctgtcaaacaagtcgattcgaatggccaaaatccggttgatggtctcattgttgtatctacaacaaaggtaactactgtcataggagggcgtcataagaaggaaccagaaaccgagtatgtcaagaggcccgctaagataaacgtaatagaaaatgttgcgaaaaataccacaacgacaaatatcgaaaacactcaaaacatccataaggaatccacgtccttgcaaagaaatcaaaaggtcattaaaggtacggaaattattacgggtacggatgtatccagtaccgctattgaatctaatcgtagtcatttaaccgacaagaacactggcgacataagctcaaaagttatttccggtggctcagtctctaataacgtaacgggtgaaacatcgtctcgcgtaatttctggcagaaatgttacgtctaatataactgagaattcgacttcacgcgtgatgtctggcagaaacgtatcgagtgatgcatttggcgaaaccaccactcgtgttgtatccggaagatcggccgccaataacattaccggcgatacaacaagccgggttctgtctggaagcacagttggacataacatcagcgaagattcaacatcgcgaaccgtctcagggggtagaagttctgccaacaatattgtgactggtagcacatcctcgcacatgaccacttcaaagcatttccatcatcgaaagagcgaattctcgtcagaagccgacgtctccaatacggtcttccatcgcaagaacgtaaccaccgattcgaatacagccaatggcagcctgacgtccaatggcaagatgcagcgcaagagcatactgaatctacacgagcagccatcgagcaccaccacctatggtggcgagcgtcagagttacagcagcatccatcgccaaaatcgagactctgacgcaaatgcaactttttcgaccgagcgtcgtacgtgcaacgtgcacaaagagaacagggagcagactgtgaagaactcatcctcaatgacccgcatcatttctggtggaaccagcggttcgaatgccgaacgatcaacggtgacacgcagccatgtttcgggtggtggcggcattgatttttcgtctcaatcacattcccacaccggaagccataccagccgacatcgaggaggaaatcagcaggtgtccagcttgggcggtggcatcgatttcccctcctacagtgcccatggccatggcgccgagcgtgtggtaacccgtcgaggaaatcagtcctcaattagtctgggcaatgaaaagtttaccggctccagtttgtacaagagcgaatatataactgccccaaaaacgacgtgtgctgtgcataagattaaacaaggtgcattccaacatacaagaagtactcaagaacataagttcttcaagacctcaaactaacacagcccgac

SEQ ID NO: 18300 - protein, 971 aa, DROSOPHILA
MTFIEREEYQYVVRPDQVKPLDNLKPEGEFYSPEKPKYKPGERPSQVRPEDNLRPEGEFYTPEKPGFRTAERPEQKKPEDNLRPEGDFYSPEKQPYRPGERPTQVRPEDNLRPEGKFFAPEKPGYKAGDRPVPKKPVDNLKTEGEFFTPDRPKYQPADRVTVVRQKDNLKVEGEFYVQEKEVFKPAERPKQKKPHDNLKPEGEMVIPEKGKYKPADKVTRVIHKDNLRSEGEMTFTEKTEYHNVVRPTPVKPEDNLRTSGKLYVPEKPVHTNGERPEPVKPKDNLKPEGVMYTPEKPKYEPASRPEQKKYADNLKPEGKMHIPEKDGYRPADKVKTVIRKDNLRTEGEMTFTQKEEYHHVKRPEQVKPSDNLKVEGEFYTPNKTSFTPAERPVQKKPKDNLKPEGEFYKRTDRSETDSKMVTETIKRETPKRPVDNLKLEGSMTVTRRNDYKSTANTTVDKVQRTQKINHNSSSITLGSDTTIRKTTNQMNYVSGKDAVKQVDSNGQNPVDGLIVVSTTKVTTVIGGRHKKEPETEYVKRPAKINVIENVAKNTTTTNIENTQNIHKESTSLQRNQKVIKGTEIITGTDVSSTAIESNRSHLTDKNTGDISSKVISGGSVSNNVTGETSSRVISGRNVTSNITENSTSRVMSGRNVSSDAFGETTTRVVSGRSAANNITGDTTSRVLSGSTVGHNISEDSTSRTVSGGRSSANNIVTGSTSSHMTTSKHFHHRKSEFSSEADVSNTVFHRKNVTTDSNTANGSLTSNGKMQRKSILNLHEQPSSTTTYGGERQSYSSIHRQNRDSDANATFSTERRTCNVHKENREQTVKNSSSMTRIISGGTSGSNAERSTVTRSHVSGGGGIDFSSQSHSHTGSHTSRHRGGNQQVSSLGGGIDFPSYSAHGHGAERVVTRRGNQSSISLGNEKFTGSSLYKSEYITAPKTTCAVHKIKQGAFQHTRSTQEHKFFKTSN

SEQ ID NO: 18301 - DNA, 2968 bp, DROSOPHILA
ccggcgggcgcaggcgcttcgcaggaagcttttgatgtaaacattgcaactatgacctttgtacatgtgaatgtacgtgcatccgcttgtctcgctcaatataatcgtccttcttttctctgaatatgatgtgtaattggtcggcatcgaaactttgacttcatactgcactcatttcgatattaacccctattttagatgtccttgtccataggcttgcgtgtccacatcgacatcactaatttcacgctgtccattgtaatctattttaaaaacaagctgaaaagtcacggaggcgtgcaggtccgaccttttaatgtacgcgaaagtacatatactgtgaaagctctccggacggacagctgcaatggttctctcgacttctctcgctctgatgaccgtcttatcctttttgccggacaaagaaactgaaacctacgcagtccgcccatggtatctagtttcatttcatctgcgagtacagatactttcaggcggacgagaggttcaagtggggttacgtcaaggtgcatgagactagaaatgagacttaggacagtcacttactgattgctgatatgattacttaatcataaataaattggtataaacaaaaactattatcatgtcattgtttttaaatacaaatgccttataaagttaaattgagaatacaagaaatgtagttatattttttttataggggattcccgaacaagcatttgtaattttttccccatagatagtagttggagattatttcggattttgaaaagataaggagatcgtttaaaagtatataacaaatatatatatataaaagtaaaaactatcgatgtcccgtcacgacgaatcgatagtaccaggaccatcgctgttttccgccagcactagtaacctctcatccctaagtattgtttttttacttttatgagcatctaattgtaccgacttaagtaaaataattaattaaacaaaacctaactgaaacgtgggaacaatggtgaatgactctggtctatcgacagtggacgacttggagcaaaaactgaattcggccaagcagtcgctggtgatcctaaatgaaaacattcgccgcattgctggtcgcgtccccaaggaatccctgcagaggtatgaatccaagttgtgcttaatttaattaattacttaatgccgctgcatttcagatcggaaaaattcaaatacacccaagatggcaagaagaacgagcacaatggggaccgaccgttcccccgaaatgcaacacccggtggggtcttcaaagacaagcggcgaatgtacgaaagcaagaatccaatttcccgtttcccaatcgaagaaaacgagggtcgtccgccacggattaactcgcgggtcatccgggagatgccaactaaaaaggagattgtcgaggcacagggcacagactctgagtcgagggccaggaatcgcaggatgttcggatcgctgttgggaaccctacagaagttctgtcaggaggaatcgcgactgaagagcaaggaggataaaaaggctgagatcgataggaaggtggaaaagcaggaactgcaggaaagagcgatgctgaggaaacagcgtgaaacactattcttagataggaaaaaaaagcaattcgagatccgtagattagagtacaaaatggccagaatgaaggacttcaaggtctgggaagcaactatgttgaatgcgaaaaataacatccgaacaaaaacgaaaccacatctgttctttaggccaaaagtgcattcgcctagaacggaaaaattgttgagcaaaagcaaaagtgaagctgatgtgtttatagaattccggcgcgaagaattggaagttgagcttaaaaacttggagaacatgaactttgggaagatggaagacgatactgcaatagacgaaagtttctatgaagagcctgacgacgaagagcagttggataagtgtaagtaaacttcagtttgcactagggcttgaaatatgatcgtgcggatatcgctgtgtagggcaattgggtttcaatttataaaacttatttatgaaactttaatttataatacaaaaaccagatcttaagcaaataaattacaatgcggtgattacatttaaaagttatatcgtatttatcaactcaaatacctttgtttcaatgttctacttcctgtttttattgcagctttattatacgttaagtaaagtacccaaaagtaaatgatgctattctaggaataaaggattacaactaatgcaatttaacaaattatttgcaaaagcaattgttttacttcaccgaatgaaggggtgtttaagaacatcaatttgtggacaaaaccagttattctttattgccattatttatgtcctactagaaataaaacttggaaaaaaaaaattgtttactgcaagcaagctatatttgtatctttcaaaagaatttgtaaaattgtaaataaaactaaaaaatattttacacgcaagatattggatcgcgaaataggaacattaaatacctaattatgtatttatagatataatcatcctgaagctaaatcacatattttattctcgcttccaaattgtttgaggaagtaactaatttaaaatgaggcgttaaaacaattataattctttaagcgataagttaagaactcttataagataattataccttcttcgccgtctattaacattattaattaagaccagtagtcagaagcaattaatgaaaaaataatatgttaacctctgattcttgtactgtattcgtgtaaaaaaagaacattgtttttctgaaaataaaatgagagcattgacatccgccatatacagtagaaaaatacaaatttgatgaatacgattgttatacacgtacattttattgaaatttaggtgatttgaagtggaaccgaatttttgtatttatccgtagaatgtatgaatcattgttctttac

SEQ ID NO: 18302 - DNA, 912 bp, DROSOPHILA
atggtgaatgactctggtctatcgacagtggacgacttggagcaaaaactgaattcggccaagcagtcgctggtgatcctaaatgaaaacattcgccgcattgctggtcgcgtccccaaggaatccctgcagagatcggaaaaattcaaatacacccaagatggcaagaagaacgagcacaatggggaccgaccgttcccccgaaatgcaacacccggtggggtcttcaaagacaagcggcgaatgtacgaaagcaagaatccaatttcccgtttcccaatcgaagaaaacgagggtcgtccgccacggattaactcgcgggtcatccgggagatgccaactaaaaaggagattgtcgaggcacagggcacagactctgagtcgagggccaggaatcgcaggatgttcggatcgctgttgggaaccctacagaagttctgtcaggaggaatcgcgactgaagagcaaggaggataaaaaggctgagatcgataggaaggtggaaaagcaggaactgcaggaaagagcgatgctgaggaaacagcgtgaaacactattcttagataggaaaaaaaagcaattcgagatccgtagattagagtacaaaatggccagaatgaaggacttcaaggtctgggaagcaactatgttgaatgcgaaaaataacatccgaacaaaaacgaaaccacatctgttctttaggccaaaagtgcattcgcctagaacggaaaaattgttgagcaaaagcaaaagtgaagctgatgtgtttatagaattccggcgcgaagaattggaagttgagcttaaaaacttggagaacatgaactttgggaagatggaagacgatactgcaatagacgaaagtttctatgaagagcctgacgacgaagagcagttggataagtgtaagtaa

SEQ ID NO: 18303 - protein, 303 aa, DROSOPHILA
MVNDSGLSTVDDLEQKLNSAKQSLVILNENIRRIAGRVPKESLQRSEKFKYTQDGKKNEHNGDRPFPRNATPGGVFKDKRRMYESKNPISRFPIEENEGRPPRINSRVIREMPTKKEIVEAQGTDSESRARNRRMFGSLLGTLQKFCQEESRLKSKEDKKAEIDRKVEKQELQERAMLRKQRETLFLDRKKKQFEIRRLEYKMARMKDFKVWEATMLNAKNNIRTKTKPHLFFRPKVHSPRTEKLLSKSKSEADVFIEFRREELEVELKNLENMNFGKMEDDTAIDESFYEEPDDEEQLDKCK

SEQ ID NO: 18304 - DNA, 2550 bp, DROSOPHILA
tgctgtggacgtcgaactgctggcgcgtccttgagtttccttggccttggcgctgctgctgggtcgatccttcttggaggcggctgacttctcctacggaccgaaacgagatgtaaaggaaatcctagcaagcacaactgtacttggcatcgcattgtacttcacttacctcatccttgcggctcgcctcgtactgctggataagatcctggcagtcgagattgttctccggctcccacgtgttctcagtttcgggatagcccttccatttcagatagtactccacctgcaggtggaaaatggcgttttaggaccaaatataatgggacgtctggttcggaaaactcacctttcccttgcgcacccgcctgtcgatgatcttttccacggcgtactcctcctcctcctcttcggcatcggaaacctttgccgagctctcagggttgtcgattttcttgcccattttgtttttattaaaatacttcacacgacaaaaaataaggaaagaattagcacaaccgcacacaaccgcacacacacgcaaagtacgaaaggaaagtacgatttttagtcgactctctttgctttcatggctcacctagattaaataagatctacactttatgcacgcagctaaattggtttttataagcctgtgtgttggcgctagaagactttccacaaaatgaaaaatctgcaaaaaaatgcgcgttctaaaatgacgccggccgaacagtgtgcgaaagtacgcgtggactgctaagactacgcttatctattttccgatagatttgcacatcgtattaatttcattttaagtctagaaaaatgttaacactaagaactatctaaattttacaacataactataataataacgtaactaactgatcgccaatatctgtttttaaaaattttgtaataaatcgatgaatcgattaaggaatccgttgtaccacaactattatcgacgcgtttcacagcactgaataagttgcgcgaatattcacgaattttttgacaatttgcgttttgtttcttctgttttacggaaattctataaaaatgcccaaaacaaagaagaaggattcgtcctcagatagcgatagcggtccagatgatgtaagttaactagaaatacaccaaaactaggtataacaagttaaaacctctttcagcgtatcaagccggcaagcaagaaggcgaaggaatctgatgctccaaattcagatccaaaagattcgggcgaaaatggtgctacatcttggaccctggaaggacttcgccaggtgcgaatcaacgagttccgcggtcgcaaatcggtggacattcgagagttctacgataagggcggccaaattcttcccggcaagaagggcatctccctatctttaattcaatggaagaaactccttgaagtggccgaagaagtcacccgcgcgatcgagaattaattgaagttcatccacatgccaaactaagtcgtagccatatgtactaactatagacatatccactgaataaacgttatcttaaacactagtaattgaaaatctgtattttcacagttgctgaagcattaatgaatgaccaacttaattgcctgataggtattttccttatctgctttgtggtgggactacaaaaagcacacatatacataaatgaatgaatcctttattggacgtcatatgtacatagatttgtacattgatagcatttgatatagatatgaatattaaaaatagatgcccagaatggtgaagatggacaggagaatggcaaacggcagccaggtcttaataaaaccccctattccgacgtagcggccgcagacaaagagccacatgctgaggataatcatgttccatgcggtgctgtcgtagtagcgcatgtagatgagtgccgttgccacatgcgagtggcagttgtcacagaagatattgtggatgcgggtgccgtagagcacagatgctttggagaccgcctcgtcccaggcgtaactgccgcccaccatgtgcttggggtgcaaccttatgtaccgggtgggtcttccaaaggccatgttgtcctctgatacgaagtaggggccggcgaagtcacgaatcacaccggacgaagtgcaaatgcccatatgtccgatcatgggcatcagccaggtgagaaccggaatgggagtccaaacgatgcagtaggggaagcgttggtcctttacgttgatcggaggcagtctatccggaacgccattgccggctcctcctccggaactggccatcgagatctgaacgtcctcggactgttgccgctgcggacttgggtttgtcgacattattacactgtattaggttgatatttgtgcggggaagccacaagaacagtcactcacggtcttcccggccgtaatgcccatgaaacgagtcgctaacaattccaattgggctttaattgtacgataaggagaaaataaagcagtcgcagttcactcacatctacctcagtatttattgacatggagattgacagtgttggaaagcattgctgtatggcaga

SEQ ID NO: 18305 - DNA, 494 bp, DROSOPHILA
gaatattcacgaattttttgacaatttgcgttttgtttcttctgttttacggaaattctataaaaatgcccaaaacaaagaagaaggattcgtcctcagatagcgatagcggtccagatgatcgtatcaagccggcaagcaagaaggcgaaggaatctgatgctccaaattcagatccaaaagattcgggcgaaaatggtgctacatcttggaccctggaaggacttcgccaggtgcgaatcaacgagttccgcggtcgcaaatcggtggacattcgagagttctacgataagggcggccaaattcttcccggcaagaagggcatctccctatctttaattcaatggaagaaactccttgaagtggccgaagaagtcacccgcgcgatcgagaattaattgaagttcatccacatgccaaactaagtcgtagccatatgtactaactatagacatatccactgaataaacgttatcttaaacactagtaattga

SEQ ID NO: 18306 - protein, 110 aa, DROSOPHILA
MPKTKKKDSSSDSDSGPDDRIKPASKKAKESDAPNSDPKDSGENGATSWTLEGLRQVRINEFRGRKSVDIREFYDKGGQILPGKKGISLSLIQWKKLLEVAEEVTRAIEN

SEQ ID NO: 18307 - DNA, 3722 bp, DROSOPHILA
gggcgtcggagtcggagtcggtgagatgctcttcgagcagcagcagcgcaaagatgatgagattagcaacattctggcaggagtgcgcaagacctgctacagcaattgactctgatcagacgacatttgtaatatttcgagcatagagttttagagagtggtttaggtagtcttaagattgctttccgcacccacaatgttcttccagccccttccccataaaacctagtagtagaaccacccattgaattgtacaattattagaactgcatagatacgatacaaaacaaaaataagagacataacgaaataaagtaattcctaagtaatcgaaacgcataatcgatttcaatgtcaatgtggaacgcatcctcccagtgacagcttctttgggggtggaacgcggatggaccgtgaccatatgacactgacacagccacccgatatatacacgaccggatcctgcgcactgccagttccatcaggttggagtgcaaagattttcttttcctattcgcacggccacggattttccacgttacataaatttcgaaagcatttttcaactattttccgcatcggtaacgacagtttcagctcgctttttcaaactggacttcgagattcgagtgagcaaggatgtgcaagtatccgagaatcgcatgattaacgcgctccattcgcacaagggcgccaagttgtcgcaatcaaaggcgaaaatctgagtcaaaattcagttttattttctagattgttaatccccatgtgacgacagtagttaagaaattcgaataccattgcggaatctggaggccaacgaaattgttaaagaaaattctaataaaatcgatatacttcgcacgccttcttgacaccaccgcagccgccgccatcaggccaagaccacccccacctccaacactactaccaccaccatcgccatcgccatcgccataagccatttcagcatcatcagggccgttagtagccagcatcaaacatgtcattcatagccaaattgaaagccacgccattgccgccactgagaaacatactcaatgtggccgtgcaaacggcccgacagcaaattccagaacgcaaagactacgagcaaccgccgggtagcaccgcccagcagcaccaccacagccagcaggcccagcacaaggccatggaggcgggcatggatggcggagacaccaccgagatgagttcgaatccattccggaacgccggtagctggacaaacgatggcgagggcggtggcgatggcgatggcgagtataggaacgagtaccagagcacatccttcaatgagtacgacggcaggtatcagcaaacggacggctttaggtgggtcattctcattatggaaatagaactaagactgttgtgctaaactcattccaaatccatcttccgcaggcaaggtagcatcgcctccgagggaagctcatttgtttgcgagggagaaggtggcggcggctgcaaaatcgacgaattccaagcggcctggaacgtgaccaatgccattcagggcatgttcatcgtatcgctgccgtttgccgtcctccatggcggctattgggccatcgtggccatggtgggaatagcacacatctgctgctatacgggcaaggtcctggtgcagtgtctatacgaaccggatccggcaacgggacaaatggtgcgagtgcgcgatagttatgtggccatagccaaggtatgttttggtccaaaattgggcgcccgggcagtcagcattgcccagcttatcgagcttctgatgacctgcatcctgtacgtggtggtgtgcggcgatctattggccggaacgtatccacagggctcgttcgactcgcgatcctggatgctattcgtgggcatattcctgctgcccatgggattccttaagtcactgaaaatggtatcaacgctctcgttctggtgcacaatgtcgcacatcgtgataaacgccgtgatactgggctattgcctgctgcagattggcgattggggttggtccaaggttcgatttagcatcgacatggagaactttccgatctcactgggcgtcatcgtcttctcgtacacctcccagatctttctgcccacgctcgagggcaacatgatcgatcgctccaaattcaactggatgctggactggtctcacatagcggctgctgtgtttaaggccggattcgggtatatctgctttctgaccttccagaacgatacacagcaggtgattaccaacaatctgcactcgcagggctttaagggcatggtgaacttcttcctggtcatcaaggcccttctgagctaccccttgccctactatgctgcctgtgagctgctcgaacgcaacttctttagaggtccgccaaagaccaaatttccaaccatctggaatctggacggggaactgaaggtttggggtctgggcttccgtgtcggcgtcattgtatccaccatactgatggccattttcattccccacttctccattctgatgggtttcattggcagcttcactggcacaatgctcagctttatctggccttgctatttccacatcaagatcaaggggcatctgctcgatcagaaggaaatagccaaagactacctcatcattgggctcggcgtgctcttcggcgttattggtatctacgattcgggcaatgccctgataaatgcatttgaaatcggtcttccattttaaattgaatgtaaactatccaatcaaaagattcttatttatgatactcgactcatttgggcatggcatggtcttccagatgctttgtcatcaatttggctgtgtccaaaatgtcgaggatcgagttaaataaatatcatacatgcgaaacgaaattataaaacaataatgttagtctgtaagaaacgaaacgcaagtcttccaaacaagcgaaaaaatgtcttccaaacaaaagtaatattgatatatgatatacacaataaataagttaagagaaacgatgaatatataaaagtatacctaagtatgtacgaatatgagaaaaagagaaatatttattgtgttaatatgcattataagatatagacaaattgaacagagtaaaacgataaactgcaaatgtacatcattatacaaatgaaaaacaaagtgtatgagtatgttatagatagaactcattgtttatatatagccgaacggatttttttaacgtttaaatatacagttacctttacatactagcccttaaaacgacactagcatcttttaaactctcaataaagacatcatctccagttgatcctaaaagaaaaccccattcttttggtgcaaagaaagtgaaagacgtcgatttaagaatgttgtctttattgttaatattcattttcggattggtttgtatattttataaaacgtatattgtcatggaagcttatgataacattaatatgggttttctgtattagtaaagcaaaggatatgtataatatactcgtagtcgggctgtgttagtttgaggtcttgaagaacttatgttcttgagtacttcttgtatgttggaatgcaccttgtttaatcttatgcacagcacacgtcgtttttggggcagttatatattcgctcttgtacaaactggagccggtaaacttttcattgcccagactaattgaggactgatttcctcgacgggttaccacacgctcggcgccatggccatgggcac

SEQ ID NO: 18308 - DNA, 1650 bp, DROSOPHILA
atgtcattcatagccaaattgaaagccacgccattgccgccactgagaaacatactcaatgtggccgtgcaaacggcccgacagcaaattccagaacgcaaagactacgagcaaccgccgggtagcaccgcccagcagcaccaccacagccagcaggcccagcacaaggccatggaggcgggcatggatggcggagacaccaccgagatgagttcgaatccattccggaacgccggtagctggacaaacgatggcgagggcggtggcgatggcgatggcgagtataggaacgagtaccagagcacatccttcaatgagtacgacggcaggtatcagcaaacggacggctttaggcaaggtagcatcgcctccgagggaagctcatttgtttgcgagggagaaggtggcggcggctgcaaaatcgacgaattccaagcggcctggaacgtgaccaatgccattcagggcatgttcatcgtatcgctgccgtttgccgtcctccatggcggctattgggccatcgtggccatggtgggaatagcacacatctgctgctatacgggcaaggtcctggtgcagtgtctatacgaaccggatccggcaacgggacaaatggtgcgagtgcgcgatagttatgtggccatagccaaggtatgttttggtccaaaattgggcgcccgggcagtcagcattgcccagcttatcgagcttctgatgacctgcatcctgtacgtggtggtgtgcggcgatctattggccggaacgtatccacagggctcgttcgactcgcgatcctggatgctattcgtgggcatattcctgctgcccatgggattccttaagtcactgaaaatggtatcaacgctctcgttctggtgcacaatgtcgcacatcgtgataaacgccgtgatactgggctattgcctgctgcagattggcgattggggttggtccaaggttcgatttagcatcgacatggagaactttccgatctcactgggcgtcatcgtcttctcgtacacctcccagatctttctgcccacgctcgagggcaacatgatcgatcgctccaaattcaactggatgctggactggtctcacatagcggctgctgtgtttaaggccggattcgggtatatctgctttctgaccttccagaacgatacacagcaggtgattaccaacaatctgcactcgcagggctttaagggcatggtgaacttcttcctggtcatcaaggcccttctgagctaccccttgccctactatgctgcctgtgagctgctcgaacgcaacttctttagaggtccgccaaagaccaaatttccaaccatctggaatctggacggggaactgaaggtttggggtctgggcttccgtgtcggcgtcattgtatccaccatactgatggccattttcattccccacttctccattctgatgggtttcattggcagcttcactggcacaatgctcagctttatctggccttgctatttccacatcaagatcaaggggcatctgctcgatcagaaggaaatagccaaagactacctcatcattgggctcggcgtgctcttcggcgttattggtatctacgattcgggcaatgccctgataaatgcatttgaaatcggtcttccattttaa

SEQ ID NO: 18309 - protein, 549 aa, DROSOPHILA
MSFIAKLKATPLPPLRNILNVAVQTARQQIPERKDYEQPPGSTAQQHHHSQQAQHKAMEAGMDGGDTTEMSSNPFRNAGSWTNDGEGGGDGDGEYRNEYQSTSFNEYDGRYQQTDGFRQGSIASEGSSFVCEGEGGGGCKIDEFQAAWNVTNAIQGMFIVSLPFAVLHGGYWAIVAMVGIAHICCYTGKVLVQCLYEPDPATGQMVRVRDSYVAIAKVCFGPKLGARAVSIAQLIELLMTCILYVVVCGDLLAGTYPQGSFDSRSWMLFVGIFLLPMGFLKSLKMVSTLSFWCTMSHIVINAVILGYCLLQIGDWGWSKVRFSIDMENFPISLGVIVFSYTSQIFLPTLEGNMIDRSKFNWMLDWSHIAAAVFKAGFGYICFLTFQNDTQQVITNNLHSQGFKGMVNFFLVIKALLSYPLPYYAACELLERNFFRGPPKTKFPTIWNLDGELKVWGLGFRVGVIVSTILMAIFIPHFSILMGFIGSFTGTMLSFIWPCYFHIKIKGHLLDQKEIAKDYLIIGLGVLFGVIGIYDSGNALINAFEIGLPF

SEQ ID NO: 18310 - DNA, 4470 bp, DROSOPHILA
aagctcattgatgatcttctcccccaccttcgcgtcgatctcactgatcttctcctgcagcttgcatttgaactcgatcggccacttggggctccattcacggaacagcttaatctgcggacaatgaaccatgagaaggggcaaaaccgagcaggaaactttctactacttacgcggcattggaacaggctcatgggcttgtcctgcactgctgcgttggccagcgagttgaccaatccattcacctggccatcgctggcgccagaactggatccccgggccaggtactccacgaaaacgtagacaaagtcatcccgctgcagttcactccactcgttgaaccactgaattatgtagcggaactcgccgtctattgataaattgctcatcgacatcccgcctccgtttgtttatattgctctttcccaacgcccccgcagttgctctgcctggctttcagtggatttagcgatgcgctggcacggattcggagactcgaaaaacagttcgctacgatgcggctgcaagtcaagactgctggcttaactgctgagcgttgagctctaaagttgctagtaaaagtaaaacccgtttccgcttcaaattttttttcaacaggctcggcttgtgcaatctagagatgcgcaaccaggagaatgttcttcacgataggcacgaaaattcttacaaagcttattatgctaatatggcttaaaaaatatacgagtgccatcttacacttactagatgctacttagatatcatgtaaactgtgtgttttaaaaagatttaattaaacatttatatgccaaatgaagacgttcaacccgtaagacgaaatgtttaaagtcacgcatgcatctctttagtaaacctgcctcaaaacagctgataaccgataactactcttaagatcgtatcgattaaccgcacctgcggagaaactttaaaatgtaatgaatcattacaaacttttgagctttcttacaacaactagtaaatgacttttgcataagtttgccttttctttcatgccaaagaatttcaataaatcgggtaagcatactctttgaaagaacatttaacaatatataagatgagcaactgcaatttacttattcgccttccttttttatacaatactcaaacatacatttgtcggctatgcgaatttacttcttaaacgaacgcgttttaagttagaaccatcatttgaatttcgcaggcattcaggcttatttagagcatttggtgtgaaagtcattataccatttggtaacactgccttgaacattttcagacagtaaataactttaagaaaatcatttattacaacaaaaaagatgtcttcgtccgaactggaagtacagaaggctgctgattgtcagcaggaggcgaaggtgccggcaagcgtggagattacggggtccaagcagccggaggaggacacaaatgcccgtacgaaggcggaactcgattttgccgcggcggagcagtacaaaaatcagggaaatgaaatgctcaaaagtaagtacctctggcaatcacataggcccgtaatgaccacgattagtgtccttcgagcaatccattctgtgagtgcactttaccagtgccaccttcaacataaccttaaaacaatggcaaactttggctgtgtgtgataatttacaagtctgccggaacctatgggggtataattattaccattactcaccctttggtctatttccatagccaaggagttctccaaagccatcgacatgtacaccaaagccatagaactgcaccccaacagcgcgatatattacgccaaccgatccttggcgcacttgcgccaggagagctttggtttcgcactacaggatggtgtttcggcggtaaaggcggatcctgcctaccttaagggttactatcgccgggcagcggctcacatgtctctggggaagttcaagcaagccctttgtgactttgaattcgtaagtaatccccggcagcaccttgggacctccactaaacaaaaatttctttacaggtagccaagtgccggccgaacgacaaagacgccaagcttaagtttaccgagtgcaacaaaattgtcaaaatgcgcgccttcgaacgggccattgctgtggataagcccgagaagacgctctcagagatgtacagcgacatggaaaacataagtaagtggcttatatttactctatatagacgtagagatttacttgcttttgccaacgtattgcagctattgaggatgactacaagggtccgcagctggaagacggcaaggtgactctaaagttcatgaaggaattgatggagcattacaaggcacagaagcgattgcaccgcaaatttgcctacaaagtatgcgtgtaacccccaagcccagcagacctttgaatacttatacaatttgtttcagatactctgcgagatcgacacgtatatgcgagctcagccctcgctggtggatatcactgtgccggatgaggagaagttcacgatttgtggcgacattcacggtcaattctacgacttgatgaacatattcgagatcaatggtctgccctctgaaaagaatccctacctgttcaacggcgatttcgttgacaggggttccttctctgtggagtgtatatttacgctgtttggtttcaagctgttgtatcctaatcacttcttcttggcgcgcggttagtttttttttctgttcagatgtagagatgttatttataacatgcttcaaacatattccaggcaaccatgaaagcattaacatgaaccaaatgtatggattcactggcgaggtgacagcgaagtacaccagcgccatggctgacatattcacgcaagttttcaactggctgccgttgtgccactgcatcaaccaaaagatcctggtcatgcacggcgggctcttctccacggaagacgtgactctggaccatataagacgcatcgaacgaaattgccagccgcccgaggaaggtcttatgtgcgagttgctgtggtccgatcctcagcagtggatgggtctcggtcagtcgaagcgaggcgtgggcatccagtttggtccggatgttaccgagaaattctgcaaagacaacaacctggactacatcattcgaagccacgaggttaaggatatgggctatgaagtggctcacaacggtaaatgcataacagtcttctctgctccgaactattggtaagcctacacatttgatccttaaactttaggtaatcttttacctttttttgcagtgatactatgggcaacatgggcgcatttattaccattacgggtaacaatttgaaaccaaattacaaatcattcgaggctgtggtaagtactaaaaaacaactttattcgggtcaattcattagcgtaatcttttcagccacatcccgacgtcaagcccatggcctatgccaacagcctaatgaactggctggcgtagtcagtttcgcattaacttcaatagctaaaacatactcccacacaacacataccaatttacaaacagcttgagaacttacaatcgcaagacagcccagcttacaatgatcaaaggagaggaaaaggattcgaagatgctcaatagacttatgcacaccgcgagctgcttcactacttaagtacgagtatggcgagtccataaggcgtaggacgagtggaggacggggaaaggatcaagatcacaaatacagaacagcaatcattttataaattcagctatatttgatacagaacgaaatgttatagtgtattgtggctttagaagtcggatgctaagttttatcggtgccaagcatctggggttccacttgtaagtaaaaattgaaagaaaatgtttgtttatgcatagcatttagttatggctaccaaaacataatatacgattacatatatacaatttttcatcaattttgtttgttccgaacgctttatttgtgtataaaaccccagttttgttcaaaaaccttgccttgtttatattttataaaagtcatttcaataaaactattcaagttagatacctcaataataatcccatacatttttttaatccaataactattgcctactctccgggcacaaacaaaacagttctgatcaaaatattcgaaactgcattaaaagacacctagcttaagagcctgtaatgttaatcgagtgaacagaaatcagaatagagcaattgtgaaataaaaaatcggtccgttctttattaaccaagatctcgtccactagctatgctaaagcccatgacctcgaagatctggttaacattagcctgataatcctgaagatgggcccgctgcaacagcgtaacgtatacgaagggtccattgtaagaaataagctggaggaagaacgctctggccggcgtctgtagctcttgcggctgtatttgtgataggtatattaccaccgtgctcatgatctcgtgcagatgt

SEQ ID NO: 18311 - DNA, 1759 bp, DROSOPHILA
atgacttttgcataagtttgccttttctttcatgccaaagaatttcaataaatcggaaccatcatttgaatttcgcaggcattcaggcttatttagagcatttggtgtgaaagtcattataccatttggtaacactgccttgaacattttcagacagtaaataactttaagaaaatcatttattacaacaaaaaagatgtcttcgtccgaactggaagtacagaaggctgctgattgtcagcaggaggcgaaggtgccggcaagcgtggagattacggggtccaagcagccggaggaggacacaaatgcccgtacgaaggcggaactcgattttgccgcggcggagcagtacaaaaatcagggaaatgaaatgctcaaaaccaaggagttctccaaagccatcgacatgtacaccaaagccatagaactgcaccccaacagcgcgatatattacgccaaccgatccttggcgcacttgcgccaggagagctttggtttcgcactacaggatggtgtttcggcggtaaaggcggatcctgcctaccttaagggttactatcgccgggcagcggctcacatgtctctggggaagttcaagcaagccctttgtgactttgaattcgtagccaagtgccggccgaacgacaaagacgccaagcttaagtttaccgagtgcaacaaaattgtcaaaatgcgcgccttcgaacgggccattgctgtggataagcccgagaagacgctctcagagatgtacagcgacatggaaaacataactattgaggatgactacaagggtccgcagctggaagacggcaaggtgactctaaagttcatgaaggaattgatggagcattacaaggcacagaagcgattgcaccgcaaatttgcctacaaaatactctgcgagatcgacacgtatatgcgagctcagccctcgctggtggatatcactgtgccggatgaggagaagttcacgatttgtggcgacattcacggtcaattctacgacttgatgaacatattcgagatcaatggtctgccctctgaaaagaatccctacctgttcaacggcgatttcgttgacaggggttccttctctgtggagtgtatatttacgctgtttggtttcaagctgttgtatcctaatcacttcttcttggcgcgcggcaaccatgaaagcattaacatgaaccaaatgtatggattcactggcgaggtgacagcgaagtacaccagcgccatggctgacatattcacgcaagttttcaactggctgccgttgtgccactgcatcaaccaaaagatcctggtcatgcacggcgggctcttctccacggaagacgtgactctggaccatataagacgcatcgaacgaaattgccagccgcccgaggaaggtcttatgtgcgagttgctgtggtccgatcctcagcagtggatgggtctcggtcagtcgaagcgaggcgtgggcatccagtttggtccggatgttaccgagaaattctgcaaagacaacaacctggactacatcattcgaagccacgaggttaaggatatgggctatgaagtggctcacaacggtaaatgcataacagtcttctctgctccgaactattgtgatactatgggcaacatgggcgcatttattaccattacgggtaacaatttgaaaccaaattacaaatcattcgaggctgtgccacatcccgacgtcaagcccatggcctatgccaacagcctaatgaactggctggcgtag

SEQ ID NO: 18312 - protein, 520 aa, DROSOPHILA
MSSSELEVQKAADCQQEAKVPASVEITGSKQPEEDTNARTKAELDFAAAEQYKNQGNEMLKTKEFSKAIDMYTKAIELHPNSAIYYANRSLAHLRQESFGFALQDGVSAVKADPAYLKGYYRRAAAHMSLGKFKQALCDFEFVAKCRPNDKDAKLKFTECNKIVKMRAFERAIAVDKPEKTLSEMYSDMENITIEDDYKGPQLEDGKVTLKFMKELMEHYKAQKRLHRKFAYKILCEIDTYMRAQPSLVDITVPDEEKFTICGDIHGQFYDLMNIFEINGLPSEKNPYLFNGDFVDRGSFSVECIFTLFGFKLLYPNHFFLARGNHESINMNQMYGFTGEVTAKYTSAMADIFTQVFNWLPLCHCINQKILVMHGGLFSTEDVTLDHIRRIERNCQPPEEGLMCELLWSDPQQWMGLGQSKRGVGIQFGPDVTEKFCKDNNLDYIIRSHEVKDMGYEVAHNGKCITVFSAPNYCDTMGNMGAFITITGNNLKPNYKSFEAVPHPDVKPMAYANSLMNWLA

SEQ ID NO: 18313 - DNA, 8677 bp, DROSOPHILA
aatcagaaaacattcttcaatatgttttcttacttaattttttgaataaccaataagaaaacgaatgtatatgtgtatattttgtaggctaaaagggttttggtctcattaactcatcataaatatacaatataagttgacctttaccatatatccactgggcgttttttccagtgtcctttcgcatttgatggctttatgagagcctcggcaacgtctttcagtgcaaacaataacgaaagtctgtccgtggcgacaggacaggccgtgtataattatggcagccatggtgggaaggacgaacctccaccagcgccgggcaataaattttattgatttgtaaatttccatttcaagcgcagggcaatggtaattagcctggaaattatggcagcaggttaaaaagttaaagcgcttaccctattatacatatgtgtatgtccatcacaacaggatggaaagctcccacgaccagtagaccagcagacctgtctgctaattcgttggtcgggcggagtggttggtggttggtgaggtctaccaccaagttccagtccaaatgggaggcaagcacctgcagcgaaggtcgtccggaaaggatgccggaaattgcgtgattcccctaccacaaaagctacactggtttgaatttactacctagcatttgaaaaaaagatcgccaattcaaatagcaagatatttacatatattgcttaaattgagttgccgcatttaatttgaagatttcaatgcatcaattttcaaaacaggaactatcgaaaatatcgaattggattcgtattctagaaaggctttaaaaccatttgaaaatagttatggttaggtatttatgatatgatagttcctacagaaaaaaggacaaatgaattcgttacacaaaaatgaccgcccctttttttgaaaacagcacctatcgatatacagataacaaagttctgggtagttttccaagtgcagtgacagtaagattttcgtcacggattccagtggtcactctaacgatacgggcaatgttttcgcacaagtttatttgcgggtccttgaccaaaatgactgaaaccggcattacattcgatccgccggtgtacgagcagcgatattgcgccacaatccaaattctggaggacgcccgctggaaggatcagattaagaaggtcgtggagttcggttgtgccgagatgcgcttcttccagctaatgcgtcgcattgagaccatagaacatattggactggtaagagcttgacttcgactggtaatgaaacaggcacaagttgattgttaaggaaatacatttctagtttatttatttccgctgctgtttatacacgcatatcctagcttagatttgtattgtttttatgaaataaccattatctagttatattaaatactttttgaggagagtatgtacctggctgcatgaaatgtgggtgaaacgagtcgtacatgtggtctataatatggttgttgatagcctaacgaaactaacacaaaactcgaaaataaatgtaatatataaaaaatcatggatttcctatcaaggccaatggcgcactgctcctgtgcacctgctaaacatataaacatctcttacatctggggactactcgtacatggtataatggataattcaacaacatcttccctatggagctgagagtgccaatcaaaaaacctaatgtcaacttatcgataaaatgtttaaaaaccaaaattacacaacatgttgtcggtctcactagttcgtgtccatgcctcgcctgccgacaggtccgaagtatgattataagtaggatctgtcctgttcgttccttaattaccactaaaaatacttgaaagcgaatttagatttattcttttccgttccgttctgttctgttctgtttccatttatcgtccgacttcctaatgatccgtctattagtccctatttctaagtgtcatctggcaattatttgcgacagtgtctggacgagtggacactccgccccttgccgtagttgttctcgtcatcgtattcgccgtacaggttctgcacaacgagcagactcgagttattctccgcatcgtgctcgccgtgtttgggttcagtcttataaagagctctgcgcgtacggcctgacttcagctttcgctctccctcgccggtggccgatgccagagtggaattctccttgcgtgtggcgcagccacgtttgttactggccactgccgatagcggcgtagtgcggttcttgctaacggctccggcggccagtttgacgacgcccgagttcttgcccggacgacccactccgcgatggaccttcaccggcggctggttttggtggggctgggcctgcctgctggtggtttgcttccgagatgtgcccttgggacgaccacgcgcacgtttctgggaatgatcggagcagtcactgccctccattgatctatccgattcatcctgtgttaaataaataaactttattataatagctctattgaaacttcgccaaaaaaatcgtccaaccgaaatacacgttgctcatctttttttagctggttagataaatgcatatgcatattattttatgaatgttacctcgccttcggcgctatctgccgcctctccatcctcctcttgatcaatgtccattgcctcctggttctcctcttcatcgtcttcgtctgcgtcctcctcttcctcctcaatatgctcctggacaaccaaacccttttcgcgacgcctctgctccatgtctagtatcgcgtaagtgggtttaccttcatagcgccttggaagacgggattccagcgggcagatggtctcctcccgctcaaactccttcactgccctttcgcgggctatttgatcaggatcctgcgatagcacctccgcccacgaaaacttctttttcgtcgttttcttattcgacttggaacgcagattcttgggcgacacgcggttcgtaagtgagtgctcctggaacggagtgcttagcgttgagtttcgcatcacattcacggctgccttgttgttcagctcgaagatgtcacacttgctgccatccaccacgtccttggtggagacacaggtgcggaggatctcctcgctgctcaaacgcatttgacagggatcgtaacccaggcgctggtactcgcgcttaaagattttgcggtagcgctcgtagttgggtcgctcttggtatgccagctgaccgatctgtagcaggaactctcccagatatttaggaacttgcttgccatagaactgtcgcagcatctccggcacatccgtcataaacagctccttagcgcgatgcactttctcctgctgctgctgctgcgccacgtccttccacggcaaataaccctcggaccagtacaacaggttgtagcctaggcactccagatcacttcgtcgcgaatgggcacccaggtgggcgtcacgtgacgtaaactctagcgtgccgtcgtgcgcccttcgctgatccattataaaaggacggtgaactccgcgatcctggaacttagacgccaggccgaagtcgataagaaacacatgttcctcctcagtgggcaggaacttgtactccgtcgggttgttgtccaagtgcttgctgcccctgctgcgtagtttttgatcaccgttcggttccttctttaccttctcctggcggctagcccgcgtcgaaaccggcgtttttttcggtgtggctatctgagcgcttctgcctcttttaataacggagcgacgtgacgaggggggaataaattcatccgactcgttatcagacgattcaggcgattcatcactattttccgctgtttccttggggtaaccgtcttcgttaaactcctcgcgataactaatccgcttggtgggtcgcaaatagtgcgacttaaccatctcctcatacatggagttgcgcttttcacgacggcaggcgcgcactggattggagccgctgaactggattgcattgcgtgcggatcgctttttgttcactggagtgtggaagacgtctaggctgttgctattgttgctgtttgacgtggcgccatcatcgaagtcctcgtcgtcttcgtcttcatcctgcttaatatcgacaatcttttttagcgcgaacttttcgctcttcaggaagtagtcatcgtcgttggtctcctgctctgagctgttgccactgtccgtggtctgctgcttctcctcgtagtgatcctcgtagccattacccttgggcactacctgccttctaaggtacttgcacttggacaccattagattctgtgccttgatgtcattatgacagtaacccttgtcgtgcagattctctaggacattgatgatgtgtacggcaagcactaggagtgacttctgctgcacccttgagttcttgatcagcgagtgcagatcgcgatcgaagcgcggcaacactagaaagcggtagcgaacgtctccaaaatagtgggtgcccgacgcaataaagctgggaattccggagggcggtcccctgctgaggacatgcgtctgtggggctggcaggcttgcagcatcttctgcggcatctgataaatctaaaaaaaaaaactcgtgtaaggatacaaatgtgacaatgccgagtttttccaaagcataccattgttccgggatgtattgatcagacagtgaatctcaacaaacagaggcccatttgaatgcggctcaattttgaccacgtacttggctgtctccgagctggcagggcaaacagtgtcgtccgaggctaggaagatctcgccaaagttgccctttcctgaaacaaatggttggtttattcgatttaaaaacacaattgctccttttagtgcacttacctatgggtcggcccaagcgccaggccttggagagcacatctctcagaatggttccgttgaccaccgagggtcggagcgtgtagaccgggcgtggtgactccatcacactggagttgttgtgatcgctggcaatgctggctcccgtcaagagcagactgcgtgcctgcggggtgtgcagtagtgtggggggatcagcctcagtgccggcagcagatcctgccgaggagcaggactcctcatcgtcgttctcatggaactcgaagccattggcgctgctggaaccaccactcaagcgctggcgcttctcggcggccttgaccgcagaacgctttcgcttgcgtgcactgcgatccgtggtcgggcgctccaattggaggcgcttgcccatcgcggcagctggcgaggatccttgggcgattttcggtggcacttttcgtaagtttctgggatttaatactcacgcttaaaatattttgtttgttgttattgtatgcaaagattgatttgtttttgtgtgattccgctttcgattgtgattctcattcaactgctgatgaaagaagaagattaatggttgttagatatctatttttaggttatgagtccagtattgtggcatctattcaaactaaaactgataaatatgcgagggaatttcgttgttttgttttttttttttcgttcgcctcaagtctgcttttatcacatttattttcaattgtttgccgtgcagtgttggacaacgcgcgcgcgttagttattttaagtgtatgagtttagctcacgattacacggagtacgaccgagtactttttttattgcaaattgctctattgaaataagttgttcttgtcataataagtcatttcttgtttttactaaaattcatgagcatattttcgttcttccgttatgttgcagtgttgcaaagcgaactagcctggtgcgcgtccgggggcacgaatacaaacacaaacaaacgcgaacgcaccaccatgtctggaaacacaaacaactcgacatacaaacatgccgaggtcccgaaaaaaatcgattatctggccggcattattaaacaaagacttaaatgctgacacattttttcggttgctcaacgttctccctttgaattcaacgcttttcgtccgcaaatcatctgctaatgggctgaaaagtcgaattgatttttcagtatgtatttttctcacgtattactcgttctcttcttcttgtttttctacgttttcttttgacccgttccaagtgttcggatgtttttcactgttttcgtttggttgggcgcttgattcgcaatgcttacacttttcacttggtgcaatggtgtattattgcacactcacaacatgcattgcagtacaatttcgcttccatttggcttttcgtaacaattacacattcttcctgtgcactgctacggacacacacacacacagtcacgcagttttgtggtgtgaccgtagggagagatgtaaatgctgttttttagagtgactgtattatttaattgtgagaaagatgtattatcaacttaattgtattttatttaatatcaaaggcgaagttaacttattttaatttgaagtaatacaacatttcacaatttaaatagtttaaaccccttttttacaccgtcataagttatcaatttaatattcagtactgtgttgaattcaaatcttacattttgctcgttccattcccatatgtttccttgaaattacggttatttttaaatactcaatttactcgcaggtggacatcgacaagtccttgctcatgagaaacttaaccagcgttaatccactggtttccgattatatacggagtcgcgcgagtcctctaaaagttcaaattctgcaggggaatgtggctgattcttcggaagaattgagggacactgacgctgtaatcgcaattgaactgtaagtttcttattgtttaaaccccatccattttaaattattacttttcacatttgaacacaaaaactatttaatgtttttcattgcagaatcgagcacgtttacgacgatgtattggccaaaattccagtcaacatttttggtttcatgcagccgaaattggtagtcttcagcacaccaaactcggacttcaacgttatatttacgcggttcaatccgctgttgccaaatggttttcgccacgaggatcacaagttcgagtggtcacgcgatgagttcaagaactggtgtttgggcattgtggagaagtacccgaattatatgttttccctaacgggagtgggtaatccgcctaaggaatacgagtcggtgggccccgtttcacagatagccatattcgttcgcaaggatatgctggagatgcagttggttaacccgttggttagcaaacccaatatcgataaggaatcaattccctacaagctaattcataccgtggaatatcctttttatgtggatacgcgcaccgagaaggaaaagctctggaccgaagtgcaaatagagcttcagcgtttcaaaagacaattcgaatcctccgagattgaggagggtacttatcaggacacttgtaatatgcctattgctttcttattggatcgcctagaacacgtgggtgccaccaaagaacgtatcgaggaacttctactggaaaataacctaacagtagagaacgagtgtgttttaatagttagttccgatcaggaatcggaatggtctgatccttacaagttttctgatcgttcctcccaggatgatgctttggtcgaccaggaacaagaggaggaacgctgggatcaaggccccgaatcataagatacgatacttaagactagtttatttttaaccaaatttctaacacactatattttgaccaaggaatagattcctatgtactctgtgtgcattataaatttccaaataattttattaacaataatgaattccagacaaaccgaagatcgatatataaactgtagtcattatatctaggatatagattaactgacatcaactaagcttaaattaaacggttgtatttcgattaaaatccatatttaaatgtgccaagtgtaagaactgcaagctaatattgtaataatcttgttagaatctcgttttattaatacttttgtgctatgaataacatttgcaaatcatctaacttcagcatttatttttgggtcattaattccatttaagactttacaataaaccgttacccccaagttgtattaactgacaagctgttgacattttgagtgcatcatcggtggtgcgggggtgggtttcccagaacatgggtgaccattcctcccccagctgaccactttcattgcacaaatcgctgcgaaaattggggttgccttgccgccaagatgaggactatgacgccgcgtcgtctgtctcgctgtggcacccgcacggaaattgcttttgtttgcaactgaatcaggggatgcaggatgcagggagggagcaggacatgcagacttggcgcaaacgcagcgcacaccgagtagtgtagccattaactccctaagctcacacaagttcctgccccggctgtggttgccagttaatggagttggcgtcagcacggagccggcggatccggagccatcgttagttgtaagtcaacctcgctcctgacaggctggcaggccaatcgaaagcgaaaccgtgtgcccgaaaccaaattgccatagcagccaaactgccgtgacaatagcgcaaaaacgaaggattcataaacatttctcctgccattcacctagctacactagtgctgcctttaccttgacttgtgtgtcac

SEQ ID NO: 18314 - DNA, 1207 bp, DROSOPHILA
gattccagtggtcactctaacgatacgggcaatgttttcgcacaagtttatttgcgggtccttgaccaaaatgactgaaaccggcattacattcgatccgccggtgtacgagcagcgatattgcgccacaatccaaattctggaggacgcccgctggaaggatcagattaagaaggtcgtggagttcggttgtgccgagatgcgcttcttccagctaatgcgtcgcattgagaccatagaacatattggactggtggacatcgacaagtccttgctcatgagaaacttaaccagcgttaatccactggtttccgattatatacggagtcgcgcgagtcctctaaaagttcaaattctgcaggggaatgtggctgattcttcggaagaattgagggacactgacgctgtaatcgcaattgaactaatcgagcacgtttacgacgatgtattggccaaaattccagtcaacatttttggtttcatgcagccgaaattggtagtcttcagcacaccaaactcggacttcaacgttatatttacgcggttcaatccgctgttgccaaatggttttcgccacgaggatcacaagttcgagtggtcacgcgatgagttcaagaactggtgtttgggcattgtggagaagtacccgaattatatgttttccctaacgggagtgggtaatccgcctaaggaatacgagtcggtgggccccgtttcacagatagccatattcgttcgcaaggatatgctggagatgcagttggttaacccgttggttagcaaacccaatatcgataaggaatcaattccctacaagctaattcataccgtggaatatcctttttatgtggatacgcgcaccgagaaggaaaagctctggaccgaagtgcaaatagagcttcagcgtttcaaaagacaattcgaatcctccgagattgaggagggtacttatcaggacacttgtaatatgcctattgctttcttattggatcgcctagaacacgtgggtgccaccaaagaacgtatcgaggaacttctactggaaaataacctaacagtagagaacgagtgtgttttaatagttagttccgatcaggaatcggaatggtctgatccttacaagttttctgatcgttcctcccaggatgatgctttggtcgaccaggaacaagaggaggaacgctgggatcaaggccccgaatcataa

SEQ ID NO: 18315 - protein, 309 aa, DROSOPHILA
MRNLTSVNPLVSDYIRSRASPLKVQILQGNVADSSEELRDTDAVIAIELIEHVYDDVLAKIPVNIFGFMQPKLVVFSTPNSDFNVIFTRFNPLLPNGFRHEDHKFEWSRDEFKNWCLGIVEKYPNYMFSLTGVGNPPKEYESVGPVSQIAIFVRKDMLEMQLVNPLVSKPNIDKESIPYKLIHTVEYPFYVDTRTEKEKLWTEVQIELQRFKRQFESSEIEEGTYQDTCNMPIAFLLDRLEHVGATKERIEELLLENNLTVENECVLIVSSDQESEWSDPYKFSDRSSQDDALVDQEQEEERWDQGPES

SEQ ID NO: 18316 - DNA, 2569 bp, DROSOPHILA
tcttgcatcaacattaacccatattcagcattagcctcacattctcgacccactcacacgctcgtcctcgtgtcacttgcttgtcaatcatccatcaaagccccacaaaaccccatcgggagtatgaaaactcggggctacttatcttcacattgaatgctcacagaaactgaaactaattgctaaaacgccttgatgcctgtgtaagcagtgaggattatgtaaagacactggcaggaaagaagaatcctatctctaaccctgaatcataaaaatgtttagacaacaaactgaggctgggcgggtcatcattcatttggcccaagtaaatatggcctggccaacgagtgaatgttatcagtattttggaatctgctgtgacccaaatgtgtggtggttcatagccagaagctcgggtagcaaaatccctgctgacttaggaaagtttaaagcacaacgaaaattattaacaaactgcacagccttcagaaaattaatcttggccgattgaaagctaaaaactatacatttaaaccacacgccatttcacacactactttacacaaactacttactttgtaactatggataataaagtgcaagtcagtattcgatgttaatggaaaattttatttgacaatcagattgtgggctgtagttcgaacttcagagttatgtaagcatatctaagaacttttaacagaggccaaaaaattcgcagatcccagttattccttttaactaggacagcttacgctaattaaaaatatactttaaagccacctgaagcttaatttttcccaaattaaatctgaaattatatattgatatgtaagaacctgacaacaagaaataacccgcaagtcagcatggctaggttgtttctcagtgcagccaagtagattgaaagggaatcactaaacaaagtccaaagtccatcatcgcaaattgtataaatgctgactcgacgagacatttagccaacagtttctattctaaaagattctacacagcagattacgatcagcatcatgaaagtattctttgtgtttgccgcccttgcagctctatctttggcatctgccgtggtaggtccttttgcttgatttccataagttctataaagatttgttcctcttaacaggggctaactgattcccaaaaggctgaggcaaagcagagagccaaggcctgcgtcaaacaggagggaatcacgaaggagcaagctattgccctgcggtctggaaactttgcagactccgatccaaaggtaaagtgcttcgccaactgcttcctggagcagaccggcctggtggccaatgggcagataaaacctgacgtggttttggccaaactaggtcccatcgccggcgaagccaatgtcaaggaggtgcaggccaagtgtgactcgaccaagggagccgacaagtgcgacactagctatctgctgtacaagtgctactacgaaaaccacgcccaattctaagaaaaccttttttgattttcaaaagaatatttgtttctttgattaccagttattctcaataaaaattagatcaggcttcccaaataggcgtgcaatcaatttaagaaaaagcttgaaattgttaataggcgtgcacatagacagtcagcaaaatctatttaaagcgcatcttcagtattgaattttaaaatcataaaatgaacggaacgcttgctctagtgtttttagcctgcattttcgttctgtcatattccaatgtaagtgactatttattatactgcaaccatatttatttcttgacattgccagcccgtactggaaagtaatgaaagtgaatttctttctggtctttctattaagtacaaagagctaaaaatacattaaatggttttgtgacaggttaaataacaagtgggtaacagtccctggaaaccgaaaccaagcgttgataatatgattttttgagtttcgagttgaggataaagtgtaaataggcatggctaatgtacgaactataaaagccaggaaagatagctaatttatgttcttgcacacaaaactatcattatgaaagtattcctgttgttcattttcatctctgctatctggctccaagcattttgtatggtaagcaatcgcaataatgttgaaattccattctttgaaatgtccaagttttagaaatcttctgaaaaaataaaagcctgcttgaaacggcagctggggtatacaattacagaaaatacaaaatttgatgctaaagaagactctcttcaaagcaagtgtttttatcactgcttactggaagtgaaaggtgttattgcaaatgatgcgatcagttcggagcaaccgaggaaagtacttgaaaaaaagtatggcattactgacacagatgaattggaaaaggctgaagaaaagtgtcattccatcaaggcttcaggaaaatgtgaattgggctacgaaatcttgaaatgctatcagtccattaccaagcattagacttctaaacatgctattatgtacctggtgttcggataaacattcaacttatgcacatcacactttaaaacgttaatttttgag

SEQ ID NO: 18317 - DNA, 513 bp, DROSOPHILA
agattctacacagcagattacgatcagcatcatgaaagtattctttgtgtttgccgcccttgcagctctatctttggcatctgccgtggggctaactgattcccaaaaggctgaggcaaagcagagagccaaggcctgcgtcaaacaggagggaatcacgaaggagcaagctattgccctgcggtctggaaactttgcagactccgatccaaaggtaaagtgcttcgccaactgcttcctggagcagaccggcctggtggccaatgggcagataaaacctgacgtggttttggccaaactaggtcccatcgccggcgaagccaatgtcaaggaggtgcaggccaagtgtgactcgaccaagggagccgacaagtgcgacactagctatctgctgtacaagtgctactacgaaaaccacgcccaattctaagaaaaccttttttgattttcaaaagaatatttgtttctttgattaccagttattctcaataaaaattagatcaggcttcccaa

SEQ ID NO: 18318 - protein, 132 aa, DROSOPHILA
MKVFFVFAALAALSLASAVGLTDSQKAEAKQRAKACVKQEGITKEQAIALRSGNFADSDPKVKCFANCFLEQTGLVANGQIKPDVVLAKLGPIAGEANVKEVQAKCDSTKGADKCDTSYLLYKCYYENHAQF

SEQ ID NO: 18319 - DNA, 3508 bp, DROSOPHILA
gttttataaagtaaaccattttacccagatatccgactcgcttcacttcctaccaaaaatccgtgctccgtcgacaaaggaccagcgcgatatccctctatatggcatcatcaccatgcaggtagtggagcctagtctatgcacccttgagtgggagggattttcacagctgcgcctccacaaaaaagcggatcttctgcttcactctagagatgccgacggggtttccctctgccacggtggcctggagatcaactgcatgctgaagtacaaggactccagttccaagtttctacccgttgaggtgtcggacaatcgtgatggcacctacaacatatccttcaccccggatgcccagggcacgttgattctcacgatcaccattaacgaccggcccatcaagggaggtcctttcacttttcaagcgcgacaggttcgtccgcatacgggcatctaccactgctgctccttctgttccggaaagggcaaccggaacgtgatgtgctcgtgtgagggtcatatgcctggatatagtggctgcggtcatggacatgctggacatccagggagacgtcattggtcctgctgtggaaatgtccttgagaactcggaatgcaatgtggccaacaaactgcttaattcttaagtaattgattaggatgcagggctataaaacgaataaattaacatatagccaggtttcgccattttgtttgttcatcttgtgaaatttcaaagatcttgtagtttatacgcacgcgcagatagacaacaaggatacttcaaaataaacgtttttctacctgcaaaatacatgcattccaacagacccgacagtccatttacaatgtgcacacaataatctcagattgctaaggctacaaaatccctttcgacctctggaattaccaattgaattctccttattaccatatggtcagcatatgcgcgtcatatcctgaccgttgagcaacaagtcgcaaataaaagttacttatataggctccagcagaataaaggttttttttatttattgaaaatggttatcataaatacagacactgactctggacatttatggaaaaaagtccgatgccttaagagttggttgggtggttttgaaagcgcctgcaaggagctataattctaagtgggtaatttttcgttaaatgtataatcgttctttttcgctttcgatgatccaactgtttaatcttcattatcagagtaccaggataggcgctcttcgtagaagtggattaccattcgtgggattttttcattggccactgaggagggcaccatttctgcttggtccacgcctttgaactgaatgaggaatgtcaggcggccattattgtcggaggcacccaagatcttttcggcctccaggccgcgatcgaatccggtagatcctgaaacgggaatggtgtcctgctccgcatctgtggtacgttttgatttattgccagagggcgctaaataaataaaataaaaacaagtaattaatacagtgcaattttttaatagatgcatttttttattgcaaagaccatctttttcttgcgcatgccattcttgcgaaggacaaaatttgagatacatatgtgaatacagttttgacgaaaagggcaaataaatgccagtggatattgtaggtgatgactattgttataccaatttgtgtacagaaaatatttgtaggtacactcaattccatagcttacctgttggttcttcggactttcgcttgcttgctgtggacgtcgaactgctggcgcgtccttgagtttccttggccttggcgctgctgctgggtcgatccttcttggaggcggctgacttctcctacggaccgaaacgagatgtaaaggaaatcctagcaagcacaactgtacttggcatcgcattgtacttcacttacctcatccttgcggctcgcctcgtactgctggataagatcctggcagtcgagattgttctccggctcccacgtgttctcagtttcgggatagcccttccatttcagatagtactccacctgcaggtggaaaatggcgttttaggaccaaatataatgggacgtctggttcggaaaactcacctttcccttgcgcacccgcctgtcgatgatcttttccacggcgtactcctcctcctcctcttcggcatcggaaacctttgccgagctctcagggttgtcgattttcttgcccattttgtttttattaaaatacttcacacgacaaaaaataaggaaagaattagcacaaccgcacacaaccgcacacacacgcaaagtacgaaaggaaagtacgatttttagtcgactctctttgctttcatggctcacctagattaaataagatctacactttatgcacgcagctaaattggtttttataagcctgtgtgttggcgctagaagactttccacaaaatgaaaaatctgcaaaaaaatgcgcgttctaaaatgacgccggccgaacagtgtgcgaaagtacgcgtggactgctaagactacgcttatctattttccgatagatttgcacatcgtattaatttcattttaagtctagaaaaatgttaacactaagaactatctaaattttacaacataactataataataacgtaactaactgatcgccaatatctgtttttaaaaattttgtaataaatcgatgaatcgattaaggaatccgttgtaccacaactattatcgacgcgtttcacagcactgaataagttgcgcgaatattcacgaattttttgacaatttgcgttttgtttcttctgttttacggaaattctataaaaatgcccaaaacaaagaagaaggattcgtcctcagatagcgatagcggtccagatgatgtaagttaactagaaatacaccaaaactaggtataacaagttaaaacctctttcagcgtatcaagccggcaagcaagaaggcgaaggaatctgatgctccaaattcagatccaaaagattcgggcgaaaatggtgctacatcttggaccctggaaggacttcgccaggtgcgaatcaacgagttccgcggtcgcaaatcggtggacattcgagagttctacgataagggcggccaaattcttcccggcaagaagggcatctccctatctttaattcaatggaagaaactccttgaagtggccgaagaagtcacccgcgcgatcgagaattaattgaagttcatccacatgccaaactaagtcgtagccatatgtactaactatagacatatccactgaataaacgttatcttaaacactagtaattgaaaatctgtattttcacagttgctgaagcattaatgaatgaccaacttaattgcctgataggtattttccttatctgctttgtggtgggactacaaaaagcacacatatacataaatgaatgaatcctttattggacgtcatatgtacatagatttgtacattgatagcatttgatatagatatgaatattaaaaatagatgcc

SEQ ID NO: 18320 - DNA, 985 bp, DROSOPHILA
acgcgtactttcgcacactgttcggccggcgtcattttagaacgcgcatttttttgcagatttttcattttgtggaaagtcttctagcgccaacacacaggcttataaaaaccaatttagctgcgtgcataaagtgtagatcttatttaatctagatgggcaagaaaatcgacaaccctgagagctcggcaaaggtttccgatgccgaagaggaggaggaggagtacgccgtggaaaagatcatcgacaggcgggtgcgcaagggaaaggtggagtactatctgaaatggaagggctatcccgaaactgagaacacgtgggagccggagaacaatctcgactgccaggatcttatccagcagtacgaggcgagccgcaaggatgaggagaagtcagccgcctccaagaaggatcgacccagcagcagcgccaaggccaaggaaactcaaggacgcgccagcagttcgacgtccacagcaagcaagcgaaagtccgaagaaccaacagcgccctctggcaataaatcaaaacgtaccacagatgcggagcaggacaccattcccgtttcaggatctaccggattcgatcgcggcctggaggccgaaaagatcttgggtgcctccgacaataatggccgcctgacattcctcattcagttcaaaggcgtggaccaagcagaaatggtgccctcctcagtggccaatgaaaaaatcccacgaatggtaatccacttctacgaagagcgcctatcctggtactctgataatgaagattaaacagttggatcatcgaaagcgaaaaagaacgattatacatttaacgaaaaattacccacttagaattatagctccttgcaggcgctttcaaaaccacccaaccaactcttaaggcatcggacttttttccataaatgtccagagtcagtgtctgtatttatgataaccattttcaataaataaaaaaaacctttattctgctggagcct

SEQ ID NO: 18321 - protein, 206 aa, DROSOPHILA
MGKKIDNPESSAKVSDAEEEEEEYAVEKIIDRRVRKGKVEYYLKWKGYPETENTWEPENNLDCQDLIQQYEASRKDEEKSAASKKDRPSSSAKAKETQGRASSSTSTASKRKSEEPTAPSGNKSKRTTDAEQDTIPVSGSTGFDRGLEAEKILGASDNNGRLTFLIQFKGVDQAEMVPSSVANEKIPRMVIHFYEERLSWYSDNED

SEQ ID NO: 18322 - DNA, 13033 bp, DROSOPHILA
gttactattgagttgctgatcagagaatgtattagtttttgtgtagatttatgaatattgtatctatgagctactttttgatttacattctgttaaaatctatttgatagtgaacaagatagtatgacttactactaacaaattgttttgtaagtttaaactctttacaaactgcctgaaaatccctttcattcccatttagtcaccttttgattaatgactttcgttgctttccatttgcttagagattgccaatttaaacatttgcgaatctttcgcaaaatctctctctttctgaaagacggtgccccatttgatccaaataacacccttttcccagaggttccgaacattacgatatttgcatacgctggcttccgtgtatgggtgctatccccccatccgctagtatatgcatgtgcacatacagacgtacggttgtgtatatatggaccccaacgacattgggggcctccaccaattgaaacaaaccaaatgcaaagttgtctctcccacaacaaacggatctcggggaacaggttttacatttctgaaagtgagaccgagagatcgcgagagtccgaaacaaaacgaaacgaaccgaacgaacgaacgaatgaatattaaacaagctctgtgtttcattagattcaaaagaactcgccgctgctctcggttcggaggctatgggtaaagtatacttgtctatggtacggcatagtctgggagacagggccaagtcacctgggctcggaccagagccacttgctcgttccgcatcgatgaacagctgctgctgctgccgctgccgccactctctggctgtttcgattcaagactgcgcgaaaggttcagcttatggcttttcgctttttggccttatgcacgggctctgaaggcagagacacctcagttcggttcacaatctcccagctccccagctgccagccgccagctcacagttcccccagttcgcgagagcgtcgatcggtcgtcgagttcagttggcctgcggttcgtcatcagcgtggttcatgcggctccgactttcagttcgcctttaactctgactcaagccctggcatcggcggaactcggtagtgactctggtggctctccattgacatcgccatctgcgtccccgggctgtaatcataaatatatatatatctacatacaaactggcccgctgtacataggcccagttagttagtttgttagttagttagttagttacttgcttagtagttgctgttgtgccgtgaattttcattttcccaagagcgctatccgctgtttgtatcttgtgaaatgtcgaagcccttgattttaggctacggatacgttcgttagtcaacctttaaacagctcgctttagggccaaaaactaatgaacaagtgattttaaagaacgtagatcaataccggtaaaactatgtaaaaagtgacacaatctgtttaataaaaagtttacatcgttccggtgttgaaaagtatcttttcaacaccaagtgccaatcgaaaatccaaatttgaagtgtgtatttttcaatatcttcaaaataatcaccagtgaatagtgagattcaaaaatatatttacatcactcggtgattgcgaaattgtggccaaaatgtgggttaggctctgagccacaaacaaaacaaaatctgacaacaaatggacgcaaattcacacatgccgtggcacataaatttatggttggaactgtaactgggcaaaaatgctcggcccggcagacatcagtagcagtagtagtggcaccaccatcaccaccagcgaaccaccaaccgccaccacccaccaatccacccgaaccgccgacaaagggaaaaactaacggaataatgcaacattaagcaaaatgctgctggccctgctaaagcaaagccaacaacaacaacaacaacaccaatttcaacctgccaccaccgacgtcagcaacagcaaaaacaacagcaacaactacaacaacagaagcaacaactgcaactgcaacaacatcaacgtcaccgtcaccgttaccacgaacatcgccgttgccgtataaaaatggaaccctcatatgatcacgaacatccacatcatctgctaacaaattacaagtaatatttacatttttcccatgctaaaatttttttctcgctgtttaattatatccaaccgaagcgaagatacatatcttcaagataataaccataatgaaaaatggaaaaggcgctcgtgtagtggtgaagaaattctctagatcgtacatatatatatatatacaataaatatgtatatacttatatatatgggggcccatgactgcgacttttcaagacttagtcacaatcacagatactaagatactaagatacaaagatactagcggcgggcacgacagcgagaaacaccgtcggggatgtcgaatgcacactgtggcagtaagctacaactataaagcacggttatatatgtataaatatatatatatgggggttatacagtatatagtatctgggaatttgcttagattttccttggtgtggccccagttttcagaccccgcagcacttgcacttgtattcgtatccgcttctcgattctctccgtttccctcggcaaacgtaaacgtaaacgtaaatatgtaaatggtcgactgcgaataacttaagaaccgtcttcggacgcgactcgaaattggtcaagtggaaagtaaaccaagacgccggagaagtcggcgggggtggagaccctgggaaaaagcagaggccaagaacgcacaggcgacgcaccgagaagaagtcttaacatttggtatatttcggccagaggtcaggccattataaagatttgtatccgatctacacagcttgatagatacgcatgaggttttaatatccatatataagtatatgactgtatataagtatttcccctttatacgtattagctagccatttcagctgactgactttcgtagtttccgacgggaaattcccgtctacaaattggctggaattatgaatggaaatgaagccatgaaattaaattaagtacagatgaaaagctctgataagtccgcacacacttttcgtaagaaattcgaaaccgaaaatcacaattaagaatgtctcatgggcgaaagcctgtcgcatttttcgtcacattttccaaatcttcctgcttgggattggctcatcacgggacggggcatttcatttcattcagtttgatcttttatggctgccccataaatcaagtcaaggctgcgatctacctaaagtttgctaacttcgttttcaatctaaatagttttcaatatcaaataaaattctatggccaataaacaaccatctgtatatgtggatttccaatcaatgtttgaaaattaattaaggctttaccgtgactaagctggattggaaatgcatatatccaattgaaatttacttatttcctttagaacttgtttttgattgtccgccttttacacatttcccggatactaaaagtgaatagtatttaagaattaatgtttgcttgatcatttctggactttccctactgcaaccaggaacttaagttttcattgacgtaaaaggagattccaatggttgtaacttcttggaagagagagataaatctttcgaaatgtttataaatcgtgtttggacagcttaatcgcctaattgtattgatgaatctgaagagtacactcctattttaaaatgaaatcctattttaacttgatataacagaatttaatgtattacaactacatgccattcacggcaatcaaactattatattatgtgagcaaaaatccctttccattcaacaaaaaatcatataagaatttctttaggaatttaaatattcaatatcatcaaaaacaatactgaatactttgtcagatttctagtgaaaccttagatgcgtgcttagtaactgtaatattgaagtggaaaaataaaaacatttaccattaaacaggataatagaggagatcgccaaagtggttagacatatccgattcgacgtaacatcaatgatatgtcatgattggcattaaacttggcagattaccaaggaaattaaattattgctcattcaacatttcccgaatggcagaaaagtgattttcggtactttcactgtagatttaaaaacctgataaatacttttggtcgatttaaaaatacatgagaaaaaatccaaatctaacttgccgttttaaacgcttataatttgttaacaaaatatttatataaaacgttttgcaattatactaaactgacctaaagttggacttcgcatttttaaaatttctttaaaattgttttatggttgtaggataatttaaaaaaatgtaaaagaatacaaatttattcactaacatatacataacagaagatcacaaaaagcttaatacacgggaatacacccgaaactaaaactaaaactgattttaaaagatattcctgcccgcaaaatcgaacttacttcacatgagccacataaatgttttctgagtaattaattttaatagcactaattagtggtctaataacatttaaggcagtcaacaccctgtaaaacgtcaaccctaaaaaaaaatataagggttggaacctttgaaaacaccctgatttaagtccggttagttgttttcgaatccagccaactagctaagtacggatcctccacatgcaattactctacttagtggtacgagcatgcagcactgcctccatttccatgcaatccatataatttagtacccctccacctgcgagggtgtatacgtataagtatctgtatgtgtatctgtatctgagcacgtacatgtatctgttggctgcgtgtgctggtgtgcgtgctaaaatccattaaatttttgtatcttttttatgctcctaaaatcgcttgtgtgagaactgggtcttcgttgtttcttcggcatggcatgggggtgggtggtgcctcaagaagtggggctggggggatccacagcgacgacagccgcaataaacctcattagccgaacgaaagcagcagcttcggcaacgttcggccctcgaagatggatggtgatgatgatgatgacgctactctcttcgcttgcttcattagtttaattaggtatgcccaggccaggtcacacatacatacacacatatatcgcctctatatagaaggcacaggtatggaggtacctataccttatagcccaatccattgtgcgtaccgatctcattcccattcgcagcgaggcaggtagctcaccttcatgttcatgttcattaaagctaagatggcggctctttaggcccggatgctgggatgtttatgcttattggtcaacagcatctacatgcggccatacagatatatgcatatacgtacgattatataggcggccatgcatatgtatgcgtaaatggccgatccgatcgaccgaccgaccgaccgacaactcatcgcggcccgctgaaagaccgggcctgcgtcgttaagttattcaagtacatcacacctgggccgcagctccagctccacaagtttatccatgctggcatacaccagcgcccctacctatgccccaacctccaactggaactgggcccaagtcgtgccaagtcgtttgggccaaactcgttttcttggcctgcgctgagctccactgtgcactgtgctgtgctgggcctctggaaatctgttttgtatgcggggcgcctgcagccgcagcaggcagccaatagactgcaaatggagcaaatggagagccacggcagatgcctcttcgccaggcgctgtggccacacccacctccaggtcccaccagccacctcctactccgccactttatccagattcagcctcgccagtcgagccgagccggctttgactgtggccgaaaaccaaaatggcttttattaccttgccgcaccgcttgcatttctccacaggctgccaggctgcaaaactggcccaatacgagatcgcagttgaggcgccaaatgatttgccattctaggcatgcatctctttggtgggcaaatctcggatgcctaactatgcaatcgagcattagattggattctaagcggagctcgcaatcagatctacataaattatatatcaaggttgttcattaccattttgctgggcagaagctttctaaaatgtatatgaagctaatcggattaccaatgggatttatctcaattggaacgctggcactagagcctaatcatgcataattgaaattggtatataattaaatttaataggaaaataaccatttccaacatgttaatcttatggataactagatcagattagaaagcgcagtaattagaactcactattataattccataattttcagataagccagttacacgataatttcgaaatatgcactgatttccatatcagtgtctaaatcgttctatgacatacccagcaacaaaatctcccgaataatagaatgccattgttcttcactctgttttgttctgaatccgagacaaatctgcccaattgttgtcacatacctgtccgcaactcagagtatccccaactggtcccaacacggcgaatagacgaccagtggctagacaaaaggtattgacagctcaccgaagcggtggatctgtcttaattactgtcccatttgctggaatgtcagtttgtcaaccgaatgttgcaagatgcagcgaaacgctttctaaaattagccagaaatatgggatgacaatgtttagattaagaggaagccgcaagtttaacttttttattgccaactcctgtgacaattgtcccccaaatgtacatacatatatacatatacatatacatatatatgtatgtatatttatatatgtggggatgtcgggttgggggtatccaacttaaaaggctgtcttgagcagcgcggcagagcgtcacatgaatcacaatatgctaaagcgcctgacactctccagatcaatgcggcttcttcggttgggagttggttggctggcggctcctgaatgaagccaggggcttgttaaaagggaggagttgcctacttttgtggcagccacgaggggagtctcccctaccacccctcacagaccggctcagtcacctccaactaccaacaaccaactaccaaggcccctttccacttttaccgggactctttggcagccaccagagaagtcgatgttgtcgtaaacaaaacgttccatgggtccccaaaacggcgacggacatcgagtacttggacaggggatttcggtaataggagggtggaggggaacagaaatgaagggtgcagagaggctggctgcaatgtggaatatgtggcattttgcaaagatgttgacattttgcgcgcataaaaatgccaacttaccggccactgtatgtgtcctattttaaaatcagggccatggctaagcaggccgcatccacaaagctgcaaactgaatctgaagctaaagctgaaaactttaaactgtagctggcttagccgagcgcagcttcgtggatcgtgagcgggcttaggataaagccagaccgacttcgaccagacgacagccgacagttgggacagtttggacagcagcggcaactggacggacttacggacaggcggacggacgggcaggacggtggacggtggacagcggacggtggacggtataattttgtgtaccccttttcggccaagctggcgtatcgacagcggccaagtatttagcggcagccgcaaccgaatatcaaaaacgtaacgacgtcacagcgaaaccctcaataaattatcgaaccttccagccagggtccgtacattcagatggggctaaggagcactgaaaccatgggcattgagtatggctaaatttgcaacttagtcggcattgtcaaggaagaaagtcgacgaaactagagcggtttttcggggactaggcgatactgcctaccaaaagcgaaagactaaagatcgcagggcagtcaagggaattagagctaagcaactggggattcatggcaaacaattaggcccagtggttctggatgtggttctggttgtggctgtggttgtggttgtggtaggtaggtaggcaaaagaggcaggagtcggcagcaccagcggcacacaatagaccaaaagtgtagtgggcagcaataaattcaaacggtaacaaatcgaggtgaaggagatcgagggagcacgcatactgcggcatggcccaatggatccccaaaggatcgagagtcgggatctcgggagctttggcaatatttaaacttgtcgtccgggggccgctctccatgcatccaatgctgctgaattcttggaaggcgaattactttgaaatgtgtcgatatgtcgcaacttttaaaagttatgcataaaggtccggcaaggcagccagactccagcaaaccagcaaaccagccagccagccagccagccagcctcattctcattctcaatcccgatctgagttgcggtgtggactgcaccagagtctgaatctgaatctgagccagagcctctgtctggctctggtcaccagcttctgctccagcttctttgcttactccgccgacacagcgacggtggcttgttgaagctaaagcggcctcctttgataatacaatagctgcacgcgcccaatttacatttatgtccgctgacattaaggagcgcaccgatgccgggagcccaggcgatccgttccgtttcgatctcgagttccagtttgtgtctctctggtgtctgataaatgcaaaggtataccccccccccccccacccctttcctttgctctttccatccagttgccccaatgccccctcgcttttttgatcttctgtgtgcgtgccagcgacgcgaaaattgtcgacgtatttagcagccccttttaaatatcattataaagaacatttcgtcggacatttttgccggcggtacgtaatttggagcagtagctcctcgggagagggattaacaacgatcatgaatgtgatacgaggcgggaacttgattcggtggataactccatcttgtatgaggcacatgcattggttgtgctacatagccaagttatcaattaattaattaattagatgataattaaaggttgatcaacattcttagcattgaaattatttcaattatgatcatcacaacagatttttttgtggaatggtaaatcagtctgatcaatttactacttacttttgaatattaggctgtgattaattttagaaagaaaagaatattttttcactcatatcatggtttctctcagtgtattatttacttatccattcttaccccacttcttccagttcgaaaaagtatccgcacgtctcgcgcactccggagtacagtcactccaccggcagcgattatccggagcacggtggctatctgacggatggacgcctgatgcacgagagcaacagcgatgccgggatctaccacgtgcgccagggaagcgagcactcctcgcccagtctgcactcgccagccatacagagctccggatacgagaatgagcacctgaacgaggcggttctggccgcgcacagccacagtcactcgcccatgccgatggtgtccagtgcctatgtgggcggaggaactgcctccggatcgctgattaacagcaatattcctctgctcggtggcggcggtaattccgtactgaacaaatttctatcgcatccgcacgctggcatggtgggcggtggaaccggacagatggaggactgcacatcgcactcgccaattgaagcggcgtccatgtggagctacgactacaagggcgacctgtgcgcgcccaattgtggctatctggagcgacacaagccgctgcccgccgaccttaagtatcggcccggcggaacccagtcaaaaagtgccaaagaatcgcgcatccggcggccgatgaacgccttcatggtctgggccaagatcgagcgcaagaagctggccgacgagaatcccgatctgcataatgccgacctcagcaagatgttgggtaagctattataggataaaggggatatgagatccaatatattttaatgtataaaatagttcatgtttaaaaagttaggatttaaggtttcaaagttaacccattcctccacactttatcttcatcttttcgctgcaggaaaaaaatggcgatcgctgacgccgcaagatcgcagaccctacgtggaggaggcggagcgtctgcgggtgattcacatgacggagcatccgaactacaagtaccgaccccgacgacgcaagcagtccaagctgcgggccatgcagccgggcggcaaggagcagagcgagagttcacccaatccgggcactggtggatccaagtcgaatcccaagctggccacaccaccgttggccaccgcatcatccagctatacaacgcccaccgacgaaagcacctgcaattccacgaaccagaatcacggacaatcaactccgggtggcctgtacgagcaaccgctgaagcccacgtactcgcccagttccgtggactgctacagcaatgcggacagcacggaacagatcgagtcactggccgccaactgtccgcccgccctgctcaatgaatcgtcgcccacgggcggtggctacgacaactcgctgttgctcaagaagttaaccaagccgtcgccgagtcgtgcggccaagtcgcgccaggagaagctggccaagtccgaggagaagaacaaggggtcacaatcgcagggacagtctcagcaaggtatatatgctgccacctatccgctagcacccacctccgtggccgtggtggccgccaggggtatgtacgtgacgtgcaacaatcggggattgctggatcatggtcactccgtcaagggcacattctatccaccagtatccgtttcggaagatgacaatagcacctcaatgcggaacagcattagtgctctgcagcagcactgtaatgtggtcacaagtacaccctcaagctccggcggcaccatgccaaccagcgagatgagcagctacacggtctccatggcggataactgcggaaatctcaggctcagcatgaacgagttgtccggcaatgagtatctgcccagcgccaatgcctatgggatgcaatacgaggacttcctgcgctatcagagcaacgatatggactactcaacgtcggcggtggagcacaaggagaccacatcggattcggcgagcggccagaagtgccttaagtatccggacacgaatcagaactacgacgactacgaggcggaggcctacagtaacgccatgctgcctgcaacggcagctagctactacacccaacttccgtatccgcccacctcgctggccgcctttcctctccagctggccgtgccgttccagcagacgacatcgggcgcctacggagcgcagcccattcagagtggttacctgcactacggcaactatggcggatacgagggaatggcccagagtcagccacagaaccaagcgcccgtccaccatcagcaggcatcccactcggctccgccctccctgtcagtgccacccaaccagacggtgacctccaattcggcagcaattagcatgcagcagcaccatcatcatcactttggacccgcacccggcatggtgggcgtgggcgtgggagtgggcgtcggagtcggagtcggtgagatgctcttcgagcagcagcagcgcaaagatgatgagattagcaacattctggcaggagtgcgcaagacctgctacagcaattgactctgatcagacgacatttgtaatatttcgagcatagagttttagagagtggtttaggtagtcttaagattgctttccgcacccacaatgttcttccagccccttccccataaaacctagtagtagaaccacccattgaattgtacaattattagaactgcatagatacgatacaaaacaaaaataagagacataacgaaataaagtaattcctaagtaatcgaaacgcataatcgatttcaatgtcaatgtggaacgcatcctcccagtgacagcttctttgggggtggaacgcggatggaccgtgaccatatgacactgacacagccacccgatatatacacgaccggatcctgcgcactgccagttccatcaggttggagtgcaaagattttcttttcctattcgcacggccacggattttccacgttacataaatttcgaaagcatttttcaactattttccgcatcggtaacgacagtttcagctcgctttttcaaactggacttcgagattcgagtgagcaaggatgtgcaagtatccgagaatcgcatgattaacgcgctccattcgcacaagggcgccaagttgtcgcaatcaaaggcgaaaatctgagtcaaaattcagttttattttctagattgttaatccccatgtgacgacagtagttaagaaattcgaataccattgcggaatctggaggccaacgaaattgttaaagaaaattctaataaaatcgatatacttcgcacgccttcttgacaccaccgcagccgccgccatcaggccaagaccacccccacctccaacactactaccaccaccatcgccatcgccatcgccataagccatttcagcatcatcagggccgttagtagccagcatcaaacatgtcattcatagccaaattgaaagccacgccattgccgccactgagaaacatactcaatgtggccgtgcaaacggcccgacagcaaattccagaacgcaaagactacgagcaaccgccgggtagcaccgcccagcagcaccaccacagccagcaggcccagcacaaggccatggaggcgggcatggatggcggagacaccaccgagatgagttcgaatccattccggaacgccggtagctggacaaacgatggcgagggcggtggcgatggcgatggcgagtataggaacgagtaccagagcacatccttcaatgagtacgacggcaggtatcagcaa

SEQ ID NO: 18323 - DNA, 3658 bp, DROSOPHILA
tcagttggcctgcggttcgtcatcagcgtggttcatgcggctccgactttcagttcgcctttaactctgactcaagccctggcatcggcggaactcggtagtgactctggtggctctccattgacatcgccatctgcgtccccgggctgtaatcataaatatatatatatctacatacaaactggcccgctgtacataggcccagttagttagtttgttagttagttagttagttacttgcttagtagttgctgttgtgccgtgaattttcattttcccaagagcgctatccgctgtttgtatcttgtgaaatgtcgaagcccttgattttaggctacggatacgttcgttagtcaacctttaaacagctcgctttagggccaaaaactaatgaacaagtgattttaaagaacgtagatcaataccggtaaaactatgtaaaaagtgacacaatctgtttaataaaaagtttacatcgttccggtgttgaaaagtatcttttcaacaccaagtgccaatcgaaaatccaaatttgaagtgtgtatttttcaatatcttcaaaataatcaccagtgaatagtgagattcaaaaatatatttacatcactcggtgattgcgaaattgtggccaaaatgtgggttaggctctgagccacaaacaaaacaaaatctgacaacaaatggacgcaaattcacacatgccgtggcacataaatttatggttggaactgtaactgggcaaaaatgctcggcccggcagacatcagtagcagtagtagtggcaccaccatcaccaccagcgaaccaccaaccgccaccacccaccaatccacccgaaccgccgacaaagggaaaaactaacggaataatgcaacattaagcaaaatgctgctggccctgctaaagcaaagccaacaacaacaacaacaacaccaatttcaacctgccaccaccgacgtcagcaacagcaaaaacaacagcaacaactacaacaacagaagcaacaactgcaactgcaacaacatcaacgtcaccgtcaccgttaccacgaacatcgccgttgccgtataaaaatggaaccctcatatgatcacgaacatccacatcatctgctaacaaattacaattcgaaaaagtatccgcacgtctcgcgcactccggagtacagtcactccaccggcagcgattatccggagcacggtggctatctgacggatggacgcctgatgcacgagagcaacagcgatgccgggatctaccacgtgcgccagggaagcgagcactcctcgcccagtctgcactcgccagccatacagagctccggatacgagaatgagcacctgaacgaggcggttctggccgcgcacagccacagtcactcgcccatgccgatggtgtccagtgcctatgtgggcggaggaactgcctccggatcgctgattaacagcaatattcctctgctcggtggcggcggtaattccgtactgaacaaatttctatcgcatccgcacgctggcatggtgggcggtggaaccggacagatggaggactgcacatcgcactcgccaattgaagcggcgtccatgtggagctacgactacaagggcgacctgtgcgcgcccaattgtggctatctggagcgacacaagccgctgcccgccgaccttaagtatcggcccggcggaacccagtcaaaaagtgccaaagaatcgcgcatccggcggccgatgaacgccttcatggtctgggccaagatcgagcgcaagaagctggccgacgagaatcccgatctgcataatgccgacctcagcaagatgttgggaaaaaaatggcgatcgctgacgccgcaagatcgcagaccctacgtggaggaggcggagcgtctgcgggtgattcacatgacggagcatccgaactacaagtaccgaccccgacgacgcaagcagtccaagctgcgggccatgcagccgggcggcaaggagcagagcgagagttcacccaatccgggcactggtggatccaagtcgaatcccaagctggccacaccaccgttggccaccgcatcatccagctatacaacgcccaccgacgaaagcacctgcaattccacgaaccagaatcacggacaatcaactccgggtggcctgtacgagcaaccgctgaagcccacgtactcgcccagttccgtggactgctacagcaatgcggacagcacggaacagatcgagtcactggccgccaactgtccgcccgccctgctcaatgaatcgtcgcccacgggcggtggctacgacaactcgctgttgctcaagaagttaaccaagccgtcgccgagtcgtgcggccaagtcgcgccaggagaagctggccaagtccgaggagaagaacaaggggtcacaatcgcagggacagtctcagcaaggtatatatgctgccacctatccgctagcacccacctccgtggccgtggtggccgccaggggtatgtacgtgacgtgcaacaatcggggattgctggatcatggtcactccgtcaagggcacattctatccaccagtatccgtttcggaagatgacaatagcacctcaatgcggaacagcattagtgctctgcagcagcactgtaatgtggtcacaagtacaccctcaagctccggcggcaccatgccaaccagcgagatgagcagctacacggtctccatggcggataactgcggaaatctcaggctcagcatgaacgagttgtccggcaatgagtatctgcccagcgccaatgcctatgggatgcaatacgaggacttcctgcgctatcagagcaacgatatggactactcaacgtcggcggtggagcacaaggagaccacatcggattcggcgagcggccagaagtgccttaagtatccggacacgaatcagaactacgacgactacgaggcggaggcctacagtaacgccatgctgcctgcaacggcagctagctactacacccaacttccgtatccgcccacctcgctggccgcctttcctctccagctggccgtgccgttccagcagacgacatcgggcgcctacggagcgcagcccattcagagtggttacctgcactacggcaactatggcggatacgagggaatggcccagagtcagccacagaaccaagcgcccgtccaccatcagcaggcatcccactcggctccgccctccctgtcagtgccacccaaccagacggtgacctccaattcggcagcaattagcatgcagcagcaccatcatcatcactttggacccgcacccggcatggtgggcgtgggcgtgggagtgggcgtcggagtcggagtcggtgagatgctcttcgagcagcagcagcgcaaagatgatgagattagcaacattctggcaggagtgcgcaagacctgctacagcaattgactctgatcagacgacatttgtaatatttcgagcatagagttttagagagtggtttaggtagtcttaagattgctttccgcacccacaatgttcttccagccccttccccataaaacctagtagtagaaccacccattgaattgtacaattattagaactgcatagatacgatacaaaacaaaaataagagacataacgaaataaagtaattcctaagtaatcgaaacgca

SEQ ID NO: 18324 - protein, 784 aa, DROSOPHILA [sequence omitted]

SEQ ID NO: 18325 - DNA, 2558 bp, DROSOPHILA
aattttattaacaataatgaattccagacaaaccgaagatcgatatataaactgtagtcattatatctaggatatagattaactgacatcaactaagcttaaattaaacggttgtatttcgattaaaatccatatttaaatgtgccaagtgtaagaactgcaagctaatattgtaataatcttgttagaatctcgttttattaatacttttgtgctatgaataacatttgcaaatcatctaacttcagcatttatttttgggtcattaattccatttaagactttacaataaaccgttacccccaagttgtattaactgacaagctgttgacattttgagtgcatcatcggtggtgcgggggtgggtttcccagaacatgggtgaccattcctcccccagctgaccactttcattgcacaaatcgctgcgaaaattggggttgccttgccgccaagatgaggactatgacgccgcgtcgtctgtctcgctgtggcacccgcacggaaattgcttttgtttgcaactgaatcaggggatgcaggatgcagggagggagcaggacatgcagacttggcgcaaacgcagcgcacaccgagtagtgtagccattaactccctaagctcacacaagttcctgccccggctgtggttgccagttaatggagttggcgtcagcacggagccggcggatccggagccatcgttagttgtaagtcaacctcgctcctgacaggctggcaggccaatcgaaagcgaaaccgtgtgcccgaaaccaaattgccatagcagccaaactgccgtgacaatagcgcaaaaacgaaggattcataaacatttctcctgccattcacctagctacactagtgctgcctttaccttgacttgtgtgtcacatgtaaataggaatttaactcgatttttattacattagcgtggctccgtgatagtgctcgctcgcctgggtgatagtccttccaacattcgttggtgaatcgcagacatggcagacgaggaggccggcaaggagggcgagaagaaaatcgtgcacgtttatcctctggttaaggttggttaagtatagagttaactacattccagactatttgctgatggaatccactcccgatttaagcacaccgatatgaacgaggagatgcggatagaggccattgaactgtccattaccgcctgcgagaaatactcatcgaactacgaggtaattaagataaatcctttcactttgaacgggctaatccattactttctcattgagaagttctcaaaagattatcaagttggttgtgttaaaagtgcaataattggctttgaaactaaactccttttcttattacatatatatatttctatttaatactttaaatctacctccaagcacgctgccaaaatcatcaaggagaacatggacaagaagttcggcatctactggcatgtggtcgtgggcgaagggttcggctttgaggtctcctacgagacggagaacattctttatctgttcttcgccggcaacctggccatcgtgctgtggaagtgctcctgaatgcgggtcagcagtgacactaacgtacctagaaaccggaactggaaccaaaaccgaaccaaacaaaaatttagcattaattttagtcatacacacagaacactcaccgtagttaacgaatgttatgaatattaagccgcgcggaggcggcggaaataaatcccctggcaaccatgtgacttgttgggaaaagaatggtttttttttattacaaaatgtacctacatgctagcatattgaaaacaggcttataaatttgtttgtatgcactaaaacgagaaccctaagactccatatgcgcaccgcttacgcgtacacatcctcccgatccgcaccggcgccatcgccgccgtcctcgagattcgagaagagcaggaaatgcgaggtgcgatgcaactcgtgatagaactccttcgggttggccagctgcagttcgtacttcatgttgggatcgtggcgcacgcccatgaagttgtagttccagctgctttgcgccggcaccatgaagaacccaaggaacttgttcgacaacagcatctgaacgcgttcgtagtgcgaaggcaggtatcccttgggattgttacctttgtccgtgttcttggagccccactcgaagcccgaaggcgtcagcttgtaggccgtaagtgagcaggagccgggcgtaaaggagcacgtgatcacgatcgtcttctcgccatcccagttggagttctcctgcatgatcttcgcgtgcgtcgtaatgtcctgcggtgacaattggggcagctcgttgggctgcgtgtggatccagcctagcggctccatgtccttgagatactgatgtgtgggcagggtgttgggcaagttgatcgtctggtgagtgccccattgcggcggcattacgatgcagcgaatctcctttacctgcggattgtccggtggacttacaccatacaagtagccagctatctgggcccgcagatccgagatcgtgacaaacttcttgagtatgttcttgggc

SEQ ID NO: 18326 - DNA, 315 bp, DROSOPHILA
atggcagacgaggaggccggcaaggagggcgagaagaaaatcgtgcacgtttatcctctggttaagcacaccgatatgaacgaggagatgcggatagaggccattgaactgtccattaccgcctgcgagaaatactcatcgaactacgagcacgctgccaaaatcatcaaggagaacatggacaagaagttcggcatctactggcatgtggtcgtgggcgaagggttcggctttgaggtctcctacgagacggagaacattctttatctgttcttcgccggcaacctggccatcgtgctgtggaagtgctcctga

SEQ ID NO: 18327 - protein, 104 aa, DROSOPHILA
MADEEAGKEGEKKIVHVYPLVKHTDMNEEMRIEAIELSITACEKYSSNYEHAAKIIKENMDKKFGIYWHVVVGEGFGFEVSYETENILYLFFAGNLAIVLWKCS

SEQ ID NO: 18328 - DNA, 5973 bp, DROSOPHILA
aatgtgccgagtatttcattgggttgcttaaagaacttgaaatgagaactttaatttaaggtgcaaaccaatatatacccttgtatatagcggatattcaatgttattaaatatttaatataacttttatttagattgaaaatgggtatagtgtgcattgagaattcaatcgaaaaggtttataaacgatttaacatttacacaaaattaatttgtgaaaaaatatggtttaaaatgtagttttaatttaattaatgttaatttttcaattttccaagaccagttctttttcattgtagtatagtatacccaaataaagagccacaaatgttgtgttgatactcgtatttacataaaaagcccaaacaggcggctttaacgaaagcgttgccatcaaatctgactgccaatgtccaccaaccaccattccgagaagagaactttcaaagcggacaatcgtgtgtaaaaagaaagtaggtgggtaggtaggaaacataaacaaagtgtgagccatagaaccgggtacacataaaaaaaaaggttgcaaccataatttctttatttgatctctacaaaatgatactacttttgataatagagaaagtgttatgattatcttaatatgttattttgatctctctatataaacatttaacttaactctatcccaacacaataagcggttctgatctttgcataacaattttttttctctgtaaaaaccaaagctcttctgctctttcttcgccctctcttttgtctcgtttttttttctgaagacggcgaacctgacgtggtgttcaaagcgcaggcgtaaagaattccattccgcgagagagagtctgtctggaaacaggtgagagcggcgaatagagttggagatttggatccgaagaaaggggagtccagagagcgctcacatcgaacatgttcgatggcccccaaagaatcgttggcttaagaagtgttacaaactggcccagagccgcagaagaaagaaagttttcggctgtgctggctgctctacgctgcgatctccgttctccgttctccaatctttgtaatatctgtttagatatacatagttatagtatatacatacatatatttcgtgtgctcagtggagcgtcttccgcgttttgtggctgcgtcgcttaattggcccaaaagtatctcaagtgtgtgattgtgaaagttcctgaagcaaaatgtacgtgagacgagctctgctcttggcctgcctgctgtgcctccagccgctgggtccatctatggccagcgaggatgagtccaatccgctgctggacatggcctccatgttcttccaggaggcgctgtccaaccagaacggtggcaacaatggaggaggcggtgctggtttggcgggtgtggcctcgctaattggcaccttcatgcaagcgagtggcaaatctggaggcgccggagcaggaggcggcggtgctggtggcgccatgcagatcctctcgggcctgggcagtcttctgtccaagagtcagggcggtcagagcggtggcttcgatccctccatcattggcaatgtcctcgagatgttcacccagggcgatgacgaggaagccactccacagcaaaagcgcagcaatggcggtggctctgaatctggcattggtctggataccatactgcaagtggcatccgccttcatgaacacccagggcaacgataaggccacacatcatcaccagcagaagcgatccaccgccacggaaccggaatccgagaacggactgatgaaccttctgccactggtcatgcaggcggttagctcctttgccggtcccgagggtcagagcacccaggagaagcacaagagccacgcctgggtgctgcccccattcctggagcacattcacgtgctgtgggatcacttctccaactccgagctggctgatgcgttgtacgagaagtccggagttaacaaaatcatgaaggtggatgcataaatcagacttaactatatattgttgacgttttgatgttagaacattttattagattttagtacgctttttgcataaaatatagcactttttaatacaatattggaaaatattcaacatattaaagaccttaggaacacattaagagtaaactattttgactacacatgcgtaaacaaaatgtagagaaaatctttaaaacaaaataatctatatatactcatttaaattgatatagaaacaattagcggaaaaaaaaacaatttaaaatttgtttcctagctaaaatacaaattcaaattctgaaatgttacgctactaaaataatatgttaaataccaatttgtaatgctaattactctactcttatccacctccagggcttcaagggttccgatggcaagctggactatgataagctcttcgagtcgctgaataaccaatccttccgtcgccgctggatcaagtcggccacactctacctggccgactgggccagctacctggccaatcccgaggtgtatctcaggtgagtctcggccggccaacgtggctcgatcttcagcgatggccaaagcgtgttaattgtggatcacgttctgctctgcaacggtcccagtgcatttagcacctggctgccattcttggtcacactccaagaccaccttccagtccaaatccgatgcccattccgattctaattcagaatcagatttcgaacagctgctggcaaagcctgtgctaaccatttcccgttagcgacaacccgtttggccatcgagcatgttcgatgcggctaccttttgacccacttttttcggtgctggtgctgcttttagaacgtgcctgctaatccaactggtcaacaacagtggcaagtaccaagtccaggcactgatacagttacagttgatatgcagaagatacagaagtcaacggcatcgttaaaacaaacaaataaataaagcgggccaaaaccggttggcggttttagccaggggaaattgccttggcagaccgggtacacatgtctgaaaaatcaagtaattcttatctacaaatcttctcaattcataatgaccaatcgaaactgttatttaaaatgcaatagtataagtattaattatatgtattccttaagcaaatctccaaaactatgaatacttttcacataggaaaaacgacttgggaattataagaaatcagcatgcagcgagcagaaaaacattaatttaagcaatttttctttgtgtacacattggattcagacatttttgcatgattcttaagtaggtcaggcttctcagacttcttggtcttcttattttttgtttgtttttgttttgcgttgcccccaacgttagacaacaacaaaagcgcacaacaacttccactttctagagaccctttcactcggcggtgctgcgtgattgaaactcatcaatttgcccgcttctcggcactttcttatacaggtacttccagacggcacagatcatgtttaacggcttgctgaagtctcaaggttaccccaagcagacccacttcgatccctcccgtccgggcgagaccatctcgaatctcttggaccatgtggccaagcatcatctgaacgttaagatcgattcgaggcagtacgtcaagccagccgtgggctatgccaaggaactgctaaaacttggccaggcacgcggattacttcagttcaatgccaccgagatcagcgacaagctaacggatacgcttaacctggaggtaagcagattctctgaactctgaacttaactgatatgggaactgggcaacgcagttggtaattggagatatatatctgagaataggaaatagctgaggtgaaaataatagcactaattaaatagtaattctgtttaaagttatgtactatatgatccttatatgtatgattactttactgaagttgctgatagtagctaaagtataaagtataaagtactaaaggagctaataggaactgattacattactgaactatatcattgaaaactataactaatttatcccatatgattcttgcaaatgctttgacccatttcgacgtaaaatgaatttgttataattgaataacttggcccagttagatgtactaaacacttagtttgaagcaaatcaaattaattacgccactattttctcctccacgcatccgtcaatggatcaaatggcaaacaggttattgaaccggtgctgaaagtccatcgcgcctacagatacatctccaagtcgccgcaatgcgatcgctacgtgctctgtcagctgaatgcagcggctctcgatcagcaggagaagcagaggcagcacgaccaataccagcagcaccaccagcccaagcagagccaactgaatcgcccgacatcggcgtccagtctaattgccggagttagtccgaaaatcgttaagatcgggagcatgggtgcggcaatcttcattagcacggaaaccggtacgccgttctggaccctcttcggtgtgatcaatgcgccatacaattgcgaggtgagtaataacggccacagtgatgcactgaaaagaaatggaatacatctagcatgaagatgatgaaatctctaaggggatataaaagataactaaaagtatgctgcgttacgtagaacgtattcttttggtactctttttgtacgagtaaataatcatatatatttttctctctctgtacttccatttgtcgccgctttctaaccgatatttctgcgattgcacgccaacaggccaaatatccagtcgactgcaatggtttccacgagggcgaggccaaggtgaccacggaatatatccacaacgagttgtagtattccagttgcaaatggacaagcgagatccggacaagaaaagtagaagacgaaggctcattaagacgatttagctgtaattgagataaagatttcgtgtgtatatagtattacggattgaaatatatatttaaatttaaacagaaccttttattttaaactgtgtcataagggtcatgagatggttatctaactatttctaatcatagttgttgtctacagattttacgatctatttgaagtcaacgaaccgcaaaagaaaagccatccaactacagtcaaacttagctaagtgagatcactttaaataatcagaccaataagacaattttcaggattttcactttaatgattttgaattttagttattcaaaaacctgatcttagtttcaggcaacttattgaagccttaattcaccttacaagagctttttttgctgcacaaaccagttcgtgttggtggaaagtcccatttcagtgcctcgtttgaacttgcacttgcacttgccactcgacttgactttgacttcattgtgctttggtaatttggccaaagcagttgaaagatacaggagccatgcagctaatttatcgtgaactcgaggaggacatacttcgacgcactaatgcagtctttccggtacaaaattgctttgttgaggtcctccccgatcagtttatcattcccagaaagtacgtggagctgggcgaatcgattcgatcgcttcccgtttaccaggacgacgtatggatggtgtcctatccacgaaccggatcgacgtgggcccaggagatggtctggctgctgggtcaccaattggattacgtggccgctgagcaagatttaagattgcgatctccgctcattgaactatccgctttgtttagcatcgatcatcacgagacggtggcgtgagtatgaagaaactatatcattctgaactcatatacacattacttgtacactaatgtatatatatataagtgagtgaagcggggaaaaattcatattcaaaaagctttttcacctctttgcactttctcctcgcctgacagccaaaagtttggcaataccgtggatctggttcgcaatctgccacgcccacgttttgcacgctcccacctgccgtggcctttgctacccg

SEQ ID NO: 18329 - DNA, 1949 bp, DROSOPHILA
agttttcggctgtgctggctgctctacgctgcgatctccgttctccgttctccaatctttgtaatatctgtttagatatacatagttatagtatatacatacatatatttcgtgtgctcagtggagcgtcttccgcgttttgtggctgcgtcgcttaattggcccaaaagtatctcaagtgtgtgattgtgaaagttcctgaagcaaaatgtacgtgagacgagctctgctcttggcctgcctgctgtgcctccagccgctgggtccatctatggccagcgaggatgagtccaatccgctgctggacatggcctccatgttcttccaggaggcgctgtccaaccagaacggtggcaacaatggaggaggcggtgctggtttggcgggtgtggcctcgctaattggcaccttcatgcaagcgagtggcaaatctggaggcgccggagcaggaggcggcggtgctggtggcgccatgcagatcctctcgggcctgggcagtcttctgtccaagagtcagggcggtcagagcggtggcttcgatccctccatcattggcaatgtcctcgagatgttcacccagggcgatgacgaggaagccactccacagcaaaagcgcagcaatggcggtggctctgaatctggcattggtctggataccatactgcaagtggcatccgccttcatgaacacccagggcaacgataaggccacacatcatcaccagcagaagcgatccaccgccacggaaccggaatccgagaacggactgatgaaccttctgccactggtcatgcaggcggttagctcctttgccggtcccgagggtcagagcacccaggagaagcacaagagccacgcctgggtgctgcccccattcctggagcacattcacgtgctgtgggatcacttctccaactccgagctggctgatgcgttgtacgagaagtccggagttaacaaaatcatgaagggcttcaagggttccgatggcaagctggactatgataagctcttcgagtcgctgaataaccaatccttccgtcgccgctggatcaagtcggccacactctacctggccgactgggccagctacctggccaatcccgaggtgtatctcaggtacttccagacggcacagatcatgtttaacggcttgctgaagtctcaaggttaccccaagcagacccacttcgatccctcccgtccgggcgagaccatctcgaatctcttggaccatgtggccaagcatcatctgaacgttaagatcgattcgaggcagtacgtcaagccagccgtgggctatgccaaggaactgctaaaacttggccaggcacgcggattacttcagttcaatgccaccgagatcagcgacaagctaacggatacgcttaacctggaggttattgaaccggtgctgaaagtccatcgcgcctacagatacatctccaagtcgccgcaatgcgatcgctacgtgctctgtcagctgaatgcagcggctctcgatcagcaggagaagcagaggcagcacgaccaataccagcagcaccaccagcccaagcagagccaactgaatcgcccgacatcggcgtccagtctaattgccggagttagtccgaaaatcgttaagatcgggagcatgggtgcggcaatcttcattagcacggaaaccggtacgccgttctggaccctcttcggtgtgatcaatgcgccatacaattgcgaggccaaatatccagtcgactgcaatggtttccacgagggcgaggccaaggtgaccacggaatatatccacaacgagttgtagtattccagttgcaaatggacaagcgagatccggacaagaaaagtagaagacgaaggctcattaagacgatttagctgtaattgagataaagatttcgtgtgtatatagtattacggattgaaatatatatttaaatttaaacaga

SEQ ID NO: 18330 - protein, 531 aa, DROSOPHILA
MYVRRALLLACLLCLQPLGPSMASEDESNPLLDMASMFFQEALSNQNGGNNGGGGAGLAGVASLIGTFMQASGKSGGAGAGGGGAGGAMQILSGLGSLLSKSQGGQSGGFDPSIIGNVLEMFTQGDDEEATPQQKRSNGGGSESGIGLDTILQVASAFMNTQGNDKATHHHQQKRSTATEPESENGLMNLLPLVMQAVSSFAGPEGQSTQEKHKSHAWVLPPFLEHIHVLWDHFSNSELADALYEKSGVNKIMKGFKGSDGKLDYDKLFESLNNQSFRRRWIKSATLYLADWASYLANPEVYLRYFQTAQIMFNGLLKSQGYPKQTHFDPSRPGETISNLLDHVAKHHLNVKIDSRQYVKPAVGYAKELLKLGQARGLLQFNATEISDKLTDTLNLEVIEPVLKVHRAYRYISKSPQCDRYVLCQLNAAALDQQEKQRQHDQYQQHHQPKQSQLNRPTSASSLIAGVSPKIVKIGSMGAAIFISTETGTPFWTLFGVINAPYNCEAKYPVDCNGFHEGEAKVTTEYIHNEL

SEQ ID NO: 18331 - DNA, 4665 bp, DROSOPHILA
aggacgccgcgtgggggatcgatgcctggaagagaattagtggaaatagtcttttgatattgcgaatacccaccaatttgcttgtaaagctgggcgtgggtcaagggcagctcgacagcctcgcgtatctcctgtttctggatgtccaagcctccaatgtcggagtagctgatatccggtttctcatccggcgatagcatcgatatggtgctgtccgcctccggtggcaccagatcgaccagacaattgctttgcttgtgcagcccaaccgaagaggacggcttcagttgctccctgtcaatggtggatagcactcgaacatagtaattggatccggtggtggaggccactatgccgttgttttcatccaccgcctccagaaactggccaatgaccagaggcacggcttttatgcgcttaacttcctcctgagcgtgtatgaactccttcttcagattgcgttgctcctccttgatataatcctcctgcacctggatgagctccagctccatctgaagcttcttatatagtacatacagatcatgcggatccagtccatcatacttctccagcgactgctcgtgaaactgggcaatttcctcctttaacaaacgcattttcgtcttatccctgtggagattcgattcgaagtgaaaggcaatgacacgaattttcaaaggctaaagcaggttatcgtaaaaaaaatatcgataactgttaacaggataagaatggcaatactaaaaaagcttcaatacatgagcgtaaccagaaacaattatttaatacttattgaatgcgaagttatgatatattgtattttcaaactatgttgattaagcccgatcgatatataaaaattatacaatttctaaaatgatttttaacgctccttcgaaacttttcgcgtcgccacgtgaatggcaatcagctgttgaaccgacctgttgtttttcttggatttgtttttgttgtgcttgcttttctgcctccgacgtggagcgatctatttatatatctattttggtttattttggaaccacaaattctcttcggcataggaaaaatatatatgcctaggcattgacactttttgtgagacattcaaacacttagtcaaagaaaggtggctagatatcgacattgtgcaacgccggcttcgattgggaaatcttcgtcagataccatcgcgcagaaatttatagattttccaacggactagaatatatagatatcggtgtcaaaacaaatatggccattatgtaacgccccgattcctgtccagcacactttgcacaccagcgacacccgacagccaaaaccgcccgcaacatggacatcctaatctttgtgacggcggcggcccatttggtctacacgccctttacgaaagtggaggagagcttcaatctccaggccatgcacgacattctttatctgcgaaacaactttacgcaggtggaggacaaaggttccccaaacctcctgccagatcactaatatctttctgaatttcagtacgatcaccatgactatccgggcgtggttccacgcaccttcatcggcccattggtggtgtccattatctcagccccgtttgtcctgctcttcgagacccttagcatcaacaagttctgggcccaatatgtaggtaaaatcagcatttcaactgcctatttcggagtgttaattgattatgaaccccttagtgcgccttgtcttggctggggccatctctgtggcctggaacagcctacggcaggcggtgacaaagatttacggagttgaggtccgcctgtggttcacagccatcactattacgcagttccacttcatgttctacatgactaggcctctgcccaatatctttgccctgccgataggtaagccaagttgacggtctctgctatgctatgtacccaatattattagactttttcttgttgcagtgctctttgccattgcctattggctacgcgaccagcacaagccattcatcatctgctctggtatatccattctcgtctttcgatccgagttggcgttatttttgggtattttgctggtggtgagcctcctacggcgaaaagtttccattgacgggtgaagattatcaatcattgcatactattcaatgctaatatttgtaaaaataggctactcaaagttgcactgccggcgggcgtctgcattttggctgccacagtgctggtggactcgttcttttggcgccgcctgctttggcccgagggtgaggtgctatggtacaacaccgtactcaataagagctccaactggggtacctcgccttttctatggtacttttactccgccctgccacgtgccatgggtgcatcgctggtgctcgtgcccatcggcgtcgcattggagccacgtattcggccattggtcctgtcggctctcctctttgtccttttgtactccattctgccgcacaaggagctgcgcttcatcatctacgtgtttccagttctcaacattgctgcggcttgcgcatgccaacgaatgtaagcgtcgtattatttcattagtaaaatgcatttctattattggtttcctcgtttagttggatgaacagcgccaagtcaacgtggcatagctttctggcgctcgcctgtggagcccatctcctgctaaatgtctttataacgctcttcctgcttgtcatttcgggcaccaactatccgggcggagcagccctctcccgattgcatcgcttggaagctggcacctcaaacgtttccgttcacatttccaacttggccgcccagagcggcgtgtcgcgttttatggaaataaataatgaatggacttacagcaaggacgagacaatgaactatacccaggcggatttggttgcatacacacatcttttggtcgaggcgaagaacaagcaaaacactgaactatgggcatcgctccaaaacgaattcgatacgctagagtttattgactgcttcaacagcatcggcattcaatacaattctctgctgccggtgcgaataaagacgaagccttgcattggtatacttaaaaagagaccagtggctccaaaagaggcatcaaaaacaaaagagaaaatagcaaaaactaagacatacccggtggaaaaagaaacgttattagctcctgttaaagaatttccaaaagtgataggagatccgaaaatgaaatccaggttacaagtcgatgcggatgatgatgatggcatcgtgtccactgtggaggaaatgtcgctagaactggaaacggatactgagccccatgctggggcagagaccatcgaaacgcccttgaaggagatcaatttccaggagctgagaaccctcgccttgggacaggcaaccaagaagtcgagagcagccaccaagatgaagattcgacaaattatcgagcagcactaccgcgccaagggcaaacaaatcgaaaacgactccgcagagacccaaaaaacgcaaggaaaggctggattacggcaatccgtaaagtccatcataaagcaggagaagatcaaggaaatgatcgagcagatcgctacgatggatctgacacgcatctgcgatttggaaaggacttcgaccaaagattgcttaaaacaggtcatagacaaaatagatgacagcgagggtttgaaatccaaatgacaaaacctatcacactttaaactgttttattaaattaagctaagcgtttgttaatggcacagttgtaaaaatttaaaataaaagcaataataaaagcgaatcaaaatttcaggaatttcctatatcttgatagaaaattaagtcgcggccaaatcgcacccgaatcgcgtccgaatcgcgctaaagtcgcctcaaaatcccccctaaatcgcatctaatcgcgcctaattaagctcaaacgctctaactaaacataaattgccaaatagagtatgacacattacggcacgtcggatatattttttgctgaccaaaaataaatataaattaaattatagagtattaaagtatcgtcatatatgtagaactagtcattagggatatcgcaatatccccatctctagcttaaacgcgatatatgtatttaaagtaacagtggtggaaacacaccaaattatttcggcaataaaatcgaaattacaaacttccagaaagctgttatctatataaaaaggtgtgataagccttatgtcgcaggtgtatcaacgctaatccacttaatggcgctttcaccacagaccaacccctctcacacgtatccattcaccagcaatcatatgttttcttatcaccttcaggttgacctcaaacgcagtacggcgaattttggaaggcaatcggtgcggtgaaatggagctgactggatgggtgaagaactacggctggggccgcaagggcatcaactcggcggtggcccagctggcaatggccaatgatccggactttcgtctgaacgaggaggagacctatgcggaaatgtggatgggcacgcatgtgtgcggtgtgtccgtggtcaaggaaaccggagagactctggaccgagtgctaaagaaggacctttcatacctgttcaaggtgctaagcatcaacaaggcactcagcatccaggtgcatccgaacaagtgcgaagcggagcgcctgcacaaggagcgcccggata

SEQ ID NO: 18332 - DNA, 2369 bp, DROSOPHILA
agcgatctatttatatatctattttggtttattttggaaccacaaattctcttcggcataggaaaaatatatatgcctaggcattgacactttttgtgagacattcaaacacttagtcaaagaaaggtggctagatatcgacattgtgcaacgccggcttcgattgggaaatcttcgtcagataccatcgcgcagaaatttatagattttccaacggactagaatatatagatatcggtgtcaaaacaaatatggccattatgtaacgccccgattcctgtccagcacactttgcacaccagcgacacccgacagccaaaaccgcccgcaacatggacatcctaatctttgtgacggcggcggcccatttggtctacacgccctttacgaaagtggaggagagcttcaatctccaggccatgcacgacattctttatctgcgaaacaactttacgcagtacgatcaccatgactatccgggcgtggttccacgcaccttcatcggcccattggtggtgtccattatctcagccccgtttgtcctgctcttcgagacccttagcatcaacaagttctgggcccaatatgtagtgcgccttgtcttggctggggccatctctgtggcctggaacagcctacggcaggcggtgacaaagatttacggagttgaggtccgcctgtggttcacagccatcactattacgcagttccacttcatgttctacatgactaggcctctgcccaatatctttgccctgccgatagtgctctttgccattgcctattggctacgcgaccagcacaagccattcatcatctgctctggtatatccattctcgtctttcgatccgagttggcgttatttttgggtattttgctggtggtgagcctcctacggcgaaaagtttccattgacgggctactcaaagttgcactgccggcgggcgtctgcattttggctgccacagtgctggtggactcgttcttttggcgccgcctgctttggcccgagggtgaggtgctatggtacaacaccgtactcaataagagctccaactggggtacctcgccttttctatggtacttttactccgccctgccacgtgccatgggtgcatcgctggtgctcgtgcccatcggcgtcgcattggagccacgtattcggccattggtcctgtcggctctcctctttgtccttttgtactccattctgccgcacaaggagctgcgcttcatcatctacgtgtttccagttctcaacattgctgcggcttgcgcatgccaacgaatttggatgaacagcgccaagtcaacgtggcatagctttctggcgctcgcctgtggagcccatctcctgctaaatgtctttataacgctcttcctgcttgtcatttcgggcaccaactatccgggcggagcagccctctcccgattgcatcgcttggaagctggcacctcaaacgtttccgttcacatttccaacttggccgcccagagcggcgtgtcgcgttttatggaaataaataatgaatggacttacagcaaggacgagacaatgaactatacccaggcggatttggttgcatacacacatcttttggtcgaggcgaagaacaagcaaaacactgaactatgggcatcgctccaaaacgaattcgatacgctagagtttattgactgcttcaacagcatcggcattcaatacaattctctgctgccggtgcgaataaagacgaagccttgcattggtatacttaaaaagagaccagtggctccaaaagaggcatcaaaaacaaaagagaaaatagcaaaaactaagacatacccggtggaaaaagaaacgttattagctcctgttaaagaatttccaaaagtgataggagatccgaaaatgaaatccaggttacaagtcgatgcggatgatgatgatggcatcgtgtccactgtggaggaaatgtcgctagaactggaaacggatactgagccccatgctggggcagagaccatcgaaacgcccttgaaggagatcaatttccaggagctgagaaccctcgccttgggacaggcaaccaagaagtcgagagcagccaccaagatgaagattcgacaaattatcgagcagcactaccgcgccaagggcaaacaaatcgaaaacgactccgcagagacccaaaaaacgcaaggaaaggctggattacggcaatccgtaaagtccatcataaagcaggagaagatcaaggaaatgatcgagcagatcgctacgatggatctgacacgcatctgcgatttggaaaggacttcgaccaaagattgcttaaaacaggtcatagacaaaatagatgacagcgagggtttgaaatccaaatga

SEQ ID NO: 18333 - protein, 678 aa, DROSOPHILA
MDILIFVTAAAHLVYTPFTKVEESFNLQAMHDILYLRNNFTQYDHHDYPGVVPRTFIGPLVVSIISAPFVLLFETLSINKFWAQYVVRLVLAGAISVAWNSLRQAVTKIYGVEVRLWFTAITITQFHFMFYMTRPLPNIFALPIVLFAIAYWLRDQHKPFIICSGISILVFRSELALFLGILLVVSLLRRKVSIDGLLKVALPAGVCILAATVLVDSFFWRRLLWPEGEVLWYNTVLNKSSNWGTSPFLWYFYSALPRAMGASLVLVPIGVALEPRIRPLVLSALLFVLLYSILPHKELRFIIYVFPVLNIAAACACQRIWMNSAKSTWHSFLALACGAHLLLNVFITLFLLVISGTNYPGGAALSRLHRLEAGTSNVSVHISNLAAQSGVSRFMEINNEWTYSKDETMNYTQADLVAYTHLLVEAKNKQNTELWASLQNEFDTLEFIDCFNSIGIQYNSLLPVRIKTKPCIGILKKRPVAPKEASKTKEKIAKTKTYPVEKETLLAPVKEFPKVIGDPKMKSRLQVDADDDDGIVSTVEEMSLELETDTEPHAGAETIETPLKEINFQELRTLALGQATKKSRAATKMKIRQIIEQHYRAKGKQIENDSAETQKTQGKAGLRQSVKSIIKQEKIKEMIEQIATMDLTRICDLERTSTKDCLKQVIDKIDDSEGLKSK

SEQ ID NO: 18334 - DNA, 3250 bp, DROSOPHILA
tctggcgcagcacttcctggcagtcatcgtccgagcacagcgagtggatgtcgggctgcgactccaagtcggagcaatccgactgggaggacgacaacgacgacgcccgggagctggcctcgtacaggctgccaccagccgagtcgaccgaagacttacggctgtagcctacacggaaggaattaacacattttagcataataagtacttaaatggttagttattattactcacccgtcaagagcgatgccctatcgtgatctgttctgtggtggacagggacatcaggaccaccacagaggccctacgccgagagagatgcggtaggactccgaggacatggtcgtggcgcaagacgaagtcgagatggtgcggagcttgccgtcggcaattccgctgtcattaaattctcttctaacgaagccactactaaacactgggtcgctgtggaaaaaaaattgggtatttagtcaaaaaaaccccatatcgaactgcgatgtgcctgttcgattttgtagcgcaactccatctgttggaaagtttatatcccctttttaatggcaagcatatagcgaatattcccatgtttttataaagattatttcccatttacaaattacttatgtgaattatgaattgaatttataaacccgaaatctttaccacaacatggtgtagagtaaaactcaattggtaactgaacgtcgcaaaagctgctaacaaactgatggccacgaaggcagaacgaaaggcttatcagcgaagcggcgacaatttaattatttcgcttttatgacgctaacaaattgcagttgtttattttaaagcgataagatacgcccgcgcgccttatcggcaaaccgataagctgtttccgatagtcacgcagcgcatgcagccctgcgctcacgcaccaccaatttcaccacaagatggccgccggcagctgtcaaagcgggagcgagcacgcaaacacatacactcgcaaacactcggcataaacgcttgcacaaagaaaaacggagaaaaaatttagcggtttcggtggaaaaaaaaacagtgaaaaatatatagttgaacgaacaagaacagacagcaacacaccaagctagcgaacatgtctatcggagtgcccattaaagttctgcacgaggccgagggccacataatcacttgcgaaaccatcaccggcgaggtgtaccgcggcaaactcatcgaggcggaggacaacatgaactgccaaatgacccagatcacggtgacctaccgagacggacgcaccgccaacctggagaacgtctacattcgcggctccaagatccgattccttatactgcccgacatgctgaaaaatgccccgatgttcaagaagcagacgggcaagggacttggtgggacggcgggacggggcaaggcggccattctgcgcgcacagggtgagttgggcactttggcccacacacacacatacacattcactttttgcacggactgcctttaaaaacaaaatattttctatgctctcgtttaacttctaaatttaactaaaatatttgctatcccaatttaataatccaaataccatacaatttttatgatagtaaaaaaaatggtagtaaaatttatagaatttaatatgtataaatagtgctacaaaaaatatattaatgcagggtttagtttgttttaaaaactgagctgatagttttcgtcaaatcatatccctcccatttaattcattaatttcaaaatttaaagtattaacgtatgggtaaaataagaaacatgctaaggtagtaagtttgtgtatatgtttatttttagaaagcaaaaactaaaaaaaaaaatgttataaagccatgtgcagtgaaatctagaaatgaattttgtttttaaagacagtcgtgcagtgtatgtgaggccctcagcgaaatgcaattattaaaaacgacatttcccttacagctcgtggcagaggaagaggcggacctccgggcggcggaaggggcactggtggaccgccaggagctcccggcggcagcggcggacgcggagcatggcagggaggaccaaccggcggtcgaggacgcggcggcctgtaggaactgcctactgaacaacgcatttctattctctaagttgcgggcatcatattattagcgggcgggtcgaacttctccagatgttttttgtaaagtatttatcgggcagagcagccgagaatacacttgaaacttgaatttgaaagaggcagacgttgtttgttgtctaagtaaagtaagcacctgaaaggtgggaagggattagacaccataaccagggggacgctcacaagtttggcttaaaattaagcactccaattcgattcattcgatcttataatcgtcgcctttcgaatgttatacaaagagagcaattccatgacagtattacaatcggtcttaacttgactgtcgacggatagctctcttcatttcacaattcgcggaggatctgaaagcggaaatctaagctaacacctcaacggacaggacacagtgttaggccagacgaactgaatgtggaacttgggtttagtcgtttggttagtctcattgcctcacagcgcatcgtcgaatattatacaaagagagcaattccatgacagtgatattaaatagtttctggactgtcgacggacagctctctttattcacttattcgcatttggattcgatttggttcgttctaggtgttaatcagacattcaatgtggacagcacagatacatacagatacctatatactatataaatgctttccacacattgtacatacatatgtacatttgtgtattgtttgccggcagactacgtgcgaaatatgccaggcattttgttgttatgttggtttcctttctgccaagccaattaaatcaacaaactgcgcacttggcagagcattgtgaattgagcgaaatagaggcctgaatgggaacagtgaccaccagcagcagcagatggattggatgcatgtggttcaatgcctaatgaatgcaatttatggctgtgtctgggggtgggggggtttgttagagtaataattccccgaatcgatggcacgtgtgcaaggcaattgaaaatgctttcgcaattaataaaaaagatggggctatgctgacgtaccacaagattttctggttctcgttctgaatcttctggttatctggctgcgccaccatatcgctagacgtcgtcattgccaagttaaa

SEQ ID NO: 18335 - DNA, 721 bp, DROSOPHILA
aacgcttgcacaaagaaaaacggagaaaaaatttagcggtttcggtggaaaaaaaaacagtgaaaaatatatagttgaacgaacaagaacagacagcaacacaccaagctagcgaacatgtctatcggagtgcccattaaagttctgcacgaggccgagggccacataatcacttgcgaaaccatcaccggcgaggtgtaccgcggcaaactcatcgaggcggaggacaacatgaactgccaaatgacccagatcacggtgacctaccgagacggacgcaccgccaacctggagaacgtctacattcgcggctccaagatccgattccttatactgcccgacatgctgaaaaatgccccgatgttcaagaagcagacgggcaagggacttggtgggacggcgggacggggcaaggcggccattctgcgcgcacaggctcgtggcagaggaagaggcggacctccgggcggcggaaggggcactggtggaccgccaggagctcccggcggcagcggcggacgcggagcatggcagggaggaccaaccggcggtcgaggacgcggcggcctgtaggaactgcctactgaacaacgcatttctattctctaagttgcgggcatcatattattagcgggcgggtcgaacttctccagatgttttttgtaaagtatttatcgggcagagcagccgagaatacacttgaaacttgaatttgaaagag

SEQ ID NO: 18336 - protein, 151 aa, DROSOPHILA
MSIGVPIKVLHEAEGHIITCETITGEVYRGKLIEAEDNMNCQMTQITVTYRDGRTANLENVYIRGSKIRFLILPDMLKNAPMFKKQTGKGLGGTAGRGKAAILRAQARGRGRGGPPGGGRGTGGPPGAPGGSGGRGAWQGGPTGGRGRGGL

SEQ ID NO: 18337 - DNA, 5313 bp, DROSOPHILA
cgagacccccaattccacactatggagtagcgacggatgcatttggagcgatgaaagcagcaagagcagccggcatcgttcgcaactctctgtcaaaatggcccgagaacactgtgtcgtatacgcaatgccgcgcagccactagttgctggtgttgtgatgatgatgatgatgaaggtgctatttggtatggatgtgactgttgactttgcctccgtttcgatttgagtttttgggtgtgtttgctgtggcggttctctttcgtttttttttttttgggactttttccggagaagaaacaacacatatactcacttgtatatcgtgttcctgaacaacaatatcaatagttttggttagctcgtgtatttgccctcgtgctgtggccatttctattgtggtgtgtgtgcgtggagggtttttggctttttccaccagcaaagagataaactcaaaaatgtgaatgggagctcattcaccgggttttcggggagttcgggacctatgtatgtatgtatgtttgctcatcagcaggttgccagctttctgcttgctaatggcccaacaacaaacagtcggacatttcgaaattgtttctagaaattatgaaatcggagcagcgtcgaaaaaagaagatagataaacccaatacggttgtaattagtagtacaaaaataaaaaaaaaaaacgaaagtcaggcactgcttcgcattcatttgaagggccatgaactgtgagcacttgaagagtgctaattgattaaggcaaaagcaaaagcaagtgaaccgcgatttgtagacccatcgggattacgcctttatcagtctggcgtttatccggttgcggtggcattatcttccgggcgactctcgaactttgttccctttacttcctgggaaactttattaatgaattaattcaagtacagttgcggttaaaataataacactactgcagttgcaaagttgatttcctaaaaaaaattattaaatatttatttaagtcagattgcatgaataataagtaccatatgtagtctctttaagtagtaaatgttaactctctcaatgtaacggttctttttgtttttggtcacttgctgcaaaagtgcgcgaaattaggcggtaacaaaaatagtactgattacgtatttgctgaataaaattaataaaaaatacaaaaataaatttgattaaaacaaaatcaaacaaaatgatccgcaaagcactgctgtttgtcgaaaagaacgaaacacggcgaagaaagccctcaatgtccaacgtggagatcaggcgcttggttcggcaaagcaagaaggatcaagatgagagcaaaattgtgttgtttggtgggaaaggctcttggtcttatgttcggcgtccaccacgaactgaatataatcatcgcttcacctttaaggcggtaagcacatcatggatcagcacatttacacagatatcctggaaaatctgatgctgccatatgccgaggatgaaatgccgttggtttggacatttcaacaggataacgactcaaaacacacgagcaaatcactgtagtatttaagtttagtcagcaatatgatgaaaaagtgttagaaaatacagaaacggtgggccaaacacgaaatgtgcttatggtgctattattgttaccgcaactgtacaatacgaccatggatattcgatatcgtttcgggtcaattccgcttttagtttcgtttctatcgcatcgaccaatcgggccgtgcgacaaatttgcgttttttattgataaggcgctccgccgtaccctcgaaaaccccttgtgcagtgataagcgccgaaatttatatgaccatgggtggcacgtcataaacatatattagattagagaaattaaattcttctttcagcgccaacggccagccaaacatcttacctaacttggccggatttagtgtttaatctaatcgcagtattacggcgcacataaatatgtacttcggtctcgactgggtgcaataaaaaaaacaaacgtgtaatatattttaagtccggatcttacataacagtctcgcaaagaatgccgggtgcattcacagccagaaattattatgttttattttatgcggcatctctgaatgttaactaaatgttgcacatcgcctttattactattgtttcaacgattaatgtttgattaggaatttctgtcatgtcagcatatatagcgaaaatatgccccaactaaatatcatggaataaagtagcatcatcactccccgaagcgagttccaaaatgatgattcatttgcctccaaattcggttatcacaaaggggtacaagccccaaaaatgttgacgcatctttgggtacatttggcttttgttaataatatgggattcaccttgaaggtacgcaaatgtgccaaaattactgcacagcattagttatttttatatagaataagcaaataggttttatttttagaatttcaaaaaatcagttatcttctttacaaaaaaaccagggctgcgccttttgttggtttgagtccagggtggatgaacgtatttgtcagcactttgtgaccatatgtttgcgataagcatatatgcgtaagcatatgttaaatatttgaatgtgcgtcaaattagcgtcgttgagttagccgcgatggctgaacattggaaaatttttttatttattaattttttgttatatagaggtgaattcaaagaaataaaaattcaaaaatgtgtcgcgcgtgcttgtcccgccgtatctcgccaacgttatctagtggctaatttactttctttagttaaatctttcttttcgtaacattattgcatatctgttttttgaaatgcaccgcgaaataactatatattcaataaaacaatacctaatagttattgcaactaaaccaattaaatttttatttagttgtataaaatatttgtacgatatatcgtggttaaatcttgcaaactatcgtcgctggtgttccgggtgaaccacgcggcggtcacactgaaaacatcgctggtatttcgtaacgctcagcaacggtcactctgccatccttctttttatttccgccgtttgccgagaaagttggaaaattatgggtgagttgctgaaaagcgtagtttttgtgcgaattaagcgaacagcgctgacaaacagtgaacaaacggagcttacaatgcggcgcggctgaaagagtaagtgaatttgcgccgaaagtgcgaaaatattggcaaatgcaagtcgcggaaacttgcgatttcagctgtccgaaaatcgcacaaaatccagtgaatctttggttccagcgaacaaatatttcgtttcacatgcaaaagcaatcgatgtgcacaaggcactaaagttatttgtgtgaaaaatgcatttggcagtatttccgagcctggactctgtctaacctcaaaaccgaagccgcacaagctgccatttgtttacattgtgttgttgcatcgcagacgcatattaactatagctaatgtatacgtttaatctacaacaggcaagccaagaggtctgcgcactgccaggaagcatgtgaaccaccgtcgcgaccagcgttgggccgacaaggactacaagaaggctcatttgggcaccagatggaaggctaatcccttcggaggtgcttcccacgccaagggaatcgtcctggagaaggtgtaagtacacggtggttgaccccaccattgaagtgctatgcccgccatccggatgagatggcggggttaataacacgtctcgacgcctcgcagtatatttttgtgttttgtttcgttttgcaatccaaatcacaggattatactgtgagatgaccagcgtgccagcagcgaaaagcgactgatatgatatcaattatattaatctcttagtagtatatcaaaactaatcggtttcctctactccacagcggcgtcgaggccaagcagcctaactctgccatccgcaagtgcgtgagggtgcagctcatcaagaacggcaagaagatcaccgccttcgtgccccgtgacggtagcttgaactacattgaggagaacgacgaggtcctggttgccggtttcggtcgtaagggtcatgccgtcggtgatattcccggtgtgcgcttcaaggttgtcaaggtcgccaacgtctccctgttggccctctacaaggagaagaaggaacgcccaagatcttagatgaacatgcatctaatctttttccagacaagcagagttagggttttacaaatctaaataaacaaaaaacagaaacaaacttgttaaatgtttcaattaaatgtgatttccttgaatatatttgtggctcgcatgtttgtgtttactgatggtagaatatagtgattccaatcgattctgttttataaggccgatgtacttaatgagttacatacttgcatatttaaactataacagtttacagttttcgttgttttcaagtattttctgtaaaatttaaaaatgattattgccctatattcacatctatgcgaaatatatttcccaaattttcgaatttcaaaaaatatataggtatttttgaatcctcttattggaaaaacaataaatatgaacatatatattttaaaaagaatatatgtttatcttattattaatcaagtttttagactacctggcaaccatggtagtgatgcaaagcgaagatgctcgagtgctttccagcactattagccgcgtaaattcgaattttttaaatttgcctaagcgaactcaggacttgctcttagtttcagtttcgaaaactatgcattccactaataacttaattgtcaaccacacattggccaccaaattgtgcgatgccggaacactccttcgatgcggcgaactgtgcgatctgcaggcggtcgtacctaccgcagttgctattgccaagtatttcttacataacagaacggcaagagccgcggaaacagacagccatcatcaaagcatgaggcccggacctggaccacagcaacgtgtgccgggctccatcagcgataaggagtcacaaactgcacctcctacctggcggtgcacagcgagaaatcggagcacttcgaatcgggctcgatttggagtggagctgtctgatttcttgcagtgcctcggttcgatctgcttatcaataatttgtttttttttctcctctttgccgcatttaggcagagattcgctggcgatagccgctcaagtgtcacacgcccacatttttggagcagtcgatgtcgatggagcggctatttgcacatacgccacgccaataaacttgtaccca

SEQ ID NO: 18338 - DNA, 1025 bp, DROSOPHILA
aagtcagattgcatgaataataagtaccatatgtagtctctttaagtagtaaatgttaactctctcaatgtaacggttctttttgtttttggtcacttgctgcaaaagtgcgcgaaattaggcggtaacaaaaatagtactgattacgtatttgctgaataaaattaataaaaaatacaaaaataaatttgattaaaacaaaatcaaacaaaatgatccgcaaagcactgctgtttgtcgaaaagaacgaaacacggcgaagaaagccctcaatgtccaacgtggagatcaggcgcttggttcggcaaagcaagaaggatcaagatgagagcaaaattgtgttgtttggcggtaagcacatcatggatcagcacatttacacagatatcctggaaaatctgatgctgccatatgccgaggatgaaatgcccaacggtcactctgccatccttctttttatttccgccgtttgccgagaaagttggaaaattatgggcaagccaagaggtctgcgcactgccaggaagcatgtgaaccaccgtcgcgaccagcgttgggccgacaaggactacaagaaggctcatttgggcaccagatggaaggctaatcccttcggaggtgcttcccacgccaagggaatcgtcctggagaaggtcggcgtcgaggccaagcagcctaactctgccatccgcaagtgcgtgagggtgcagctcatcaagaacggcaagaagatcaccgccttcgtgccccgtgacggtagcttgaactacattgaggagaacgacgaggtcctggttgccggtttcggtcgtaagggtcatgccgtcggtgatattcccggtgtgcgcttcaaggttgtcaaggtcgccaacgtctccctgttggccctctacaaggagaagaaggaacgcccaagatcttagatgaacatgcatctaatctttttccagacaagcagagttagggttttacaaatctaaataaacaaaaaacagaaacaaacttgttaaatgtttcaattaaat

SEQ ID NO: 18339 - protein, 216 aa, DROSOPHILA
MSNVEIRRLVRQSKKDQDESKIVLFGGKHIMDQHIYTDILENLMLPYAEDEMPNGHSAILLFISAVCRESWKIMGKPRGLRTARKHVNHRRDQRWADKDYKKAHLGTRWKANPFGGASHAKGIVLEKVGVEAKQPNSAIRKCVRVQLIKNGKKITAFVPRDGSLNYIEENDEVLVAGFGRKGHAVGDIPGVRFKVVKVANVSLLALYKEKKERPRS

SEQ ID NO: 18340 - DNA, 8074 bp, DROSOPHILA
agcgtatattttaagcggtttacaagaatttttccacgcctgtaaaaaaatgtataataacaacttataatcgatgttttgaaatttcttttataaggcaaaaatgtgtacattgttttaagtgataaaaaataaaataaatataaccgaaaagagcgatactaattaaatttagatttagaactcttcatttaattggttaatactatcaatctgtaaatctgtaatttttgatgttgaatatatcataaccacttttatggagtgcttacactggaattgcttttctggttattgagcaaactatcgcacatatgagagatgtactatcgccacctgagcagctgccgtttgtgttctcttcaaaaattttctaggtatatgtcattatgattatattgtttccaatttcagttgtttgttgttgataacagagaacagcaaaaaacacgcaatgactccagcttgcacagatacatgtcttcaatatcaaaacaaagcaatcgtaccttttgccgacacgtctattttaacgatcacgtacggcaaattttagataatggtctatttggagaaccaagcgctcttgcagttggtattaatgcactaaaacaattaaattaagaagatatcaagacatatttatatataagtgtctttttacactgatgattgttaaagtttgtgttaagacgaaaaacataaagcaaaaagttggtgaaaataatttcgttaggaaactttaatgcctttatttgctaataaataatatatgtagtataaaatatatatatatataaatataattataatattatttaataaaaatctatcaatccttcgaaaaccagtatctagtataattcattgcttgctacgttaacacttactttagtgtggagaggactttacaaattttaatccagggctgccacgaaaatagataacgtattcgatattttaatatatggtatatatggtattcctggtatgtatttcaagatggcggaaagtgtgaggaagaagagaacaaaaagcaagcgaaaaatccatgagtgtatttattgatgtatatatgcgtaaatctatgtatttactaagccacagtacacagtaaatggcaatgtaatgaatatccaatatatctgatcgccacgttgtgtgcctttaccttgacgcacagattttaaacttagccaaagaatcgaaatcttgcacccacggacggcaacgtatcgccacccagccgaaaaaaggagaaatactaccaaaaggatctggcgggtgtgttgcagtccactcgaggaaatcagttgcggctcaggtcaaacttttgcattcgcagactttcaacgacctccagtgctctaaggcttgcgcgcgacttgctaacactaaacgatatttaaacgcaacgccacaggatttcagaacgttcattcctaacaaactccgctcgtggcccgaatccaggttgtagccaaaaatactgccgcatctatcagcagactatgtctaagtatttgcgtccccaaaatttacaagagaacacatagctatggctgcgacgagaaaattgcaaggtaagcaaaaagatcttgaattcgaattcttttctaataaattacccaacaaatatcgtggccaggcgaaattgatcgatgtttaaaaaaggtagcagagggcgttgaaacgtttgaggatatttggaaaaaagtacacaatgcgacaaacaccaatcagaaggtgagattaaaacgttttacattttatgtgaataatcctatatgtataaacaatttttaactaacaccatctttatcagcaaaaacatctgcaggagaagtatgaggcagacctcaaaaaggaaatcaagaaattgcaacgacttcgcgaccaaattaaatcatggattgcatcagctgaaattaaggataagagctcccttcttgagaatcgacgtctcattgaaacagtgggtttatttaatattatttgttgtgactacgcgcacaaaattatatgttttttagcaaatggaacgctttaaggtggttgagcgcgagacgaaaacaaaagcctactccaaggaaggcttgggggctgcacaaaagatggatcctgcccagcgtattaaagacgacgcacgcaattggttaaccagctcaataagttcccttcaaatacaaattgaccagtatgagagcgagatcgaatcgttgttggcaggtaaaaagaaacgtttagatcgagacaagcaggagcgaatggatgacctacgaggaaagttggaccgccataagttccacataacaaagctggaaactctgcttaggctgcttgacaatgacggcgtcgaagcagagcaggtaaacaagatcaaagacgatgtcgaatactacattgattcatcgcaagagccagactttgaggaaaatgagttcatatacgatgatataattggtcttgatgaagtggagctaagtggcacggctaccacggacagcaacaacagcaacgagacaagcggttctccaagcagtgtcacatccggaggcagtccatcacagtcccctgtcacggttcaacaaattttaaacacttcgtcgcagggggcagctagtagtggtagcagcgcagctagcgcagcactgtttcagcagcagctgacagcggcacaatcgaatggcaacaatgtgggctacgcgagcgacacaagtgcagcttcttcgtctgctacaacatctacagatcctgcaggcggcacagttgctgtaaattgtgttggagggctagccgataaacgcaacaagagcagcgaaagcaatgccctaaaattgaaagtatgtattatgaatagattttcttatggttgttcgcattgaacaatatacgtcttacttttaataacagccacaacctcatcaacttataaaacctacccctgtacgagccacggccaagctgcctctgagcagtgatagtaagtttcaccaattgctttcttcgtgtttcagtttcattaactttggatttctctacagcccaagtcaataagattgtcagttcaactcccagcaaaaatcagcaacagctgcctacagcagcttcaatcgttgcaacctccgctatgcaatcgcaaagcagtatcggaagttgcagctccactggaggaacgggagcatctcaatcagcttctagtggtaacaatcctggtaacaatcctgcggttcagccaaatgctccaacgcctggtcaaagcggcattgccgctgcagcagcttcgactaatgttgtttcggcgacgattgtgagcagcgccaatgttcaaggccaatctgtgatccaaccaacaccaacaattgcatttgctgcagtagcaaaacacaatacatgtagggggttcgggtgtacatatttattgcctttacttaaataattgtctttattttagcactcctggaaaatggtcctgttttgcaacagcaactagcagtaactcctactgtggcagctatcgtaggagctggaacgcaggcgcagcaaaaacatgtgccaccattatccaatcttcaaacaaattcccctcacatacaaaatggtaaggctagagttatatgtgtttttttctgatgttatagggaatagatttatatgatcatgaacatatatttttgtttgttttttgctgtctcaagaaccatttcaaaacaagaattgctattgtcactatctgcataataaatggttgttgtagtacgttttcgattatctattgcatcaaagaaaaacatttttaacgagtaaactttagataatgcatttatttagtcaaaactcttgtatgctggaagtgtttttgttttctgaagcttatatttaaaaaaaaaagcattagttttcatgttattttttgggcttagtaacatttaagagttcatcatttttgcggaatttatacatatatagaaattaggaaattttggcttagcttaaaaaaaaggcaatagtcaatttgcgcgattatcaggaacccgttgcttatctagtggcagtgttagggagatttttcagcattttgttgtcatagcgttaaatttttagattggcaagaaaaataggaaaatcttaaataatctgtaggcgtgaaaactgtttgctgtttgtgggcgttgctaagataaaccaacttgcaccgcgtaggcgtgtgcaaagattttgttattcatttgtgtgagcaatgttagctccaaaattttctaaaaaggattcaaatacttcttcaaattattggacaaccaaagcatattttcatattctcatgtacatatggatagtagtcgccttcgcacactatcctggtgcgcttcgtcacgacgtgggctggcgtcgacagaaataataaaatttgtgggttgtttaaacttttgcttttaatataaaataagacatgttttagttcattttttaacatgtgccccttaacgcgaaatgtgaacaggaattgagatcctttatagcttttgattttttaagcatgatgattaaaaacttaacagatccgatccctttcccctacttttagccttttacgacaaacctggtacgatgaggtagtattcttctcccgccaccacacaggacttctgtttgggtttagtcacccactctgttggccatctcgtcagattggactaattttatcatattaatgatttaactgtgtcccaactcccatgcctcgctgtttgcccacatagccgcgaacaagccactagggctgaacggggtacctgtcaacgcctttagctgctccctctccgccgaaaacctggagcagtgcattagtacatgctctgtttcctcacaatcgacgcagaacatgagtctagccaatgaagaagctgtgattgctgccttcttagtggtttaactagcgtggtccttgaacgatattctgtggtctagcataacacccaggtactgtgtcccacggagaccggcatagtctccacctttcttctgctgcttgatagaactgtctcggtcttgttcgccgcgattgctagcccgacattctcgagccagtggatggtagctccaatcgtggtgttacatttttcttgagctctgcaattgttttggcgacggctgtaattgccacatcgtcagcaaaacagtgcagctctactcccaagggcctgttgatacccaagatcctacatgatgttccccagatccttggggaaaaacctggcgaatcttatctcggtatctttttggtccatcttccgtatcgtaccctaaagtacctgccaacgactgtcctcatgtactacgggatccccatactgttaatggctccgaggattacgggccatctagcggtgttgaaggcgttctttacttcccgagtagttgtttgcagcatgtgctggtcccttgcctttcgtcaacagtacttgtttctggcttttcatcctcgttggaaagtctccgtccaaaagatgtggccctgaagatgtcaggtctacccaacgccactgctttagcaactgctccgcttggttgcctcgacgacttcgagttctgtgacgcacgggaaatcgggggcaggggctactgctgttgcccgccataatgtggtctgcattgagaatggttcctgtacaatattagccagttaagtacttatgtgatcaaggtcaaacgtctttcaattaaattaattcgatcccagcttgtttgttgcggacttggttgatgaaaaactaagtttagacggtttaatatcgagtaaaaggcgatccagcagtagtttttggttaattactagatatcacttaattctctaatctacttcgtagaaatatatttttctaaatttatacaggcatgtgaagcttggataaatgcatttaaccttaactgttcctattttttgtattgtaaaccacttcctgaacgagatcatctttttgcaggtcttcctgtctcggacagtactaatgacaacagctgcaatgtcgtcgatacgatttctctaaaaacaatggcacaggatgctattaatcgatctgcgatcgatcctaattcactgaatcagcagcaaacaagcagcatcgatctgagacagccgcagtcgcagaaatcacttctccaacatttcaactctgaaaccaacacgaatcaacagcaattgacatcgcagcagcagcaacagcttcagaataactcccttgctgcgaccacaggttctaacaacggaacttcaactggtagtggtctcatgaatgtagcaaacgctactggtcagcctatcagcggcaatgccaaaacgcatgcgtgccaaccccaacagatggccacgacggaagcgcacattcccacactgcttggtgtgacaccacttgggccaacaccacttcaaaaggagcaccaaatgcagttccaaatgatggaagctgcctactatcacctgccacagcctatggacacggaaaagctacaaacgtactttcatcgcgcaccagtgctcacgccatcgcactatccccaggtgagctatattagtatacaaatttgattcacctattaccttatcttaattgtattttaaggcacagatgccaatatatgatacagttgagttttatcaacgactctcaacggagacccttttttttgtgttctactatatggagggctccaaggcccagtatctagcggccaaggccttaaaaaagcagagctggcgtttccacacaaagtatatgatgtggtttcaaaggcacgaggagccgaagattatcaacgatgattacgaacaggtaaggaatgaaaccttgcaggaaagagcaagttaataaaaatatgtgcacactattcacagggtacgtacatctattttgattatgaaaagtggagtcagcgaaagaaggagggattcacctttgaatacaagtacttagaggacaaggagctgaattgaaaatgttgcgatgtttgttgcttcgtctgtctaaaagaaaaccaatccattaaaataataaaataaatcaatccaattttcataaaaaatcacacaatcataacacaaatcaaaatcgaaaagcgcgagaaagatcaactaatggaaatttaaaagaaaaagcaaaacagccgtaaccataagttaaaagtaaaatgaagtatatttattaggaatgcatgttttttagctttactcctttcgttaattttacattcttgcagaattaataaggatgcttacttttatacacatttcgctacgctttttaattcaagtattgcaatacaaattagttttcattatcttggcctttaaaattacatataggtgttttgtaagggccactgcgatttttactgacgtcacaaatatattagtcgtctaccgtctttgatgagtacgtaaatcagcagcaacatgtctgcgaagagtaagaaatcacagagggctttcaaaaacaatctcatataacctgtattctatgggtccttggtaaaaagttgaaagatttaaaagaaacattggtcctgatttgtatgcgattaaattaacacagcaataacagattgtttgtcatattcatacccgaggctgtatgagaaagctattaacatgaagcaaaggaaataggtataacctgatcatactataattgaaatttaatcatttttggtcccattttgttacgtaaaatttccaaggcttttggagggcaagtcttgtttaaatgtatgaacacagaataaagacgattgaatagttgaaattaatattattttaatttggtgggtatattcctatatatccttgcagagggttcattttaattttaatcaaaagtaacaacgcagagaaattggaccctataaattagcactaattaaattactagtacatttatccatttcattttcatccgtttctacgcaagtttaaattacgattacaattctattactaagtcttaatcaaaaacaaaaataccgaggtgtcgattttttataatacaaaagtaagcaagcatttatttgttaggacaaa

SEQ ID NO: 18341 - DNA, 3488 bp, DROSOPHILA
agatggcggaaagtgtgaggaagaagagaacaaaaagcaagcgaaaaatccatgagtgtatttattgatgtatatatgcgtaaatctatgtatttactaagccacagtacacagtaaatggcaatgtaatgaatatccaatatatctgatcgccacgttgtgtgcctttaccttgacgcacagattttaaacttagccaaagaatcgaaatcttgcacccacggacggcaacgtatcgccacccagccgaaaaaaggagaaatactaccaaaaggatctggcgggtgtgttgcagtccactcgaggaaatcagttgcggctcaggtcaaacttttgcattcgcagactttcaacgacctccagtgctctaaggcttgcgcgcgacttgctaacactaaacgatatttaaacgcaacgccacaggatttcagaacgttcattcctaacaaactccgctcgtggcccgaatccaggttgtagccaaaaatactgccgcatctatcagcagactatgtctaagtatttgcgtccccaaaatttacaagagaacacatagctatggctgcgacgagaaaattgcaaggcgaaattgatcgatgtttaaaaaaggtagcagagggcgttgaaacgtttgaggatatttggaaaaaagtacacaatgcgacaaacaccaatcagaagcaaaaacatctgcaggagaagtatgaggcagacctcaaaaaggaaatcaagaaattgcaacgacttcgcgaccaaattaaatcatggattgcatcagctgaaattaaggataagagctcccttcttgagaatcgacgtctcattgaaacacaaatggaacgctttaaggtggttgagcgcgagacgaaaacaaaagcctactccaaggaaggcttgggggctgcacaaaagatggatcctgcccagcgtattaaagacgacgcacgcaattggttaaccagctcaataagttcccttcaaatacaaattgaccagtatgagagcgagatcgaatcgttgttggcaggtaaaaagaaacgtttagatcgagacaagcaggagcgaatggatgacctacgaggaaagttggaccgccataagttccacataacaaagctggaaactctgcttaggctgcttgacaatgacggcgtcgaagcagagcaggtaaacaagatcaaagacgatgtcgaatactacattgattcatcgcaagagccagactttgaggaaaatgagttcatatacgatgatataattggtcttgatgaagtggagctaagtggcacggctaccacggacagcaacaacagcaacgagacaagcggttctccaagcagtgtcacatccggaggcagtccatcacagtcccctgtcacggttcaacaaattttaaacacttcgtcgcagggggcagctagtagtggtagcagcgcagctagcgcagcactgtttcagcagcagctgacagcggcacaatcgaatggcaacaatgtgggctacgcgagcgacacaagtgcagcttcttcgtctgctacaacatctacagatcctgcaggcggcacagttgctgtaaattgtgttggagggctagccgataaacgcaacaagagcagcgaaagcaatgccctaaaattgaaaccacaacctcatcaacttataaaacctacccctgtacgagccacggccaagctgcctctgagcatttcattaactttggatttctctacagcccaagtcaataagattgtcagttcaactcccagcaaaaatcagcaacagctgcctacagcagcttcaatcgttgcaacctccgctatgcaatcgcaaagcagtatcggaagttgcagctccactggaggaacgggagcatctcaatcagcttctagtggtaacaatcctggtaacaatcctgcggttcagccaaatgctccaacgcctggtcaaagcggcattgccgctgcagcagcttcgactaatgttgtttcggcgacgattgtgagcagcgccaatgttcaaggccaatctgtgatccaaccaacaccaacaattgcatttgctgcagtagcaaaacacaatacatcactcctggaaaatggtcctgttttgcaacagcaactagcagtaactcctactgtggcagctatcgtaggagctggaacgcaggcgcagcaaaaacatgtgccaccattatccaatcttcaaacaaattcccctcacatacaaaatgatccttggggaaaaacctggcgaatcttatctcggtatctttttggtccatcttccgtatcgtaccctaaagtacctgccaacgactgtcctcatgtactacgggatccccatactgttaatggctccgaggattacgggccatctagcggtgttgaaggcgttctttacttcccgagtagttgtttgcagcatgtgctggtcccttgcctttcgtcaacagtacttgtttctggcttttcatcctcgttggaaagtctccgtccaaaagatgtggccctgaagatgtcaggtcttcctgtctcggacagtactaatgacaacagctgcaatgtcgtcgatacgatttctctaaaaacaatggcacaggatgctattaatcgatctgcgatcgatcctaattcactgaatcagcagcaaacaagcagcatcgatctgagacagccgcagtcgcagaaatcacttctccaacatttcaactctgaaaccaacacgaatcaacagcaattgacatcgcagcagcagcaacagcttcagaataactcccttgctgcgaccacaggttctaacaacggaacttcaactggtagtggtctcatgaatgtagcaaacgctactggtcagcctatcagcggcaatgccaaaacgcatgcgtgccaaccccaacagatggccacgacggaagcgcacattcccacactgcttggtgtgacaccacttgggccaacaccacttcaaaaggagcaccaaatgcagttccaaatgatggaagctgcctactatcacctgccacagcctatggacacggaaaagctacaaacgtactttcatcgcgcaccagtgctcacgccatcgcactatccccaggcacagatgccaatatatgatacagttgagttttatcaacgactctcaacggagacccttttttttgtgttctactatatggagggctccaaggcccagtatctagcggccaaggccttaaaaaagcagagctggcgtttccacacaaagtatatgatgtggtttcaaaggcacgaggagccgaagattatcaacgatgattacgaacagggtacgtacatctattttgattatgaaaagtggagtcagcgaaagaaggagggattcacctttgaatacaagtacttagaggacaaggagctgaattgaaaatgttgcgatgtttgttgcttcgtctgtctaaaagaaaaccaatccattaaaataataaaataaatcaatccaattttcat

SEQ ID NO: 18342 - protein, 948 aa, DROSOPHILA
MAATRKLQGEIDRCLKKVAEGVETFEDIWKKVHNATNTNQKQKHLQEKYEADLKKEIKKLQRLRDQIKSWIASAEIKDKSSLLENRRLIETQMERFKVVERETKTKAYSKEGLGAAQKMDPAQRIKDDARNWLTSSISSLQIQIDQYESEIESLLAGKKKRLDRDKQERMDDLRGKLDRHKFHITKLETLLRLLDNDGVEAEQVNKIKDDVEYYIDSSQEPDFEENEFIYDDIIGLDEVELSGTATTDSNNSNETSGSPSSVTSGGSPSQSPVTVQQILNTSSQGAASSGSSAASAALFQQQLTAAQSNGNNVGYASDTSAASSSATTSTDPAGGTVAVNCVGGLADKRNKSSESNALKLKPQPHQLIKPTPVRATAKLPLSISLTLDFSTAQVNKIVSSTPSKNQQQLPTAASIVATSAMQSQSSIGSCSSTGGTGASQSASSGNNPGNNPAVQPNAPTPGQSGIAAAAASTNVVSATIVSSANVQGQSVIQPTPTIAFAAVAKHNTSLLENGPVLQQQLAVTPTVAAIVGAGTQAQQKHVPPLSNLQTNSPHIQNDPWGKTWRILSRYLFGPSSVSYPKVPANDCPHVLRDPHTVNGSEDYGPSSGVEGVLYFPSSCLQHVLVPCLSSTVLVSGFSSSLESLRPKDVALKMSGLPVSDSTNDNSCNVVDTISLKTMAQDAINRSAIDPNSLNQQQTSSIDLRQPQSQKSLLQHFNSETNTNQQQLTSQQQQQLQNNSLAATTGSNNGTSTGSGLMNVANATGQPISGNAKTHACQPQQMATTEAHIPTLLGVTPLGPTPLQKEHQMQFQMMEAAYYHLPQPMDTEKLQTYFHRAPVLTPSHYPQAQMPIYDTVEFYQRLSTETLFFVFYYMEGSKAQYLAAKALKKQSWRFHTKYMMWFQRHEEPKIINDDYEQGTYIYFDYEKWSQRKKEGFTFEYKYLEDKELN

SEQ ID NO: 18343 - DNA, 3512 bp, DROSOPHILA
aaacaaaagagaaaatagcaaaaactaagacatacccggtggaaaaagaaacgttattagctcctgttaaagaatttccaaaagtgataggagatccgaaaatgaaatccaggttacaagtcgatgcggatgatgatgatggcatcgtgtccactgtggaggaaatgtcgctagaactggaaacggatactgagccccatgctggggcagagaccatcgaaacgcccttgaaggagatcaatttccaggagctgagaaccctcgccttgggacaggcaaccaagaagtcgagagcagccaccaagatgaagattcgacaaattatcgagcagcactaccgcgccaagggcaaacaaatcgaaaacgactccgcagagacccaaaaaacgcaaggaaaggctggattacggcaatccgtaaagtccatcataaagcaggagaagatcaaggaaatgatcgagcagatcgctacgatggatctgacacgcatctgcgatttggaaaggacttcgaccaaagattgcttaaaacaggtcatagacaaaatagatgacagcgagggtttgaaatccaaatgacaaaacctatcacactttaaactgttttattaaattaagctaagcgtttgttaatggcacagttgtaaaaatttaaaataaaagcaataataaaagcgaatcaaaatttcaggaatttcctatatcttgatagaaaattaagtcgcggccaaatcgcacccgaatcgcgtccgaatcgcgctaaagtcgcctcaaaatcccccctaaatcgcatctaatcgcgcctaattaagctcaaacgctctaactaaacataaattgccaaatagagtatgacacattacggcacgtcggatatattttttgctgaccaaaaataaatataaattaaattatagagtattaaagtatcgtcatatatgtagaactagtcattagggatatcgcaatatccccatctctagcttaaacgcgatatatgtatttaaagtaacagtggtggaaacacaccaaattatttcggcaataaaatcgaaattacaaacttccagaaagctgttatctatataaaaaggtgtgataagccttatgtcgcaggtgtatcaacgctaatccacttaatggcgctttcaccacagaccaacccctctcacacgtatccattcaccagcaatcatatgttttcttatcaccttcaggttgacctcaaacgcagtacggcgaattttggaaggcaatcggtgcggtgaaatggagctgactggatgggtgaagaactacggctggggccgcaagggcatcaactcggcggtggcccagctggcaatggccaatgatccggactttcgtctgaacgaggaggagacctatgcggaaatgtggatgggcacgcatgtgtgcggtgtgtccgtggtcaaggaaaccggagagactctggaccgagtgctaaagaaggacctttcatacctgttcaaggtgctaagcatcaacaaggcactcagcatccaggtgcatccgaacaagtgcgaagcggagcgcctgcacaaggagcgcccggatatctacaaggatcccaatcacaagccggaactggccattgccctcacgccctttctggccctcgtgggatttatgtcagccgaagatatcagggactacatcgatgagttccagccgctgagtaaactcattggcaaggaggctgtggatcagctccatgactcgaccaactcggaaagcgttaagttgtgctacgagaagctgatgaagaccgaagagccggtgatagccaagtgcatcagtgaaatagccaaggattaccaaaacggtgagccattctgtgcaatctatgaaagatttgtaaacattcctctaaaatagaactgaaatccaacgatctgcttgaggtgttcaccaaggtcaacaaagacttccccggcgatgtgggcgtactgtccctgttcttcctcaacctaatccgcctgcagcccggccaggcgatctacttgggcgcgaacgagattcatgcctacctggacggcgactgtgtggagtgcatggcttgctcggacaatgtgatacgggcgggcctaacgcccaagtacaaggatgtggaccagctgctggaatctgtgatcttcgaaagttcgtataaggatcgcaaggagttcattccgtaccgcatagatgaccaggtccaggtctatattccgccagtatccgactttgcagtgataaatgtgaatatcgaacactcgctggagtcgtacaagctggagatacaagcattcggctccatattgatagttctaaagggatcccgcattcttaaattgaaaacccagcagggagataaggagatcttggtaacccgcggcagcattgtgtacattcccgtcgaggcggcgccggaaatcgaattcgcccagtccgacgattgcgacgaggacttcagcggctacatagcaaccagcaactactttcgagtgccctaaaattctcagttaatcgaaatattttgtacagtgcaataaatccattaacacgttttggtggtgaattattttgtttatatttacttgcaattaagagctaagaatgtaagctaaagtggcaatagtagcgataaataagttatctaatcaattggctatactcgttccatagtacatttaataattaacgagaaatatcttgcgcacaaacaggtagtttcttaaatatttgcgataattgcaaccaacaatttcaagtacttaagctagagctacgtaactcgatcggggttacattcactggggataaattattcatatgtacgaagcaagaggttcgagtgcaaatctagtgtaattcaatagaattggtgcttggactgctgtgctgggcttgcgaaatgcccaaatacatggcctacttaaaaagggttaacaatggagaacataaaattggctacgttatacataatttccgcccgtctttgtttggtttttcggtgcccgtgcgggatgcggtggttctacgaattgtaaatacattaattcacatttatccatctcagcagttgcttggtttgatttcacaaagatcggtaaaatgctcaaaaagtttgtaccaaaaacagagtacatcatatacgggaaatctcataataaaattgtttccggcgccatctggttgccatttgtacacgagtgtagtaatagtaagtagttagtatgttggttcgcatatatgtatatatatatatatatatatatatatatatatatatatatatatatatatatatatatatatatagttttagaaagtagtagttagttcatccggctcggcggcttaaagttcttgtaagtagatgggtttgttacgcttgcgtttgccaggagtagttgccactacttgtatatgtgtataatatatggtatcaataacgcaataccaccagctacggtttgtgcccacaacattggtttctttccctaacaacat

SEQ ID NO: 18344 - DNA, 1335 bp, DROSOPHILA
atttaaagtaacagtggtggaaacacaccaaattatttcggcaataaaatcgaaattacaaacttccagaaagctgttatctatataaaaaggttgacctcaaacgcagtacggcgaattttggaaggcaatcggtgcggtgaaatggagctgactggatgggtgaagaactacggctggggccgcaagggcatcaactcggcggtggcccagctggcaatggccaatgatccggactttcgtctgaacgaggaggagacctatgcggaaatgtggatgggcacgcatgtgtgcggtgtgtccgtggtcaaggaaaccggagagactctggaccgagtgctaaagaaggacctttcatacctgttcaaggtgctaagcatcaacaaggcactcagcatccaggtgcatccgaacaagtgcgaagcggagcgcctgcacaaggagcgcccggatatctacaaggatcccaatcacaagccggaactggccattgccctcacgccctttctggccctcgtgggatttatgtcagccgaagatatcagggactacatcgatgagttccagccgctgagtaaactcattggcaaggaggctgtggatcagctccatgactcgaccaactcggaaagcgttaagttgtgctacgagaagctgatgaagaccgaagagccggtgatagccaagtgcatcagtgaaatagccaaggattaccaaaacgaactgaaatccaacgatctgcttgaggtgttcaccaaggtcaacaaagacttccccggcgatgtgggcgtactgtccctgttcttcctcaacctaatccgcctgcagcccggccaggcgatctacttgggcgcgaacgagattcatgcctacctggacggcgactgtgtggagtgcatggcttgctcggacaatgtgatacgggcgggcctaacgcccaagtacaaggatgtggaccagctgctggaatctgtgatcttcgaaagttcgtataaggatcgcaaggagttcattccgtaccgcatagatgaccaggtccaggtctatattccgccagtatccgactttgcagtgataaatgtgaatatcgaacactcgctggagtcgtacaagctggagatacaagcattcggctccatattgatagttctaaagggatcccgcattcttaaattgaaaacccagcagggagataaggagatcttggtaacccgcggcagcattgtgtacattcccgtcgaggcggcgccggaaatcgaattcgcccagtccgacgattgcgacgaggacttcagcggctacatagcaaccagcaactactttcgagtgccctaa

SEQ ID NO: 18345 - protein, 396 aa, DROSOPHILA
MELTGWVKNYGWGRKGINSAVAQLAMANDPDFRLNEEETYAEMWMGTHVCGVSVVKETGETLDRVLKKDLSYLFKVLSINKALSIQVHPNKCEAERLHKERPDIYKDPNHKPELAIALTPFLALVGFMSAEDIRDYIDEFQPLSKLIGKEAVDQLHDSTNSESVKLCYEKLMKTEEPVIAKCISEIAKDYQNELKSNDLLEVFTKVNKDFPGDVGVLSLFFLNLIRLQPGQAIYLGANEIHAYLDGDCVECMACSDNVIRAGLTPKYKDVDQLLESVIFESSYKDRKEFIPYRIDDQVQVYIPPVSDFAVINVNIEHSLESYKLEIQAFGSILIVLKGSRILKLKTQQGDKEILVTRGSIVYIPVEAAPEIEFAQSDDCDEDFSGYIATSNYFRVP

SEQ ID NO: 18346 - DNA, 4993 bp, DROSOPHILA
ataaataaaactaaatgtataaatgactcaagtattgggaatacaactgatattttctggataaaagtattatttgtaacatgaacataatataccccttaatactgcgctcgaaaagctccctctcccaaccatttatcttgccattgcgtatagagagagtaaaagagcgagtgttgtaaatgtgtgggggctttggcaagattaggtgggagagaaagcttcgttgcttttgtaatcctcacaatgtattatgtcaatgtaagtggttacttggccattcgatcagctaatggagctattaacggaagtttggagcagctagttgcattcagatgaaaaaatactcaactgttgttatccgctattattcgaacaattttaaaaacacatatgttaaaaggttattagtattaatatgacattatgggttttctgtaatattgaaattattatatattcactatcaattgctcaagtaacgtgtagtaaactacacacctaagtttaccattgccacatttaaaaatagaagtaatttgaacactcccttttggtggtaaatgaaaaaataattgattcactaccgacatcgggtccatctagagtttcacttcacgggtttagcggggtactcggaagttgagacgttcctttggttactccgttggatcttctcccacccatcataccacgaaatactctctggattcagaaaatcagaaagtcaatcaatagcaagtgacaggttgtcatgaaagaactatttagaatgagcaaccacaacagataattgcacaattgtcagtgtcagacttttgccaccattcgcactcgcagtgcgccgtgggtttccaatgaggaatgtaattggattaggcagcaaccaagtccgagacccagtctcagtttcagtcccaattgcaacgggaacacgcggtggtgctccagattgcctggaatccgtagtccgagctgcaggattgcataaccgggaagcatgagcagggaaaatcgctcgaaaatcgctttcaagcgaaaaacgagtaacggaaacaagagtggccagttaacggattacgaacgcatccgaggggatgtggaaatagttgttccgagcccacctcctactccagctgtgccacccagtgcatccttagggaaacttaagataaagttgagttctgccaaaatttccttacgaaaaaacgcacagacttcgcagaataatctgcagaccgctcccttaccagacgcagtgcgtcgcaaatcagcaccacaactttttacctttactattgccccaaagagcgaagtgacttcgaaaatacatctaccctcagtgccaaagctaccgggtttggcaccaaagagctccatccgaagatctaggactttgggtttgtcgaatagtgcccagggtgcagggtcatcaggtacagggctatccaatgtcgaactcggtgtgcaggatagggacagtggcagtgagcccactagcagcttggctggaggaggtagctctacttcgcctgaatcccttttggataacatactcagcggtgcctcctccgtttccgtacaaagtagtagcagcagccaagccagtaatgctacggtggcacagcccataaaagcaaaggagcaactgcatcccaagaggctactcagcttgaaggcttctccggagctgagagtatctccaccaactccagacactactcaaccccaggtccagatgccaactcaacttctgctttcactgactccaagaccagaggtctttgatgcaccctcaccactgaccagaagtccctcacgatctcccggaatctctccccccgtgtcaccatcacccagcattactctcagaccgagtacccctcccgagaacaccgtaatcttcacagatgatctcaagtgcggcatctgcctggatgtttacacagatcccaggacactgcattgcttgcattccttttgtctccaatgtctggtcagcgagaactttaaggacgaatctttgtgggatcaggatcaagctcgcagtgaggagccctcgaattacagtctaagatcggagatgggtggatctagtgcggaacttactgcgacagtatcacccgccaggcagcgaggttccagttttacattgagaagaaagaagtccatggatcgcctagtgataagggtaagatagcaagatacaaagaggttatgtcctataaaacccaatttattcgaacagtccaagagtgacggaaagcgatcgaccagttccatcggtacccgattcaccggaagttttgccagcgaggtatccacccgctgcatccgctgtcatacctgtaactatcccacggatctttcgttaggtggagtacgtcagcttccacagaactacttgctagtgagacgcatagaggtcttgcgactacaggctggggaggatgtaatctccagggtctggtgttctctttgcacagaggagattagcgtaaggaggacgaagtcattaagtgatttgaaggctgtctaaaagcgtataatcttttccaggccacctaccactgcattagctgcactttaaacctctgcaccttgtgcaaggaggcacacgaaaggcaaaggagcaccgctagccatcgaatgagaagcatcctggaacttagacgcgccaggaagcaaaagcaacagcagatgggattgggagatagtagcaaactagtgctacgatgcggaatccataccaactttgagctgaaggcattttgcaccaactgccgtcaactggcatgcaccgactgtttggtgatccttcataaaggccatcgacatgagaccatatcccgggcaattggacatcagggtaaactactcaaagaagctacggatcaaactcgtcccctctgtcaatatgcggagcactccattgagaggttgaatgccatagcacgtggaatcaacgaccggtgtgacgacatccagactcaagtggagcggtacatgcagcagtacatggatgccctgacagtccatcgcaagactctgctccagcaaatcagcagagctagggagtccaaagtggaggtagtgctcaagcagcaacttgatttgggtaagacatatttcatttggttaaagctctagttatctgacgtagtcctgtagagaaacgcactcagcaggccatggatgcggttagatttagccaagagctgtgcgagattggtgctgatgtagagattctgagttatgtgactatacttctaaggcgtttggagtactgtcagcaatttaagccgcctgtggatcccaaggtaggttaccaaattgcttgttttattgttttataaagtaaaccattttacccagatatccgactcgcttcacttcctaccaaaaatccgtgctccgtcgacaaaggaccagcgcgatatccctctatatggcatcatcaccatgcaggtagtggagcctagtctatgcacccttgagtgggagggattttcacagctgcgcctccacaaaaaagcggatcttctgcttcactctagagatgccgacggggtttccctctgccacggtggcctggagatcaactgcatgctgaagtacaaggactccagttccaagtttctacccgttgaggtgtcggacaatcgtgatggcacctacaacatatccttcaccccggatgcccagggcacgttgattctcacgatcaccattaacgaccggcccatcaagggaggtcctttcacttttcaagcgcgacaggttcgtccgcatacgggcatctaccactgctgctccttctgttccggaaagggcaaccggaacgtgatgtgctcgtgtgagggtcatatgcctggatatagtggctgcggtcatggacatgctggacatccagggagacgtcattggtcctgctgtggaaatgtccttgagaactcggaatgcaatgtggccaacaaactgcttaattcttaagtaattgattaggatgcagggctataaaacgaataaattaacatatagccaggtttcgccattttgtttgttcatcttgtgaaatttcaaagatcttgtagtttatacgcacgcgcagatagacaacaaggatacttcaaaataaacgtttttctacctgcaaaatacatgcattccaacagacccgacagtccatttacaatgtgcacacaataatctcagattgctaaggctacaaaatccctttcgacctctggaattaccaattgaattctccttattaccatatggtcagcatatgcgcgtcatatcctgaccgttgagcaacaagtcgcaaataaaagttacttatataggctccagcagaataaaggttttttttatttattgaaaatggttatcataaatacagacactgactctggacatttatggaaaaaagtccgatgccttaagagttggttgggtggttttgaaagcgcctgcaaggagctataattctaagtgggtaatttttcgttaaatgtataatcgttctttttcgctttcgatgatccaactgtttaatcttcattatcagagtaccaggataggcgctcttcgtagaagtggattaccattcgtgggattttttcattggccactgaggagggcaccatttctgcttggtccacgcctttgaactgaatgaggaatgtcaggcggccattattgtcggaggcacccaagatcttttcggcctccaggccgcgatcgaatccggtagatcctgaaacgggaatggtgtcctgctccgcatctgtggtacgttttgatttattgccagagggcgctaaataaataaaataaaaacaagtaattaatacagtgcaattttttaatagatgcatttttttattgcaaagaccatctttttcttgcgcatgccattcttgcgaaggacaaaatttgagatacatatgtgaatacagttttgacgaaaagggcaaataaatgccag

SEQ ID NO: 18347 - DNA, 2766 bp, DROSOPHILA
atgagcagggaaaatcgctcgaaaatcgctttcaagcgaaaaacgagtaacggaaacaagagtggccagttaacggattacgaacgcatccgaggggatgtggaaatagttgttccgagcccacctcctactccagctgtgccacccagtgcatccttagggaaacttaagataaagttgagttctgccaaaatttccttacgaaaaaacgcacagacttcgcagaataatctgcagaccgctcccttaccagacgcagtgcgtcgcaaatcagcaccacaactttttacctttactattgccccaaagagcgaagtgacttcgaaaatacatctaccctcagtgccaaagctaccgggtttggcaccaaagagctccatccgaagatctaggactttgggtttgtcgaatagtgcccagggtgcagggtcatcaggtacagggctatccaatgtcgaactcggtgtgcaggatagggacagtggcagtgagcccactagcagcttggctggaggaggtagctctacttcgcctgaatcccttttggataacatactcagcggtgcctcctccgtttccgtacaaagtagtagcagcagccaagccagtaatgctacggtggcacagcccataaaagcaaaggagcaactgcatcccaagaggctactcagcttgaaggcttctccggagctgagagtatctccaccaactccagacactactcaaccccaggtccagatgccaactcaacttctgctttcactgactccaagaccagaggtctttgatgcaccctcaccactgaccagaagtccctcacgatctcccggaatctctccccccgtgtcaccatcacccagcattactctcagaccgagtacccctcccgagaacaccgtaatcttcacagatgatctcaagtgcggcatctgcctggatgtttacacagatcccaggacactgcattgcttgcattccttttgtctccaatgtctggtcagcgagaactttaaggacgaatctttgtgggatcaggatcaagctcgcagtgaggagccctcgaattacagtctaagatcggagatgggtggatctagtgcggaacttactgcgacagtatcacccgccaggcagcgaggttccagttttacattgagaagaaagaagtccatggatcgcctagtgataaggtccaagagtgacggaaagcgatcgaccagttccatcggtacccgattcaccggaagttttgccagcgaggtatccacccgctgcatccgctgtcatacctgtaactatcccacggatctttcgttaggtggagtacgtcagcttccacagaactacttgctagtgagacgcatagaggtcttgcgactacaggctggggaggatgtaatctccagggtctggtgttctctttgcacagaggagattagcgccacctaccactgcattagctgcactttaaacctctgcaccttgtgcaaggaggcacacgaaaggcaaaggagcaccgctagccatcgaatgagaagcatcctggaacttagacgcgccaggaagcaaaagcaacagcagatgggattgggagatagtagcaaactagtgctacgatgcggaatccataccaactttgagctgaaggcattttgcaccaactgccgtcaactggcatgcaccgactgtttggtgatccttcataaaggccatcgacatgagaccatatcccgggcaattggacatcagggtaaactactcaaagaagctacggatcaaactcgtcccctctgtcaatatgcggagcactccattgagaggttgaatgccatagcacgtggaatcaacgaccggtgtgacgacatccagactcaagtggagcggtacatgcagcagtacatggatgccctgacagtccatcgcaagactctgctccagcaaatcagcagagctagggagtccaaagtggaggtagtgctcaagcagcaacttgatttggagaaacgcactcagcaggccatggatgcggttagatttagccaagagctgtgcgagattggtgctgatgtagagattctgagttatgtgactatacttctaaggcgtttggagtactgtcagcaatttaagccgcctgtggatcccaagatatccgactcgcttcacttcctaccaaaaatccgtgctccgtcgacaaaggaccagcgcgatatccctctatatggcatcatcaccatgcaggtagtggagcctagtctatgcacccttgagtgggagggattttcacagctgcgcctccacaaaaaagcggatcttctgcttcactctagagatgccgacggggtttccctctgccacggtggcctggagatcaactgcatgctgaagtacaaggactccagttccaagtttctacccgttgaggtgtcggacaatcgtgatggcacctacaacatatccttcaccccggatgcccagggcacgttgattctcacgatcaccattaacgaccggcccatcaagggaggtcctttcacttttcaagcgcgacaggttcgtccgcatacgggcatctaccactgctgctccttctgttccggaaagggcaaccggaacgtgatgtgctcgtgtgagggtcatatgcctggatatagtggctgcggtcatggacatgctggacatccagggagacgtcattggtcctgctgtggaaatgtccttgagaactcggaatgcaatgtggccaacaaactgcttaattcttaa

SEQ ID NO: 18348 - protein, 921 aa, DROSOPHILA
MSRENRSKIAFKRKTSNGNKSGQLTDYERIRGDVEIVVPSPPPTPAVPPSASLGKLKIKLSSAKISLRKNAQTSQNNLQTAPLPDAVRRKSAPQLFTFTIAPKSEVTSKIHLPSVPKLPGLAPKSSIRRSRTLGLSNSAQGAGSSGTGLSNVELGVQDRDSGSEPTSSLAGGGSSTSPESLLDNILSGASSVSVQSSSSSQASNATVAQPIKAKEQLHPKRLLSLKASPELRVSPPTPDTTQPQVQMPTQLLLSLTPRPEVFDAPSPLTRSPSRSPGISPPVSPSPSITLRPSTPPENTVIFTDDLKCGICLDVYTDPRTLHCLHSFCLQCLVSENFKDESLWDQDQARSEEPSNYSLRSEMGGSSAELTATVSPARQRGSSFTLRRKKSMDRLVIRSKSDGKRSTSSIGTRFTGSFASEVSTRCIRCHTCNYPTDLSLGGVRQLPQNYLLVRRIEVLRLQAGEDVISRVWCSLCTEEISATYHCISCTLNLCTLCKEAHERQRSTASHRMRSILELRRARKQKQQQMGLGDSSKLVLRCGIHTNFELKAFCTNCRQLACTDCLVILHKGHRHETISRAIGHQGKLLKEATDQTRPLCQYAEHSIERLNAIARGINDRCDDIQTQVERYMQQYMDALTVHRKTLLQQISRARESKVEVVLKQQLDLEKRTQQAMDAVRFSQELCEIGADVEILSYVTILLRRLEYCQQFKPPVDPKISDSLHFLPKIRAPSTKDQRDIPLYGIITMQVVEPSLCTLEWEGFSQLRLHKKADLLLHSRDADGVSLCHGGLEINCMLKYKDSSSKFLPVEVSDNRDGTYNISFTPDAQGTLILTITINDRPIKGGPFTFQARQVRPHTGIYHCCSFCSGKGNRNVMCSCEGHMPGYSGCGHGHAGHPGRRHWSCCGNVLENSECNVANKLLNS

SEQ ID NO: 18349 - DNA, 4357 bp, DROSOPHILA
ccacctgtccggacttgaactgcagctcctggagctcagtgcgcggctcggcattctccacggcggccatttcggaactatctatctggtgagatcacttgaacttgagcttggcaagtggttgagaggcaagacggctgtcttgttttttttttgggtggggaaatctggccagtgactcactcgcgcgagatgaaaaactacccttggtgctggttcggtgtgtgaactcggtggatatgtaattggggcggggatgagctcgtttgtgctccgtacgtaggaacttattgccaaggtttaataatttatttgcgaaagtatgaattttcacaccacacaacaattcgccaatttgtatactagagctgcaaaaaaatcgatgttagtatcgatgtcgttttcgataggcgatttttacgtgtgttcacactgtttaatattgcatttaggcttagttcgcaacaagtacaattaaagaaattatgcaaaacaagctgcaaactatttacgaaacagggcttgcttacgttttactattaaatctgagtttaaaagtttaatattgcatttaggcttagttcgcaacaagtacaattaaagaaattaagcaaaacaagctgcaaactatttacgaaagagggctttcttacattttactattaaatctgagtttaaaagtcgatttaccatgcataaactaataatccagtctgatattacacttttatctaagacatgaaccctgttcgagtctgataaaacacaattattttatgttttcaaaaatatttcccatctagtcactgtaacctttcaattcgtcgtgtgccgaaaaaattagatttatttctacaaagtctcctacgcgttaacatcaatttgaaagtagtgaagaatttatagttttttcaatacttttcataatttaaagccgcgcattcccatcggcgccgttgctatcttcattgcgcgcgcagtgttgaaaagtgtgtttgaaatattaacgctttgttttttcggtacagcgtcggtcttcagctgctcgaatttttgcttaattgcttgtatttattaatttgggaattcctcgtggccaattgggaatagcatatacttaaccatggacgattcgcgcagaactatggccggcaaggcaagtgtttggtggtttcagttggtgttgcttccatttgccgggaaaagacttccgaacattatcccattttcattgctaaaacaatagtttcacttccagcagatcgattcccgtagctcatcgataatgacaaacgatgagagcgtctccatgtatttatcctttgacgcggaggacaccctgtccaatgccaagtggcagtcggccctggtcacccagaacagccagttcctggaggtgcacaacagcaaggtggaggtaaacaccgatgataaggacctaaggcgcactatcctaaaggatctgcatcagttgaccattggggaaccggaccagaattctcctctgcgcccatttgacaaaagtattcttaaccggcacaacgccttgtgctccactccctccaagggcaatatttcgaccgaaacgcagacaccacagatcatggagagcatagatctgacccaaattgacgacaaggaaaacacacaaccggaggggtgtggcggcgataactcgaccttgtccagttcagtggacgtgaccgccaatacggttaaggccaataccctaaaaacaggggatgctaccatggacaatgtatccttgcaggaggctgccaagaccccagctcccagccaagtctatcccttgagtgcgaacgtagttttagagaatataactgaaggtaggtttatactattgagatatggtttcgttctataaacatctacatttacagtatccaacgaaggagtatccatgctggtctcgccagccggagccgaaaaggaggtcgcccatgtcaacgaggtagtgaacgaagtctctgagctaattgccaaagctctaaagatctccgctgattctgtgaagccagcgacctccaaattaaaagtggaggcgggcaagaagaggcagtccatgagctccacttattcgggtgccgccctaccgcgccctcggcgctcctatctgcccaccaccaccgcagagacgcgaacgtactccttcaagcagcgcatgtcggtggtggtcaagacaacgctcaacagcccagctcgcaagcggagtgtcggtggcggtgtgtcactaagccgtcgcagctgcttgcccgtctccaagctaacaaagagcagcataagaaagtcgctcgctgtgaccagcgtgcgttcgcctgagaagatcgcctcaaagccggctaagacatcgacaaaaagcattccggagaaagtttttagctgcaagaattgcagcacaacctttcgggtgaagtcacttcttgacgtgcatatgcgaatgcacgatccggttgacaacggagccaatacccttaagcgtctgaacagcaatccggttgcagcgggagtctcgaagaatcgctgcaagttttgcgataagaatttcgcactggaacgtgccttgcacatccatttaatgcagaactgcgacaagataccgccgtccgagaagcgcaagctggagttcaccgagctgaaccacgagaagaaagcccagctgccaaagatcggtggcaccagtggcattaaccatcccatgacgatgccccagaagccacagcaacgcattagtactattcccaaattaggtaactattgattgaacagcacgcgttcttagagagaaattattacaaacccaattcacagctccctcacaaggaacccagtccatggctccaccgagcgtgaaaaaaattcccaagaatgtggcgcatgccggcgtctaccgcactcccacaaagactgtgccctgccacatctgcaagcagtcgtttaggagcatactcgagttcacaaaccacagcctgacggtgcatggaaacaaccagcttaagaagatgaccggcagagaggatgcacagagtgcccacgattaaattaagcgattcgtgtgtagcctagtctatgtctaagttaagtgctgtggcgtagctgtggtccggtaacggcgcgttgtgaacagatcgccgggcagctgtgagttagcaatgcctggcatttcgagcgcttctaactcaatgtttcggttactcgaatgcttattaattgtacacttcagctgcacgactggactgctttgtgaattttttaggttttcgtatgacattcacacaaaaataactatcgtagtctaaatgacagtaattacattatattctaggttactaaaaactattttagttttgaattttgtgttttctttttttttttgttaaggttattgattgttgttcttaattgttttctcacggaacaaaaattgcgttttaaaatttgaatatttaaatggtcactagttagagccactttaaaaaaaaatagttggcagtactagcaaaagtagatttcgctgcttttcgctgagcgttggtttggccagtggaaatgcaggcagcattcagcgccttttatgcagctgccaaaggactcggactaatatgtatgtacgttttttgagggtgcacctgcattcacataatcacttgctcttcttttcgggcggtggcttcatgtccacaccctcggttttgatatctagcggtcctgtggcattgttcatttcggaggcatttctcgctgtgttcagatcatcgcccgctggtggcggctgctggagattctgcagcatgggcggtattggtgggggaaatttacgcaaaagctctgccagcagcatgtccacacgctgcttctggaacagtgtgccgctgttctcatccttcgctgagttggcgtccttcttatctgacttggatctatctgaaactaaagtaattcggtttattggcgaacgattataatattaaggaagtagcgtgtacttacaaactttattggaagagaagtcccacgtgtagcccttgttgggatggtagcgggcatagctactagcctcctcgaaggcggattgcaggttcaccacggtgttgagctgaaaacatagcgattaagcacacgcatcggttttccaccaggtgctacttacaatgcgggaattgatgacgttggcaagatctggcgccttgtagacggtgccaccaatgatgtagtaatcggcaatcggcgtggcttccgagggattatgacggtgctgcttgcggattacatacaggatgggctccgccacgtgcagcagtatgtattccagaccgatcatgttgctaaatgatggagg

SEQ ID NO: 18350 - DNA, 2125 bp, DROSOPHILA
atattaacgctttgttttttcggtacagcgtcggtcttcagctgctcgaatttttgcttaattgcttgtatttattaatttgggaattcctcgtggccaattgggaatagcatatacttaaccatggacgattcgcgcagaactatggccggcaagatcgattcccgtagctcatcgataatgacaaacgatgagagcgtctccatgtatttatcctttgacgcggaggacaccctgtccaatgccaagtggcagtcggccctggtcacccagaacagccagttcctggaggtgcacaacagcaaggtggaggtaaacaccgatgataaggacctaaggcgcactatcctaaaggatctgcatcagttgaccattggggaaccggaccagaattctcctctgcgcccatttgacaaaagtattcttaaccggcacaacgccttgtgctccactccctccaagggcaatatttcgaccgaaacgcagacaccacagatcatggagagcatagatctgacccaaattgacgacaaggaaaacacacaaccggaggggtgtggcggcgataactcgaccttgtccagttcagtggacgtgaccgccaatacggttaaggccaataccctaaaaacaggggatgctaccatggacaatgtatccttgcaggaggctgccaagaccccagctcccagccaagtctatcccttgagtgcgaacgtagttttagagaatataactgaagtatccaacgaaggagtatccatgctggtctcgccagccggagccgaaaaggaggtcgcccatgtcaacgaggtagtgaacgaagtctctgagctaattgccaaagctctaaagatctccgctgattctgtgaagccagcgacctccaaattaaaagtggaggcgggcaagaagaggcagtccatgagctccacttattcgggtgccgccctaccgcgccctcggcgctcctatctgcccaccaccaccgcagagacgcgaacgtactccttcaagcagcgcatgtcggtggtggtcaagacaacgctcaacagcccagctcgcaagcggagtgtcggtggcggtgtgtcactaagccgtcgcagctgcttgcccgtctccaagctaacaaagagcagcataagaaagtcgctcgctgtgaccagcgtgcgttcgcctgagaagatcgcctcaaagccggctaagacatcgacaaaaagcattccggagaaagtttttagctgcaagaattgcagcacaacctttcgggtgaagtcacttcttgacgtgcatatgcgaatgcacgatccggttgacaacggagccaatacccttaagcgtctgaacagcaatccggttgcagcgggagtctcgaagaatcgctgcaagttttgcgataagaatttcgcactggaacgtgccttgcacatccatttaatgcagaactgcgacaagataccgccgtccgagaagcgcaagctggagttcaccgagctgaaccacgagaagaaagcccagctgccaaagatcggtggcaccagtggcattaaccatcccatgacgatgccccagaagccacagcaacgcattagtactattcccaaattaggaacccagtccatggctccaccgagcgtgaaaaaaattcccaagaatgtggcgcatgccggcgtctaccgcactcccacaaagactgtgccctgccacatctgcaagcagtcgtttaggagcatactcgagttcacaaaccacagcctgacggtgcatggaaacaaccagcttaagaagatgaccggcagagaggatgcacagagtgcccacgattaaattaagcgattcgtgtgtagcctagtctatgtctaagttaagtgctgtggcgtagctgtggtccggtaacggcgcgttgtgaacagatcgccgggcagctgtgagttagcaatgcctggcatttcgagcgcttctaactcaatgtttcggttactcgaatgcttattaattgtacacttcagctgcacgactggactgctttgtgaattttttaggttttcgtatgacattcacacaaaaataactatcgtagtctaaatgacagtaattacattatattctaggttactaaaaacta

SEQ ID NO: 18351 - protein, 567 aa, DROSOPHILA
MDDSRRTMAGKIDSRSSSIMTNDESVSMYLSFDAEDTLSNAKWQSALVTQNSQFLEVHNSKVEVNTDDKDLRRTILKDLHQLTIGEPDQNSPLRPFDKSILNRHNALCSTPSKGNISTETQTPQIMESIDLTQIDDKENTQPEGCGGDNSTLSSSVDVTANTVKANTLKTGDATMDNVSLQEAAKTPAPSQVYPLSANVVLENITEVSNEGVSMLVSPAGAEKEVAHVNEVVNEVSELIAKALKISADSVKPATSKLKVEAGKKRQSMSSTYSGAALPRPRRSYLPTTTAETRTYSFKQRMSVVVKTTLNSPARKRSVGGGVSLSRRSCLPVSKLTKSSIRKSLAVTSVRSPEKIASKPAKTSTKSIPEKVFSCKNCSTTFRVKSLLDVHMRMHDPVDNGANTLKRLNSNPVAAGVSKNRCKFCDKNFALERALHIHLMQNCDKIPPSEKRKLEFTELNHEKKAQLPKIGGTSGINHPMTMPQKPQQRISTIPKLGTQSMAPPSVKKIPKNVAHAGVYRTPTKTVPCHICKQSFRSILEFTNHSLTVHGNNQLKKMTGREDAQSAHD

SEQ ID NO: 18352 - DNA, 8486 bp, DROSOPHILA
gtaatagcgaaaattattatgatgtctccccagagagcaatccattcaatggaaggcaatcacaataaatacattatttgaataaaaatcctcattcgcagataattgattaacaataacgagacaatgactactcagactgcacaactttatggttaaaatttattaaaacaattacaagcaagtgcaagtctcttagcaaaacctcaatgaatctctaagctaaacaaaagaaacacttcaaaacatgaggagtgtccaaaaaagtacttggccatcaggattcagtaaagaataacgtgttatcacaactttctgaattatttagccttaaaatttattttccactgcagcacacaaatgagcaaaacaaagtaaataccagtgcaaaactttatttatttttaattattttataacagctggtggctggcatcaactaaagtgcaaacacagcacaagcacaagcgaaactacacaaattcaggcaaaagcaaaggtattaaattgcactccagtatagaatgaaattctccaattaaatgctaccagcagcgaaatccagggccccagaccaaatattcaattacaaccaaattctccattgtgaaagcagatggaaagtgtgaaagagatagcccttagaagatagaaagagagggactttcgaggcgggggagcaatggaaatgttgtactaaataaaacgtagcctcaagtattttgtggcaagcagttgaaagtaaccaaaaaaaaaaaaaaaaaaatatttgggggagaaagaaaactttgtgctacccaaaaaagatgggtgaaaatgttgggtggctgactgcgaaaagtttgctcaggtgctatgccacttgtggcacatcctcctcagtgtttatctctggttcagtgctggcgagtatcaattagccaaatgaaattgctcttacctttggttctttctgcttcatatattccagagcaccgccgaacccgtctactcacccacaatggccggcggacttttctccatcgacagagagttcttcgatcgactgggcacctatgactctggatttgatatttggggcggtgagaatctggagctatccttcaagacctggatgtgcggcggcaccctggagatagttccctgctctcacgtgggacacatattccggaaacgttcgccctacaaggtaagtgcaatcgatcaattattgaaaagaaacccgaacagaaaatggcaaatcattgcggacagtcaggcggacggacacaaaaccaattccgatagacagagagagcccactgctcattaagaaacggcagtgggtctgctggaatttaaaactcctggcccacatgagtgggtagcctcaggaccagttaccaatccggtccagagcttcgtgtttggtaaacagtagcccaatcctagtgaccccgtgccgcccgtccctcctttctgtcgaatagtagccgcaaagcagcaacatggcacacatggcacagacatggacttgcaaggactctcctctctcacaaacacacacacaaacaaacacacacacacccgctcactgacatggacatgcattgcggctgtccttgcagcatggtatctagtgattgtgatggtgtgtttgttagtgtgtgtatatttgtcgagttcacccgctccaaagacccccctttccccaaccacaaccatccattattccccctggatcttcactttttggagcagcttcaattatcaacggtttacgcttgacaaaagtttggcaactgttttgatgtcaatggcgtaacacatacaaaagcccgaatatacctagagtggaactaaccaattgggcacctgccaattcccagcggagttggttgggcctcgataatcaccagtaaagcccaaagggggttgacctttctagatatatattctgtagggaacattatatattagacagggtaaagaaaattcagaatgaaaaacctttcaaaataatacaaaataatataacaatggctaatctaatggcactcaataattttatatctttatgaaagttagtttgcagtagcgaattatagattttaattgccgtgttgcacaatgcaataaaataacacagcaattaattacgcacagaaacaatagaattaaaatctaataaaacataataacaaaccaaacaaataaatacgagcaatctaactccatatgtagtccaattctacacgcattactataattaaacacactcaaaaaataattataaacaatgcagaacaattgaattgtattttgcacctgtaggcaacaaaatctcagatggcttctaaggaatcgccacagatcgttgtatttatcgcaaatctggtgattctggtgattctggtgattccattgctccacacaatttacggccaaagctaggcagcgttttcaataaatgtctgcacacttcccctctgggccaagtactttcctggtgccgtcgagaatgcagcaatgcacaagcacagacacctgtacagtgaacacacgaacacaaaacaggacacacaacaggcggacattgttcgcatactggggacaaagggcggaaaagacacaaagggaggggccaagacagatggccagctggccaggacaaaaccgcaaaagggctgagaactggctgccactggagccacctaatgccactaagcaaaagctactcattcaggtaattaggctttgttgtccactccgccgggtcccccctcttaaactccgccactcgcctctgtttgctgaccaaatatttccattgactcgggcacaccggcagccgcccattgattgcgccctgcctccccattgaccacccactcatggccatcctgtttctgttttcccttaattgcagtggcgttctggcgtgaatgtgctgaagaagaactccgtgcggttggccgaggtttggatggatgagtactcgcagtactactatcatcgcatcggcaacgacaagggcgactggggcgatgttagcgatcgcaggaagctccggtaagtgctgacaatgattaccagtttctcagatctttcatatctatttacaactatccacatagtaacgatctcaagtgcaaaagcttcaaatggtatctggacaacatttatcccgagctcttcattcccggcgattctgtggcccacggagaggtaagttttcagagttccataagatgcttaaccctgcttaaccaatcccttgaaccaactaaacatccctaatctaataccaatccaaatcaacgacaacccataaacaccatccaatccacagataagaaatctaggttatggcggtcgcacctgcttggacgcaccggctggcaagaagcaccagaagaaggcggtgggcacgtatccctgccatcggcagggtggaaaccaggtttgttgacccatctcggcagcactgcgaccgccacaaactccgtccagcctcaagaaatccgcgccaggaacaacgaactctatttcacttttcgctcttttcgaaactactactaaaaactgtgaacccaaactaaacactcttttgggcgattgggttttatttcccccttatttctcaattttttttgcaagttgtcagatccgctatatagtgaacttaatttacagatcgcgaatgtgcccaacggcatgtgtctggatgcaaaagaaaaatccgaagaggaaacaccggtttccatttatgagtgccatggccaaggaggaaatcaggtatccacctccatgtccacatcctcagaactgagaaaaggaggaggcggcgattcagagtccctgattaccgatttctcgatctcgttgctttatgaaattattttccaatcgcttttctgctgcggatgtattctttcctgactttgatttaacgcttttcgcaccttaatttcaagtattggtatccttttgttacgtttccgcttgcttaattaactttaacctatatccaaacccaatttcacactagataaactacttccacaagtcatatcacataacatcatcatcgcttaaccaagttacaaaaggtttaggttgtgaatgaatccagttggactattaccattatcaacttttatttaaaaactagaagtaactcaaaataatattgtttttacaacttcaaaatcacaatcttccgaaacaattttatttatatttatattttaataattttggtctgctgctttccccttaatttagcttcacgtttttctacaattcttaactcagctcattaaaactttcccaaaatactcttagtaaaaaacccaattatctaaattcttcaacttaatttcatttcctttgtgagaaaagtttattctgtacattacttttgatttttggtgcctgatgggaaatccctttccttgagtaatggttttcaaagtggacccctccttacaaaaacggacaacaataatattattgccgttgttaaattctacccttgtgaaagtcctgcggttttgagcactaattttgacggagtttgtggctacaataacataatctgtagagtacataaatattttggatttattgctcttcagcaaacaactctcatattcaatttatttgcctagcataagtgaaagtatatatcaataaaagttgccaactgaaattgcgatgacaatttaacagttttacaggatgcaaacaagcgtgccaacacaacacacacacacacatacacaagcacgctcgtaccaatacttacgcaaatacaaagagttgcatatatataggtacttcggtcgatttatgccatgtcacaaaaattaattaaaacacaatcataaatataatgtcaaatgataaatcatttgcatggcattggctttggcttcagcttatccgtttattatgcattcagacaaaaaaaaggaacacatttacaatcggcattctacaaaaagcttactgactattttgaactacaataaggatcaaacaacacaatagcaaataaatgaactgcaacaatagaacacttcacagtcacacgaactgacaccaaaactagaaggaatgcctttttttagggtcacgccgcatagataccctatctcaatgtggctaagccaattcgctagctaaccattcataaaaacataaactataattccatgcataatatatttctaatagttaactattcaactttgatctagctacacgtacagataatatccttgtgcctcacaaatgctgtgtactaaaaacgagctgagatacttttacgctcacacagatacgctgcggatgtgtggggttattgtacattcaacatttaaagtgcgggaaacgtgttgacctcgttccgcttgccctaaaatcgccgccccagacagacaactgccacgcccactgcctaaagccccaagctctcgccctttcaacggacacacaaacaatgcaacaaagtgaaaggcgcatttaaaggggggaaattaggaaaaagatttcgccaaatgtttgtatgcactcggaaatgcggttaaaataatcaacatttgcgaagcaaaaacgtggacattttcactcctctgcacgcaaattttaatttcgcacatcgtaaaatttagcaagcgaatccagccaaatgggtaaaggggaaaataaaacgcttttgactaccacgtcaaaggatatgcacacgaaaaaaaagaaaaaaaaaacggataagggtggaaaaacgtggcgtcggttgtactgtccacataatgaaagtatttcgctcacgcggaagaaaaacgcgtctaggctagcaaaaatatttttcagcagcccgcaaacacattttcaccgggggggtcgacaaagcatggagttgaatgaaaaagagtgcactagataaaaactgtgtagtgataaatgaaaaaacgtaattaaaaacgcatctcgcgcacacacacacacacacagagaaaacacgaaacaatcgcgggggaaaagagaaagcattgataaaagaaatgcaaattgagaccgccaaggacgatggtatcgttgggggaggtgggttgcaaatctaacaataagcgaggatgagcacaaactgcaaagggaaagtccttggcgagccagtgaaagtgcgcattaggctgaatattccgctgcacggaaaagtatatcaagtatatcaaagtatataaaaataatgtaaaaatctgtggtcttaaagttttcaaatactttaaaaatgcacaaatattgaatcgaataaattggtggtagtatcagccagtttttaacgaatgctccttaaaactgccctaattgaacggtcatacaataacagtaattattcatggcacaaaacctgcaggcttcctctgcgttgaccattctcatcattattccagtcctggcatcattataaacaaaataaagatggtggtccatccgggcagtcggtgcggaaacggaaatggtaacacaaaatggcggctggtcacgacctggctgccagagtggaggcgcgcgcggatcagggggcgtggttggagcagggcaaacaaaggcaattccagtcaccagcagaatctgaaccgagctcaggccatctggcattggcaacgtgttttaaattataaataatcatggccagtcagtttcagacaaaacccagactcacgcacacagacacgaccacacttactcacacacacacaggataggatatatacatatacactcaaactcaaacacagtcacgagcgaagctgctttttggcatttaattgaataaaacattagtgtgtaataagttgtgcgcttgtagccctggaaaaacttttggcaactggcaaatgcattcgcccgccattacaatttatattaatgtgtttccctcaattttcccagtactggatgctcagcaaggcgggcgaaatccgtcgcgacgactcctgtctcgattatgccggcaaggatgtgacgcttttcggctgccacgggggcaaaggaaatcaggtgagtggataaaatatatgtgtaatggtaggaggtactatgaaaatattcctttaaaatgtattccatgtttctgagaaatgtttcacttgcatgtaagataaaaagagataacataaatacttaaatgtgaccttaaagtcatttctttctgcaaaggcacctacacttatcatatatatgtacatgttataaataacttaagaaaattgtaaaactgttaaattcaacaaggcatgtagagtggtattcatttaatcgaatcctttacttttagttctggacgtaccgcgagaacacaaagcagctgcaccacggcacctccggcaagtgtctggccatcagcgagagcaaggacaagctgctgatggaggagtgcagcgcgagcctcagtcgccaacagtggaccctcgagaactacgacagctcgaagttgtgaggctacttctatgcgaggggcaacctcctgttgcccacttcgcggcgacaccaacaatcacaagcatagcagcaggacgagaagtggaagcagaggcaggacataaagtggcggcaggagctggagtagttagattcccccgaggcatgtgcaatagtgggagtggcagagggacgatcggatggcagcagcagcagcagcagcatcacttgccatgctatctatatatattataaaaaatttatatgtttccaaacaacagagtagacgttacttagccctaagtaccacacatccacagactagacaaaccagacactgaaaaaggaacgactgctgtacagtagctataagttgataagatttctagccctaagtcgcagcacttaggattaggctaatggagcccggccaaggaccagtgctggccaacaaagcgaagtcgtagcgcaatttttgcatttaaatttgtaaacatttagcacaatttacggaaagtgtgaaccttgactctgtgtacgaattatttatgaattttacaaatgtcattaaatggctctgcgaaagcctcattccaaatatatgttttagctggtaagccctagactaagtctaagttggaaagcatttggtgatagcctttgtttcgcccaagaccccgagcattcccgagtttatatgaattcttatagctatctttctgtaaatcccttgaaatggcgaaccaaatttttgattttatttattttcgtacgatgtgttgcttattttttagacgaggagcgttgccaaattacgtttagatctttagatttcggataactttgtgttctctttgaaaatccaaatccgttgcatttcctttcgttggattctcaaaacgacaacatatcctatttgttggacaaagccagcttgtagtacttacatatatcagtttccaatctaccgatatcacacgagataaatttatatatatatagcgttaggccctagtagt

SEQ ID NO: 18353 - DNA, 942 bp, DROSOPHILA
atggccggcggacttttctccatcgacagagagttcttcgatcgactgggcacctatgactctggatttgatatttggggcggtgagaatctggagctatccttcaagacctggatgtgcggcggcaccctggagatagttccctgctctcacgtgggacacatattccggaaacgttcgccctacaagtggcgttctggcgtgaatgtgctgaagaagaactccgtgcggttggccgaggtttggatggatgagtactcgcagtactactatcatcgcatcggcaacgacaagggcgactggggcgatgttagcgatcgcaggaagctccgtaacgatctcaagtgcaaaagcttcaaatggtatctggacaacatttatcccgagctcttcattcccggcgattctgtggcccacggagagataagaaatctaggttatggcggtcgcacctgcttggacgcaccggctggcaagaagcaccagaagaaggcggtgggcacgtatccctgccatcggcagggtggaaaccagttgtcagatccgctatatagtgaacttaatttacagatcgcgaatgtgcccaacggcatgtgtctggatgcaaaagaaaaatccgaagaggaaacaccggtttccatttatgagtgccatggccaaggaggaaatcagtactggatgctcagcaaggcgggcgaaatccgtcgcgacgactcctgtctcgattatgccggcaaggatgtgacgcttttcggctgccacgggggcaaaggaaatcagttctggacgtaccgcgagaacacaaagcagctgcaccacggcacctccggcaagtgtctggccatcagcgagagcaaggacaagctgctgatggaggagtgcagcgcgagcctcagtcgccaacagtggaccctcgagaactacgacagctcgaagttgtga

SEQ ID NO: 18354 - protein, 313 aa, DROSOPHILA
MAGGLFSIDREFFDRLGTYDSGFDIWGGENLELSFKTWMCGGTLEIVPCSHVGHIFRKRSPYKWRSGVNVLKKNSVRLAEVWMDEYSQYYYHRIGNDKGDWGDVSDRRKLRNDLKCKSFKWYLDNIYPELFIPGDSVAHGEIRNLGYGGRTCLDAPAGKKHQKKAVGTYPCHRQGGNQLSDPLYSELNLQIANVPNGMCLDAKEKSEEETPVSIYECHGQGGNQYWMLSKAGEIRRDDSCLDYAGKDVTLFGCHGGKGNQFWTYRENTKQLHHGTSGKCLAISESKDKLLMEECSASLSRQQWTLENYDSSKL

SEQ ID NO: 18355 - DNA, 11648 bp, DROSOPHILA
caatgcaatgtaaactcattaatttaaatgtaatataaatcattcattctgttttaatgtaattgtagttgataaacgttaacgcgaaacgcactcatcgtgctgagtatgtagcggtccgtgtgtgtttctgaatctgtatcgtgtaatatatatatatacatatatatttaaatcggtttgcataagagcacagcacttttaccagatgcctcatcgtgcggttgattgtttgtttcgttttgtccacgatcggctaatcccgcgatgcgccggcatctgtatcggtatcgagatcggtggtgggtgcattaaccccgaccgatcgtctggccgcgtctctaattgattgattgtttgattgataaacgtatatctagctaactatgtatgtagctagctatgtaacataacaagtccgtgattgcggtgcagtaccatatctcttacaaggtaaacaaatgctcgttccctatcatgttaaataactcaacaaacgattcttaacttggcagtcgacttgtggcccagccatagccatgtgctcagctgcttaaggctatcgtaataatattaataatgtgttcggttctcctccactccgatcctccgcttagtctagctgctaaattctagtccacatatgggctcctccactaaagcttatagaaacataatttacactcgcgctccactctgctcgtatgcgtgtgatttgggatagggttggttgtgtggtattaggggtgtgtgtggtaggcactcgatatcgctgaaggcacaacattacgattagtcttatcttaattgtattaagtactcggaacacgctttcgcactcgcttccctccgaaatcgggagttccttcgacaggatgagtgattgtcaattaatgttgccaataccgaaaggtgctatcgaagatagttgtggctgcgatgactgcgaggtgttcaggctgtctggcatgtcttcattcgctccgatccaagcagctccttaggccgccggcaggggtgttagcttctcgttgcgccgctcctcccatcggctgacccaggtgagcgggtagcacaggaaggccgagaggaggatcaggccaccagcgaagtagaaggcggcgttgtagctgcctgtcatcacatagaggccacctgttggataaatgaataaacaaatctttagttcaagtttcatccgatctctaagaacctctttaattggccaaaactatttagtttataccattgccactgctgtcggaaactcacctgcaatgggactgccgaaagtagctgccaatccctggaagagcatcaggaatccgtacgcgttggtcagcttctccagtccgatcagctccacggcgatcagggatcgcagggcggagaagcaggcaatgcagataccgaagaacagggcgaatgtccactgggtggccgtgttgatgacaatgccgctgcagatggtagcgatgccgccggcggttagggcaaagttgttcagccagagtggctttacggcagggaaggaactaagggatccgcacacgatcctagcaaatgtgtttacaacgccaattccggagagcactccataggccgcctgttcatccatacccgctgccttggcgcgatccaccaggaaggtaaaaggcacgaagaagcccatcatggtgaggaagccgctgaaggccaggcacatgaaggcgggcgatttgagcagcgtggtgtccaacatggtggataaggtgcgacgcactgcctccggacagatgcggcatcccttctgccgatcctccagcatgtcctgcttggtgggcagacgcgtcacagacatgtggtaggccagcgaggtctgcgattggtattgcggaatcctggtcagagatccagagaagaagatatcgtctcggtacattggtctggatgaggagtgcgactgtccatggtgggcctcgtgagctgcagcggcggatcgcttgccaatgtcctgaggtctgcgtccggatacggtgtgacggcgtgcctggatggtcactggcttggcctccgtctccaacaggttatcgttctcggcctcctcctcgttctcacccacggtggtcagttccttgtgcagattgaaggtaagctgctggggatctccattgggcgtggtgggctgcgacttccttagctgcttcagctccgtgcccttgctgccctgagccgtgcccgatggtcggcgctccaggttcatgcccttgaagatctcctgggcggtgggataatggttacgctgggaggcacccatgtacgtgttgtgcgccgagttgggcatcgagtaggcgaaacgaccctcgggcaggggcttggtgaaggcggcctggtggagttggggcgtaggggccactgtattgccatgaccattcaacttcttcttctcctgctcatcaccctcctcgttggtcacagacagcgtaatgggttggatgggtcggaaggccaggccaaagagggcacaggacaacacgatgatgccctgaatggccagcgtataacgccagccggactttagcaggattttggtcagtggggcgaagacaaaggtgccaactccggaaccgcacatcgcaactccggtggccagggcacgccacttctcaaagtagaatccaatgatcaccacagcgggtatgtacaccatacagaatccaatgcctccgagcacgccgtagattaggaacagatactccacactggtggcaaagtacgagagtccgaagcagatggctgcgaatatggctccggtgatcgtgaccggacggaagccaaaccgattggccatggcactaacaaagggtcccgccatcaagtagcatccactgagcagcgaggatacgaacgccacgtaggccttgctcacaccgaactctgccatcagctgctcctgaatgagtccggagcagaagacgatgccgtcaatgaccgtgcagcagaggaaggaggcgaccatcaccacccaggcccatccgctgtccggaggcacgacgacggctgcctcctcgatttcctcctcgccctcattctcctccttaatgttttccggctgcttggacaccaggcctttggatgccagctcgtcctgcgacttggtctgttgtgtggccattttctggaagtacaattggggtaagaatgaatcagtatgggcgcacccaggcaagatcggtttgtgtgtgtgggtgtgtgtgttacgcaagtgtttacccaaattgtgtggccttcagattgcgtatacgcccccacgactccctacgttttgcatggataagtctatttttgtatgtcacgtgcctcgattgtcgcaaaattaagcatactactgcacctgtactgacactatgtaggtcaaaataataggaccagttggggtacttaaaaagcattatgcctgaagaaggtaaatggcaattgattgatcctttcaattttgtaacacttttattattctcaattaacagcagacaggcagtaaaatatgttgctcaattgatcagattaagtaatcgtatttatagtttacccgtttcttcactacaaacaagtgttcattgccttataaacagattaagtaaatatattgcagggtattacacaatctgatatgagattttaagattcagcactacgaatcttgccccgactatacaaatgtatctctgtatctgtgggatatctgcaaaaggtgcgtggtgcgaaaggctttttgctgtttatcacatcgacgtcaatcggcagatggcactgacaggggggcgtcgatcagtgggtggtgggtggtgtgtatgttttgggggtggcaggtggtgcttcagtgggtggtggtggattgtcaaacgtcagacatggccaatgccagggccattagtgcgtcaacgattgtcttggccgaggcacaggcacaaataccaaatggaatttgcaattatgtatcccaacaaatggttctttaatttgcccgaggagcagtccgtctttcgactcgacaacatacagatacaactcaatatgccaggcacagcggtacgaaaaaatgttctgtggattttgtgctttttttttctctgttgattgcttttcttgtttgtccacatctttcggctaacaaactcttggccttggcgctgccattgttgcctttatctaatctgatctgccgaggggcaattcgcccattcgccccgttaacaaacacacgactacagccggagcggatgcttatatggaccctggggatccagaccactcataaacacccgagtcaagatgagatgtcgtcttttgtaaccacaacgaaaaccaatcttccacaatgtcaccactaggaactcgtgcaaataggcttagaaaatctgtgataatagcctcgtatctcagaaatgcaaattgcagggatttacggtcgccgagatttcatcggttgagatatagccggataactgactgataatcgctggctcctgatatcccagcttttttcaggctgcattccataaattaattgattatttcgccagatttttgcggcttatcatgtcggatttttgcagcccggcaacggcttaaccgtatccgtatagtgagctgcttatggccaccagatacggggttttcgtacctagcaaccgtagtgaatccaactccacgaccacctccaccaccacgtgacggggccaagtttgataatttcatttcctttatgaccgaaattttgaccatatcattgaccatgcgaatttatggtatcccataaagaccgagcgtcccgatagtactcgtacaagggtctggctgtgctggcattttgtttattgagcaattgaaagtgttgcgacaaccatcctcgatccaatccaaacacaataacataatactggccgcacaccccgcactcgacttgcgctcatatttcagattttgttttcattttcatgcccaaatgaccacgttgacggcatggggaagtgctccgaagtgggtctgcaactgagactactttggatgccagtccaaagaatcaagaatcaagaatcgagaatcaagaaccgagaagtgccaaccgaaccggacatcgggcacccatcgagggaagcccgacaagtgccttcgcgtaactgacttgcaacagcaacagaagtataaatagatattagcgtttacttgttgccccgatcccatattgtggccagcatatcgaaagcgaagacatcttagggggctacaaattggacagaggacgcacccagctagggtcttggataactgctcgtgggccttgttaactatcctaatgggcttgtaggcttgaagcgaatttcagttactaagaagtaagtatacatgaactattggaatataaagaacatataatatgttatagctacgaagcagacaataaaccaaagttcttgtcaaaggtattaaacgattgcgctatcaactttatcaactagtatttataagtatccatcaggggtttggtttaagcccataggtttctaatataaagcccttgcaaaaatagattttacattccattaagttgtaagatatccttttataatatccttaagcttatttagctgatattgcgtaagagtatctcatctttgagctcgaaaaatcgaacttaaacgctctccgttctgtttgtttcccggtgggtttggctccacaagcggcggataatgtgacaaggtggctcctgcgccctccatggccatgtggcctccatggcctgcgtaaccgacctcctcccgcgcttttggtaagctaatcccgctgcgagcaaacagcccacgtctcttgccaccgactaccagccatcattcattcattttttgttgtaggaaaaacaaggaggcggaggtcgcaatcacttgtcagtgccaattgtgagcgttgacaacgcttaaattgatgcccgtcgattgaattaataaatgttataggtaaacacatatggccagaataggacggacacttaagtgggcattccgtggagtcgagggaaacaacccggccagacgaaaacgcagacgcggtcgcagacggcgagttcttaagatgttttcctgccggccgacggttttccttaatcgtgcacatgtatctacaagtatttgtatctctatctgcagtccgtctccctcgttttttttttttttttgtgtgctgcacacatatgtcgcatgtagtacatggctctgttatttataacatgcaactgtaggcgtccggttcttggtcttcttactccgggcgtccttctcttggcccccacttcccattcccattcccattcccattcccaattcccatatcccctcccacagccactcccaatccgccactcttcgtgcgtgcggacccatttagatagttggttatatcatggtatcggtatctcaactcggacaggttccgagtgccgtatctcagcgccgcaatttgtaggtacaagtgaagcaatcgttaaacgactttatgctcaaaatattaattagctaagccggccccaaaatggagcgagtgccctagaaggccagtctggcgaagaggtttccgtgaaaacgatcatacaggccttgaaaatcacgaataaaggatgctctatcaaaactaagttaaatgcatcgggatcaacaagcaaatatactctacaaaaatgaaaatcaataacaaaatgtttgggatttcatattaacgtttttacttacaaagtatctttattacttaaactttttttgtattttctttttaagtaataaaaaaacgtaaattttcaagaaaatcttgaaacaaatagccaaaagctattttaatatcaagtattgaagtatttaaaaaaatcatgcgtaagtcatgtgtgataagcacatgttatatttcaaattatgatgaatgattaaatagttttacgaatattatttggaaagcaacattctgatgataaaaaacatacgtcaaatactaaatactcaaaaaaatacgtatatttttctggtaaagtaattgaatatgatggtttaaatggaaatgaaaaacagctctgccccacaaaatcagccggaagatccaaaaatatatcgtcacaaaatcatgtggactactacttggatgtatggctttctccggagatccgcggacgatctccactctacacgactccacgcgcgtgtcgccacttcaagttggccccattccggggatcgggatggcaaagacccgagggcagctgtcacctcaagttcatcgtccgccctctcacccggagtccagtattacgcacattgcggagcaatccgaagagcactacgatatggatgtgttttgaaggaagtatctttccgtcggcacaatcgtctgacacaattagcaatcttatgcgggacactatcgacagttcagctgcttcttgagtttccatgctgctattggtgttgactattgaccaaagaccactatcgcatcggcatgaacaaaggcagcgacaattagtggagcgatcaatggtcgatggggttggggtctgtggtccgtggtccgtggtctgtgctccggggtcctctctttttttgtcggaagtagagcatggattcataatcaattaacatgttcaaatcatggaaaataagtgcaagtagcgcaattatttctaattgaaaatcgagagcgttcgagtggacaaaagatttcgtgatttgagcgttagcttctggcgctatttaaatgtttatttattggcttatcttgcacgtggctgcgtcagtcatttcccgatgtcattgcctcatgacgcagcccagtttccacatccacatcccatctctccgtttcgggcactgtttccaatcccaatccgaataaaaatctcaatacgattctgattccgatttcgattcgaccccgaaacgagctgctaagcaaaactgatacgaatcccacccggtttcgatgcaatccatccatttcgaccccgacattggcgccaaaatgcagttgctgtttttgttttcgacgactgtgatcggatctgataagcaaatcaaggaaacaaacaaactgcaactgcagtctaaaattggcttaatctgctgtaaatatttacacaccgattaacgatccgtgttaagggaaaatttccacagcacgccatttgagtttcgagattaaagattcgagtctagagattttcgatactgtctgcggattttccaatccaccaattctgctggccacacgcaagcccattcgagcattacgaagaatgagaaaccccacagcagcgagaattcttccatcaagtgtttgagaaaagaaaccccaattatttggcaatgtcttgggccattgtaaatgcagaaaacatgtttgctggctgaaaatgtgaattttaagatttctaatttttttattttttgcaactaacacgcctaattaaccgaaaattatcgaaaatccagtctctttatggctgtagcttctgactcagtttcagattcagattaaaattcagtttgattaattgccaaggcagggcaattaatggtggagcggggcaaattgggtcattggcatcttgcagttctaatgcttccaactcgcgtcacggcccattgatatgaatatggatgtgtgttgtgtgactttggttactcttttcagaacgcggtgggattttcgatttcgatatctcttggtggacgactctgactggtcgacagctcgacagctgtgggttatgccattaacacttggcttgcggcttgttttgtttgttttttgccggcaaccggttgaaagataaaacgcaacaaaagccacgcgcagctacccaaaaaaccgagccttgggcaaatgccaaaaaatcgctcagtgagtcacccgtcgattggcgaaaggcgtgtccaaaacggaattatatctgttcggatcaacttggatagaagttaaagccaggcttagctgcccattcgatttgcatgccaaattgctggtcataatgatggccagagtagttgaaaacctagctgcatttgcatagcagttgcagaaagatacaaaggtatccgtcagatactctgcaagcttatacttaaaatgtgccggttacttttgtagtttagtgtgagccatttaatgcagtttaaaaagaaaactaaaaattgtacgaaattagtcaacatcaacatcatttaagacatatcttttagatattttctaccaactgaagttggtttggtatctctcaaagcgaagcgaaccctccacacatccatcaccagttaagatcacgttttttgagcggtgcccgagtgaaactggtgctggggagcagccacataggcttagttagtatcgatctaacgtaagctgatttcgttctttgttcaagttcaggggggaggggcccaacaaagcaacaaagacggctgcaaattgcgactcgaaagccgtttggcgctgccttctttctttctttttttttcctggtattgccagcaagaagagggggctcaaagtattcccggttctcttccctttttggccatgtttggtgggaacatggttaatttttcgaaccaccgcgcgcacttttgccgcatgtcgctgctgctgctgctgctgcgttgagttgcgttgcgtttcaacgtttttcgtcttgtgtgtttttttttttttttttggccaaaacccgtttttgagccaacttcggtggagagtgagaactttgggttcttggcagttggcttacctatatgttgccgatgtctcgatgttggggtgtcgcggtgtcgctgctgtcgatgttgctgctgcgttgttgctgatgcgtctagtatgttgcttgtttggctggcgttttgttcagcttattttggtggcaagtgctgctcttttatttttggcgcgctgcaaagaatttgatgtggtcttggttttggttttggttttgatttggttcggttatcgtttgttttcgtatgagaaaagcgaaagcaatcgaacgcgtacgccgacacagtaaaagcgaaagttaaaaagtcaacggcgatggcaagagcgacgaggaggaagtggaagtggaagcgggatcgacgtgaagcgaaacaacacgcttaaaaatacttctagcatatatttatcagtatctgattgtacatatgtttatatagtttggggcccgagcggatcgcaacggatcggttcggtacggaatggagcaaagcagcgtatgtatatgcacatatacatatgcatatgtacatatgtatgtatatatggggagcatataaaaaagtgcgcgcgactatagttcgttcctgcgccgatgttgcctatattgccattgctttctgcgcgtttcgggaatacttttcgtttcgtttcgtttcgtttcgttacgttacgattcttttcaattcttttcaattcgattggattcgttttgagctgcgtggtgtttggtttgatttactttattctgttcttgttcctgctgttcgttttcgaatcgaatcgaatcgaatacaacactcggctgcggtttccgctgaggacgcctcctgatcgcaaatgccgcatgtacgatgcgaacgacgcggcggactaaagataactaagggaaatcagaatgtgttggcagtataaaccgcgcggcagaaagcagcacgacagccgcagtagcagcagcagcagcggcagcagcagcaccaacaacacgttctagcagtgtgcgtgagtatctgtgtgagcgcaactaccaatgtgtttgtaagttgctcttcggatttgttggttacatggagtgcgttctgaatggaaacactagaatctaatccgaactaagcccatctgatcggtttcttagtttccgagacccccaattccacactatggagtagcgacggatgcatttggagcgatgaaagcagcaagagcagccggcatcgttcgcaactctctgtcaaaatggcccgagaacactgtgtcgtatacgcaatgccgcgcagccactagttgctggtgttgtgatgatgatgatgatgaaggtgctatttggtatggatgtgactgttgactttgcctccgtttcgatttgagtttttgggtgtgtttgctgtggcggttctctttcgtttttttttttttgggactttttccggagaagaaacaacacatatactcacttgtatatcgtgttcctgaacaacaatatcaatagttttggttagctcgtgtatttgccctcgtgctgtggccatttctattgtggtgtgtgtgcgtggagggtttttggctttttccaccagcaaagagataaactcaaaaatgtgaatgggagctcattcaccgggttttcggggagttcgggacctatgtatgtatgtatgtttgctcatcagcaggttgccagctttctgcttgctaatggcccaacaacaaacagtcggacatttcgaaattgtttctagaaattatgaaatcggagcagcgtcgaaaaaagaagatagataaacccaatacggttgtaattagtagtacaaaaataaaaaaaaaaaacgaaagtcaggcactgcttcgcattcatttgaagggcc

SEQ ID NO: 18356 - DNA, 2320 bp, DROSOPHILA
gtcgttcgcatcgtacatgcggcatttgcgatcaggaggcgtcctcagcggaaaccgcagccgagtgttgtattcgattcgattcgattcgaaaacgaacagcaggaacaagaacagaataacgcgccaaaaataaaagagcagcacttgccaccaaaataagctgaacaaaacgccagccaaacaagcaacatactagacgcatcagcaacaacgcagcagcaacatcgacagcagcgacaccgcgacaccccaacatcgagacatcggcaacatatagaaaatggccacacaacagaccaagtcgcaggacgagctggcatccaaaggcctggtgtccaagcagccggaaaacattaaggaggagaatgagggcgaggaggaaatcgaggaggcagccgtcgtcgtgcctccggacagcggatgggcctgggtggtgatggtcgcctccttcctctgctgcacggtcattgacggcatcgtcttctgctccggactcattcaggagcagctgatggcagagttcggtgtgagcaaggcctacgtggcgttcgtatcctcgctgctcagtggatgctacttgatggcgggaccctttgttagtgccatggccaatcggtttggcttccgtccggtcacgatcaccggagccatattcgcagccatctgcttcggactctcgtactttgccaccagtgtggagtatctgttcctaatctacggcgtgctcggaggcattggattctgtatggtgtacatacccgctgtggtgatcattggattctactttgagaagtggcgtgccctggccaccggagttgcgatgtgcggttccggagttggcacctttgtcttcgccccactgaccaaaatcctgctaaagtccggctggcgttatacgctggccattcagggcatcatcgtgttgtcctgtgccctctttggcctggccttccgacccatccaacccattacgctgtctgtgaccaacgaggagggtgatgagcaggagaagaagaagttgaatggtcatggcaatacagtggcccctacgccccaactccaccaggccgccttcaccaagcccctgcccgagggtcgtttcgcctactcgatgcccaactcggcgcacaacacgtacatgggtgcctcccagcgtaaccattatcccaccgcccaggagatcttcaagggcatgaacctggagcgccgaccatcgggcacggctcagggcagcaagggcacggagctgaagcagctaaggaagtcgcagcccaccacgcccaatggagatccccagcagcttaccttcaatctgcacaaggaactgaccaccgtgggtgagaacgaggaggaggccgagaacgataacctgttggagacggaggccaagccagtgaccatccaggcacgccgtcacaccgtatccggacgcagacctcaggacattggcaagcgatccgccgctgcagctcacgaggcccaccatggacagtcgcactcctcatccagaccaatgtaccgagacgatatcttcttctctggatctctgaccaggattccgcaataccaatcgcagacctcgctggcctaccacatgtctgtgacgcgtctgcccaccaagcaggacatgctggaggatcggcagaagggatgccgcatctgtccggaggcagtgcgtcgcaccttatccaccatgttggacaccacgctgctcaaatcgcccgccttcatgtgcctggccttcagcggcttcctcaccatgatgggcttcttcgtgccttttaccttcctggtggatcgcgccaaggcagcgggtatggatgaacaggcggcctatggagtgctctccggaattggcgttgtaaacacatttgctaggatcgtgtgcggatcccttagttccttccctgccgtaaagccactctggctgaacaactttgccctaaccgccggcggcatcgctaccatctgcagcggcattgtcatcaacacggccacccagtggacattcgccctgttcttcggtatctgcattgcctgcttctccgccctgcgatccctgatcgccgtggagctgatcggactggagaagctgaccaacgcgtacggattcctgatgctcttccagggattggcagctactttcggcagtcccattgcaggtggcctctatgtgatgacaggcagctacaacgccgccttctacttcgctggtggcctgatcctcctctcggccttcctgtgctacccgctcacctgggtcagccgatgggaggagcggcgcaacgagaagctaacacccctgccggcggcctaa

SEQ ID NO: 18357 - protein, 678 aa, DROSOPHILA
MATQQTKSQDELASKGLVSKQPENIKEENEGEEEIEEAAVVVPPDSGWAWVVMVASFLCCTVIDGIVFCSGLIQEQLMAEFGVSKAYVAFVSSLLSGCYLMAGPFVSAMANRFGFRPVTITGAIFAAICFGLSYFATSVEYLFLIYGVLGGIGFCMVYIPAVVIIGFYFEKWRALATGVAMCGSGVGTFVFAPLTKILLKSGWRYTLAIQGIIVLSCALFGLAFRPIQPITLSVTNEEGDEQEKKKLNGHGNTVAPTPQLHQAAFTKPLPEGRFAYSMPNSAHNTYMGASQRNHYPTAQEIFKGMNLERRPSGTAQGSKGTELKQLRKSQPTTPNGDPQQLTFNLHKELTTVGENEEEAENDNLLETEAKPVTIQARRHTVSGRRPQDIGKRSAAAAHEAHHGQSHSSSRPMYRDDIFFSGSLTRIPQYQSQTSLAYHMSVTRLPTKQDMLEDRQKGCRICPEAVRRTLSTMLDTTLLKSPAFMCLAFSGFLTMMGFFVPFTFLVDRAKAAGMDEQAAYGVLSGIGVVNTFARIVCGSLSSFPAVKPLWLNNFALTAGGIATICSGIVINTATQWTFALFFGICIACFSALRSLIAVELIGLEKLTNAYGFLMLFQGLAATFGSPIAGGLYVMTGSYNAAFYFAGGLILLSAFLCYPLTWVSRWEERRNEKLTPLPAA

SEQ ID NO: 18358 - DNA, 12532 bp, DROSOPHILA
aaaatttatgcaaagcgctgtcagatacttaaagcaatcccaaagccgctgcagcaagttttcctcacgctcttcatcttactgaaaacttggagttagggcagggcattgtgttgtcttgatgatgggtaaggaaaaaatttgcataaagctgcgattcgaatcgaagggccagccacgcccccaagccaattcaattttatttgtccacgctcttgtatgtacaaattaacaaagcctctaagcacttgccagcaaaccaaccaaaaatgctagcaaacaatgtgcaaattaggccacaaaaaacatatacatacaaacgggcaaacattggaaaggtggcgacacaaaatgctcggccgcaatcggcataaaaataacgaaatcaaatcaaataacactaattctcgcaaagccgatttagccgcaatttcagccaaattaaaataattgcaagacatttatacaaaatcaaattccatttcatttgattgccgatatctaattaaatcagcaaaaccgcaaacgcgcaagcaaacacaaacacgggcgcaaacaagtgcacaggaaataacaattaaaataattatatttgcattagcttacattaatttgaacttcaatttaaaattgaggcaatcgagcaggaaaaactacacgaatacgcagaatatggatgcgtatagaatgtggccacggattatcccgatgccatgtgtttgccttaagttggggatgctcttacataatttagggggtaaagcggttacaactaccgcagacgcacaaagtttgagttgaaagcctcttaggcagagccacgcccactttacccttgcccttgccgggttttgttaaaactttaagtcaactaagcggcttacctttcgcatacacgcactcacaagcatacataccgtacgcctcacatcgcatcgctcatacgccacgtgtaaccgtcggcctctttacaggaaattccactttaagctttgcttaaaacatacgctttatttttatttcgggataattttcacttaacctatgtacagtttagtttagttgtagtggtagtcgtagctatagttaatttatgcactcactttgtatacatttatcaaaaatacaatagcaattattcatggttattctgtacagttttttgaacgccgtctaccccttttgacccgagagttgattgccagcgtcgtttagttatgcctttttcatcgttatcggataatgccttaattatttacaagttactcgtatggtgaacgagcgggtttcttacatgctgtactgataccgcacgttcgaggccaactgggggttaaaaaagtgggatagtttgtggagattttcgatggattattccgtcataatagctcacctcaacgcccaccaatcgctcgtcatactcgctgctcgcctgcatcgccaacttggcctgcgaatgcataatcgcatcggaaagggaatccctttgatatgttgaggaggccagcattccgggcactccaccagcggatccattggatcctggcgactttagctgcggggttttgttgcggcagaagaactccatgatggccacaatcacggccaggagcaggcctccgattaggatgtagtagatcccggccacattgcttagcgagagctcgttcggtgtggaggtctcctggtccagattgcactcggtcttgtcgaaccaccatttattcctaatccgcaacagctcaccgttctcctttagcgttagcacggcctcgtttaagcgttttctatagtaacaacagtaaggggttacataccaaaggaagtcatactcaacggctattgcttttaaaacctctactcaaaaattgaaaattgaaaacctacctcagtggcgatcctatgggtgtggccacgccaaatcccttcgtatcgatattgcgtcccactttcattgtgtcgcacggaggcctagcatttacatactcgtttttgggtgactccaccagtagggcatacttgcccttggattgcctcaccctacgaataccctcatcataggtgtgcaccgaatggtgttgattggcattcatatactcccacattttattgtgcagaccgatttgtgaacgctgcaaggtaacttatttttaaaaagaggaaaaacaaaaggagaaacaatgtttcgaacttaccctaaagaattcccaagtggagccgtataacagggtaccatagttcacatccgtttgcatggtcaagtcctcgggcgttttgatgggcgccaccatacgctccactgtgagaaaagcggccaaattggcggtatacgaggatattaatatgatagtgaagaaccaccagacggcagctgctatccttccggcaatcgaaggaggtgtaatatcgcatccctgctgcataaaagcagccaaggaataccaaaaggagttcagcatagtgaactcattaggtggaactggaggcacatgcgcttgtggttcactcaaagtggcacctccaataattcccggtggttgctgggcagtggaatccgcttgaggacgcctcacaatccgccactcatagggtgggaaacgtgtaacaaagtacagaacaaaactaacacccacatagctgagaatcacgcttatctggaaattgttatcattgcattatgataagaaaataagaagaaattctcagcccaagacttacccaaatttcctgggataggggattaagaaaactaaacactcctggtgtctgtttcacgggcttctttatcataatggatattcccagggtcataaagggtttgctaaagtctataacccgttctctttcggctgtaatagtcattgcggatatggctatatccgcctccttgcgaatcagctcacccaccatgccatcccaaccgccaggagcatactgattctctgcaccatagttgccatcttgcaccaggcgtatttcatctgggaatggattggttatttaaattaccacataatctttggaagtacttctaataagtaagctatctatgaatatagctttcctcccccttttgtaatttaacgatttgcttttgaactcacatttaattcccagttgagctgctagcatatcggccaaatccttgcagtatccctcgaatcgatcgttgcccaccaatgattctccgtaggtgtactgcttgagcgacagatacggctcctccagcagactactcacgatgtacgtgtgattccggtcgtaatctccggtgctggccgacgcggaacgcgatgacgacgcgtagttatggctgtggagcggaaggagtccggcgtcatcacgccactcggccacctgctgcaaggtgctgttcacggacatctccaccacatgcagcgtgtagttgatgcgacgtccgtcctcgtcgaaacggatctcgcccgacaaaccgtcgatttccacctggcggattgagcagggagaaaaaatgttatgcagacgacaaatttttttcagttttattagaagataaatatggactttaaatatctcatatgttaaatatgttttatttatgaagaatcattaaccattgaaaatattaaggcaattatttcgcagacctctgaaggttcccatttagacatcatgtaacctgtttttcactcacctttctcagcacccttgatattttttcgccctgctcccatggcgtgacccagcccttgctggtgttgcaatcgaggagggcactggactcattggtgcccgtggcggatgaggaggagctgcctccgtggctgcggcgctgcagatgattggaacggaactgatccggcttcttgcgcaaaatgcgattgaaggcctcgacgagcacaaaaaccgcatcgtacatcagtgcagcctgggcctgtgaaaaatcacagagaacggaatggaaacgggggaaaaaaactagagttgcaggcgaaacaaatcaatgacggctgacaatttaccgaaatggccggcaagctgttgggcccccctgcgttctggctttggctttggccgctcggctccaaacgtttccggctgtcgtggaaatcacgcaccgccctccgattagagtcgacaatccgaaagccggtgatgttgatggccccaaactcgaccacatcgctgggccagtggttgtccatgacctgaggcggcagaaaaacgtggtggaaggattagtccgactgcgaagactttagggtagtctatatatttctgatgtaaatcaacatgttatcaaagtattaaaattcagcttacattttaatatttttaaaagcaaacttcctaattaggttttctgagtctcttgaactctgttgaatatgaaataccctgttaagtccaaactacctgggaatttagcagactaagaatctgcgcaaccggaagctagcaataattccctattaaagtctccccaccgggatggaaatggggaaacgggctccacttaccagtccgctgagcaggtaatgataggtgcgccggcccagcttgatgtcccgcacatgctggacgatgatctctttggccatttccgccgggcagtcgagcacgatgcgctttttgctaaagcgacccaaatcctccagcgtgtgcaaaaattcaatggccatcgttacgttggcgatgcgtttcaccatttgcacacggaacgtttcatttccgggcttcagttcttgatagatttgctgcagccgtagtaagcctgtggggcatccgaaagcgattgtcggtcagttgaacaaagagcgtggctattgtgtgtgttttcttggtgggcggagtgtggattaaggtgtagctgggtatttggcgccataaaaaaacaatctgataatgcagcggactgagagagtgacggctttgcgttttatgataatgcttgcaatctataaacaatttccaatctgaatgaatttattcgaatagatttatctctctctgcgggaagcatgtgtcatttaatcatattctccattcttattttttgcccgcagtcggaaacgaagcatcatgccatctttcaatctcgctcgcccttttgggaaaccctcacaagccgcaaggacgaaacaaaatcagaaaaaaatgtatatattttcacacgccatttgttgcacgaccaatatggctctcagtgttgttgttgtcattgatttgctgcctgcattgattcgccgaaaacagaaaaaaaatgaaaatgaaaacagtggaaaaacaaacccacaacggagcaaaggcaggagcagtaaacactcgcgtggaaagcggaagcggaagtgcacacacaattgaagtacttttttgtggtgtgctggtaacatttcaataaatagcagccaccaaaaaaagttcacattgcgtgcggggctgctgttttattgaatgtttcctatatagtcgagcaggatcgatggggtgtagtgctatccttcggcattcatgaatgcgccaaaaaatatgctaccaatttgtcgccgtgtgcagcagtttcagttcagccattttgcacccaaaccagagtcgaagtgataacaaggcacaaaaggcgttgttggggcgttgaacaaagcaataacaacaaactgctgacagcggcattaaaatataaagtcccgctgtggtgctggttgtgcctttcgttaacaatgtaaacgcccgactcgaagtcggccaaaaaaaaaaaaatggctgcggaatggaaaatggtttggaatggagggcctgctctactctgcagagcaaggcaagtgctgctgcggcatttccttttcctgcaacgaatgccagcggcaacaatgtcggcctacttttcggcgccgaggcaaatattaaaaaatggcccaaaaaggcaaaataataataatgttaaggcagtagcgcgcgggcagcagttgcataaagtcataaattttatttcacacagagtcattaacacatgacacacacacacatccactcggggaaatacacacaaacacacacacagacttacagcggcgtgtgaactcattataatggagacaggacgcgaaagggaaaaatcactgcggcgtatacgtaatatgagattttttgtctgtgtatgtgtgtggcttcgtctctgtcttttgctccatctgatgtcttcatctttggccgtaattgttgccttcgtcgtattgtcccacgtagacggcaggaaattgctttgaaataaatttcaatacaacaaaaagcagcctaagaaccaaagcatatatgtacacacacacacacatgcacatacacgcacaaagagcgggtaagctcgaacatatgtgtgcgtggaatatacccgcctgtctgtgtgtgcgtgtgtccttctccaggctgcttaagcccgttgaggagccactcgaaagagcgctcttaaaggcacttgagcgccctgtctgccgagctctaccctccttactttttttttcagaaggcgcacggggctctttgtgccgcttatttaattacatattagcagaaatgaagagacacgagctcgaggtcgcaggactaaaaataaagtggaacaggggtagcgagtagaaaaggaaatggataaaattaacatggcgaggtgagaaatccaaagtcaccatttgcttacagaggctttaagacgagttaaaacaaattaaacatgtaaacttgtattttcataggagaacaaaattttttaatagattccataaccgcttttcagcggtgctagataagtccacatcccaccctcgcactgacacacttaatccccagcgaaaacattgccataaccgctacttaaatccactcccagccgttcgaggccttatttgtttatggcaaatgaaagtcaaatgaaatgaaatcgaaacacaaagcaaccaaatgggcaaacaaacaagtcggggagataatgtgtggcttggatctcgttgtgaaggaatggaagatggaatgtatacatacatatacaaatgtatgagtgtggtactggtgtactcaccatcgtgcgagtcgtagagataaataatgctctgccagccgtagtactggatggtatcgataatcgcctgatgataatccggacgcatgctgatagcgaaatccaggagacccgacgacggcgcaagcacctaaaagtatgcaaaacaaaaccgtggccctcatgaactggctgctataacaatgtataatgcgcacgctacatgaagcaataataaaatgaaacgcgtttccgctttgcgccccgccagcgacatgcatgtaagtttatggcgagtggcacaatcggaggggtcgggccaggggtagggatatgggggaggcggtaaggcgacgccaacaagcagatacatccaaggggatacacacagatacccgttatcgtttggctcaacatacaagaacagtgggaaaaactgataaataattatctcacgttgatatagaaatcgtattaaatatcaggtcattactgaaaccattaaattatattgataaattcatgattttatcgtgtttctatctaaaaatccctcgaattttgtattgaactaatttgaaatcaatagatttttaacagatattcttcgattttatttgtaattagaggtacctcattgaccagttttcgataatttttctctgtgtatgacagcgccccgagtagcacgcaaatgcgcagtcaatgtgtgcgaatctcggaatgtgtgtgcgctggtgttttcctagctggcgttggagttggttctggagagtcggtggatgccactgctttcctgcctgctcctccagttttggattctgcccccgccgccatatcttgatttatagtgattgaaataaaagaggccaagagcgtgtcataaattttttcgctctcagtgtgggagtcccaggcgctcctcgttcgccgctcgtttggcattgtcttccggatggcggagcgtttggctttctgtttcgcaagtgacaacaacagcaacagtcggtaacaacaactacaacaactgttgtccgctttgttgccgttggtagtacattttcttcaaattacaattattatgatttgtgctttggctttgatttagtgcactgtctgagggcacagcgaacacacagttgggcactgttttgaactgtgaacccgctacgacacccagtgctccactttatgcaatgacttcatttctacaaaatggtttcggattagctggggaatttttgccttttttgcttggcctgtgttgtgggttacgatccccagctaatgcgattggtaattgaaaatctaaaactgcttggggactcttagatgtgagttgtaataaaggccagtctgattgtggagaaaaggggcaaaacataaaatctttttataattcctacgtgattttacccttaccatttggatttcgtgacaggatgtctgacacttctagcaaaaatcaataaaggcccagtctttattttgaagtctaatattaaatgacccattaatctagagtttcatataaaaattgcactaaatgtttgtccaatcccttcaattaaaaataaaaaatgcctctgtaaaatttaacattcttcaacactccgccatttgcctttgttaaatgtccgacttcattaggcagccaagcgcacaattaaatatttgactacctcccactgggtctaatatgtgttggcactttgaaaacttttcctttgttccatcaaccttttggacaacttcattaacgcataactgagttaaccacacccccaagccaaaccacctgccctatcgctcacatcgaaaccgcaaaatgtaaataattgcgcgctgcgactctgaaatcaattacatatgacagttttttctcttattttgcccctccagctgcatgcactactactattacaactactactactttatgtaccaatggtatggtatggaacttaccttctcgggaaaccagggcgtcacaaatggcatttggaacgtattcgagtacgagtgcaatgtgtcaaacgagtccggcgatacggcgcccagcattgagtagactccgcgcgagaattgattgcaaactgtaggttacagtaataaattcgttttgtgttttttcctttactacttttttttcacattttcagtgacagagtgggtggaaaattgatggtgaatgggtggatggttggatggttggttggcaaagcgtggtggtatgggtgagggatcggagacagtgtctaggtcgcacaattaaattgcagctttgagtgcggagtggagacgtaaagtaaaaccaattttcaataaaaaatgcacataattaatggggcaccaggtattgtgtaatggtgtttttttttctctctctcgggtttttttctgatgagggatggcgttcggaaacgaaaggattgctcggtaaaaacacatactcaggcgggataatttgaatgcatccgctgtattgatgacatcgacatacgcctgcaattcgaagcgtcgagagctcacattcagattgtgattgagcattgcatatttaaaggctgattgcacatcatccgttccctgttcgaagattgcacctgtggagggatagaaaaatatgtgaaaactaaataaataagggctgcatgggttgagactcggcgtcagggcgaatatttttgcttcgttaaatatttaggcagcttttgacacggtcctgttaatattaaacgaaaaagcgcacagagcaaatatgtacacaaatgatagcataatgtcacacccacacaaaggcaaccggctcacacagatacttacacacccacactagcaagtagcgagaaaagccgccccgacaggcaacaacaaaaagcgcaaacgaagtgttgatgcagcaattttgtgctgcgcttttgcatggtacctgaacaggtagcacctacataccagcaaggatcccccatctccatcccaatttcagtcgccatagcgaagcccggatttgagtgcaagccagtcagcatgactgtcacattagcagccaccaaccagatatatatacatatatatatatatatatatgggtgggaattgcggagcatggggccaaaatgactgcaggtgcaatgactgaacgccatcgtgtaataaaaagaaggtggcaaaaaaagcaggaaagcgtaaaataaaatgtagtgcaactaggcaagttcttggaacgactttcgacgccaaatcgggaatttggtgagtgggtccattcaaaatgcaaagaatattaaagccagctctcgaataagactcatcataaaattttgatataatattaaatattgcatatattcaaaaaacaaaagtaactatgttaagtcaaacgaatttgctgtaattaataacataacatattgaaatttgatgtgataacatcaacacttttcatacacttaattcataaatcattcagcctctattaaaaaaatattttatatagcaaaattgatttatttgttttaatttataaacaccgagcgtgggtatgtaatgtaaacatcaataggaaaacatgcgaagggcaaaccagaaacgtaataaataataactactttgcttatgcaacagttttccaacttttcaacttgaaggaaaataaaaagttcctccaaaactgcacacccaactaccaaccaaagctattaatacttaaaaagtataaaaaagtaatcaaaaacatggcaaaaaaaaaaacaagtatatttaaaagtagtttgtatgataaacaaagctaataaagcttattattgtgtcagattaaaaggaaaaccttcctaagcatactcatacctatttagcaatataagaggacaattcttttaaaacgtccggcaaaagaagtgcaaaacaaaatcaagccataatatagccaattgttaggctcattgttatagcgctgggaaggatgtctcgtttgcgacgtgtgaagtatattgaacataaaattctactgaaaatcatgctgcattctttgtgccgaaaacaggacgaagcgaggaaggtcagggataatcttcgggcatcagccatacccaatttccccaacgagccatggcaggaaactaagaaatatattccgggaatcacatagcaaaggacatgggacaacaacagaagcaggagcaggagcagcacattttggccaaatcccagctgcaagtgcagtgtaagtgacaatttctgctcatgccactgctccttttccgcatccacaggatggcaggatcctcggtagcttggtggctcctttggcgacgcttttgagactcacctaatggtattttctcggttaacgataccgtctgttgctgctgctgggctgaactaaattccggccagaaaatgctgctggcgcatataaaatgtaaatatgccaagaattttagcctcgaatgcattttgcgctggtagcttgttgcaactatttcgccaagtttttgcactttgagtttcgagcacaatgaagtgtatttgctggttaaattggttttgccatcacgcaaaacgtttcacttgattttgtttggttaaacttttattgactaaatttttgttttaatttcctttatttaagctcgcattaatggctttattttatgtgttacaccgtttgtttgtttggccaattttttttttttgtggcagttaataaaatgcttttgtttattttggcagctttattcaattccactattgtttgtattggatttatttattcagcccaaaggacttgacttctttttcgttgattttgatttatatttgcacatgcttttctcgctttaattcgcctgggctcgcctggctttaacttcgggttcgataagagatttccctctgccgatttccaagtcacaagaaaatcggaaaatcaacgttcgacactgttcatccgctcagttgaaccaaacggacacgcgttgtaatcagcactaaaaactcctaagctagccagtaatacgaggctccggaaaaacccggcgacacaaccacaatgtcgctttgtggtccgagttactgggagtgtgaaagccgagagaatcgcccaagggatgctgtgctctttgtactaaaagcctgatttttccggtctctcaggagtctgcaaagcacgaagagatagagtggaaatgagagagcgccagcgagagtggtggaaaatgagagccggatgctgtaactgacctactgcattttggccaccacacaagttgcaggttactggttaaatgtttgtttacgttatgcctgcgtttttgggctgcataattgataacaacagcttgggaggcggaggcggaaaagtaggcgtgctggggggtggaggttgcaagagcagcgattttcgggtttttcctacgcgccgtcgcgtttttattttgttggtaattacgaatgatttggacgaacaatccttttaacaaatctcattacgttgtcaattat

SEQ ID NO: 18359 - DNA, 3320 bp, DROSOPHILA
aaagtgcaaaaacttggcgaaatagttgcaacaagctaccagcgcaaaatgcattcgaggctaaaattcttggcatatttacattttatatgcgccagcagcattttctggccggaatttagttcagcccagcagcagcaacagacggtatcgttaaccgagaaaataccattagccacaggtgcaatcttcgaacagggaacggatgatgtgcaatcagcctttaaatatgcaatgctcaatcacaatctgaatgtgagctctcgacgcttcgaattgcaggcgtatgtcgatgtcatcaatacagcggatgcattcaaattatcccgcctgatttgcaatcaattctcgcgcggagtctactcaatgctgggcgccgtatcgccggactcgtttgacacattgcactcgtactcgaatacgttccaaatgccatttgtgacgccctggtttcccgagaaggtgcttgcgccgtcgtcgggtctcctggatttcgctatcagcatgcgtccggattatcatcaggcgattatcgataccatccagtactacggctggcagagcattatttatctctacgactcgcacgatggcttactacggctgcagcaaatctatcaagaactgaagcccggaaatgaaacgttccgtgtgcaaatggtgaaacgcatcgccaacgtaacgatggccattgaatttttgcacacgctggaggatttgggtcgctttagcaaaaagcgcatcgtgctcgactgcccggcggaaatggccaaagagatcatcgtccagcatgtgcgggacatcaagctgggccggcgcacctatcattacctgctcagcggactggtcatggacaaccactggcccagcgatgtggtcgagtttggggccatcaacatcaccggctttcggattgtcgactctaatcggagggcggtgcgtgatttccacgacagccggaaacgtttggagccgagcggccaaagccaaagccagaacgcaggggggcccaacagcttgccggccatttcggcccaggctgcactgatgtacgatgcggtttttgtgctcgtcgaggccttcaatcgcattttgcgcaagaagccggatcagttccgttccaatcatctgcagcgccgcagccacggaggcagctcctcctcatccgccacgggcaccaatgagtccagtgccctcctcgattgcaacaccagcaagggctgggtcacgccatgggagcagggcgaaaaaatatcaagggtgctgagaaaggtggaaatcgacggtttgtcgggcgagatccgtttcgacgaggacggacgtcgcatcaactacacgctgcatgtggtggagatgtccgtgaacagcaccttgcagcaggtggccgagtggcgtgatgacgccggactccttccgctccacagccataactacgcgtcgtcatcgcgttccgcgtcggccagcaccggagattacgaccggaatcacacgtacatcgtgagtagtctgctggaggagccgtatctgtcgctcaagcagtacacctacggagaatcattggtgggcaacgatcgattcgagggatactgcaaggatttggccgatatgctagcagctcaactgggaattaaatatgaaatacgcctggtgcaagatggcaactatggtgcagagaatcagtatgctcctggcggttgggatggcatggtgggtgagctgattcgcaaggaggcggatatagccatatccgcaatgactattacagccgaaagagaacgggttatagactttagcaaaccctttatgaccctgggaatatccattatgataaagaagcccgtgaaacagacaccaggagtgtttagttttcttaatcccctatcccaggaaatttggataagcgtgattctcagctatgtgggtgttagttttgttctgtactttgttacacgtttcccaccctatgagtggcggattgtgaggcgtcctcaagcggattccactgcccagcaaccaccgggaattattggaggtgccactttgagtgaaccacaagcgcatgtgcctccagttccacctaatgagttcactatgctgaactccttttggtattccttggctgcttttatgcagcagggatgcgatattacacctccttcgattgccggaaggatagcagctgccgtctggtggttcttcactatcatattaatatcctcgtataccgccaatttggccgcttttctcacagtggagcgtatggtggcgcccatcaaaacgcccgaggacttgaccatgcaaacggatgtgaactatggtaccctgttatacggctccacttgggaattctttaggcgttcacaaatcggtctgcacaataaaatgtgggagtatatgaatgccaatcaacaccattcggtgcacacctatgatgagggtattcgtagggtgaggcaatccaagggcaagtatgccctactggtggagtcacccaaaaacgagtatgtaaatgctaggcctccgtgcgacacaatgaaagtgggacgcaatatcgatacgaagggatttggcgtggccacacccataggatcgccactgagaaaacgcttaaacgaggccgtgctaacgctaaaggagaacggtgagctgttgcggattaggaataaatggtggttcgacaagaccgagtgcaatctggaccaggagacctccacaccgaacgagctctcgctaagcaatgtggccgggatctactacatcctaatcggaggcctgctcctggccgtgattgtggccatcatggagttcttctgccgcaacaaaaccccgcagctaaagtcgccaggatccaatggatccgctggtggagtgcccggaatgctggcctcctcaacatatcaaagggattccctttccgatgcgattatgcattcgcaggccaagttggcgatgcaggcgagcagcgagtatgacgagcgattggtgggcgttgagttggcctcgaacgtgcggtatcagtacagcatgtaagaaacccgctcgttcaccatacgagtaacttgtaaataattaaggcattatccgataacgatgaaaaaggcataactaaacgacgctggcaatcaactctcgggtcaaaaggggtagacggcgttcaaaaaactgtacagaataaccatgaataattgctattgtatttttgataaatgtatacaaagtgagtgcataaattaactatagctacgactaccactacaactaaactaaactgtacataggttaagtgaaaattatcccgaaataaaaataaagcgtatgtt

SEQ ID NO: 18360 - protein, 993 aa, DROSOPHILA
MHSRLKFLAYLHFICASSIFWPEFSSAQQQQQTVSLTEKIPLATGAIFEQGTDDVQSAFKYAMLNHNLNVSSRRFELQAYVDVINTADAFKLSRLICNQFSRGVYSMLGAVSPDSFDTLHSYSNTFQMPFVTPWFPEKVLAPSSGLLDFAISMRPDYHQAIIDTIQYYGWQSIIYLYDSHDGLLRLQQIYQELKPGNETFRVQMVKRIANVTMAIEFLHTLEDLGRFSKKRIVLDCPAEMAKEIIVQHVRDIKLGRRTYHYLLSGLVMDNHWPSDVVEFGAINITGFRIVDSNRRAVRDFHDSRKRLEPSGQSQSQNAGGPNSLPAISAQAALMYDAVFVLVEAFNRILRKKPDQFRSNHLQRRSHGGSSSSSATGTNESSALLDCNTSKGWVTPWEQGEKISRVLRKVEIDGLSGEIRFDEDGRRINYTLHVVEMSVNSTLQQVAEWRDDAGLLPLHSHNYASSSRSASASTGDYDRNHTYIVSSLLEEPYLSLKQYTYGESLVGNDRFEGYCKDLADMLAAQLGIKYEIRLVQDGNYGAENQYAPGGWDGMVGELIRKEADIAISAMTITAERERVIDFSKPFMTLGISIMIKKPVKQTPGVFSFLNPLSQEIWISVILSYVGVSFVLYFVTRFPPYEWRIVRRPQADSTAQQPPGIIGGATLSEPQAHVPPVPPNEFTMLNSFWYSLAAFMQQGCDITPPSIAGRIAAAVWWFFTIILISSYTANLAAFLTVERMVAPIKTPEDLTMQTDVNYGTLLYGSTWEFFRRSQIGLHNKMWEYMNANQHHSVHTYDEGIRRVRQSKGKYALLVESPKNEYVNARPPCDTMKVGRNIDTKGFGVATPIGSPLRKRLNEAVLTLKENGELLRIRNKWWFDKTECNLDQETSTPNELSLSNVAGIYYILIGGLLLAVIVAIMEFFCRNKTPQLKSPGSNGSAGGVPGMLASSTYQRDSLSDAIMHSQAKLAMQASSEYDERLVGVELASNVRYQYSM

SEQ ID NO: 18361 - DNA, 6108 bp, DROSOPHILA
gttaatcccagctttatgctggtgagtattatatttgctcttacgattgttagcccttcgaacttgtactaacatgccataacttttaggccactataacccccgatgactatgtggtttccaagtgcaaaatgctgccacagcagtttgtcttcaatagctatctgagtgctggcattctttgcctaattgtcatcgggttccagctacgaaagtgcatccaaagcagaagacagtcgtcggctgtagatcatcggaaggttaattagtatgtataagcatgcctatacaaggcatatcctcttttgtgatttacgcctgattggggcttagtttagactagatacgccagattccagactcagatcccagatccagatccagacagaggtcatatcattcctgctgctttgcaaccgcttaactatattctaggtgtacaaaattcggatagtatgtatgatctatttattgaatttatcacagacattatgcttgtaaagtcaaacggaatacataatgagacacagtctgctgactacaaatcgaaaatgccaaaaaaataatgcttgaacaaaggctggaaagtaaagaacggatacaaacagaacaattaaataaagctatattataatacatttactatataacgttaatgattgtgcactctgtattctgagatgcagattcataggttcctgtacttcggtttatgtcttccaatatctggatcacattgtactagactaggctatctataaggtaactaccacaaagcaactacaactacaaactatgctaacaaaacagggtgtggaattcaatgccatcaattccattagtttggcacaggaagttctggttcgtctattttaggatacgtttaagaggtttttgtgcgcctgcgcatggagattgcgaccactaaagcattcttttggaaggaatctagaagaaaaaatgggtttaataacagaggttaaacatgtggttacaaaaattacctgtgaatcactggtgatattagatccggatctagtgttttcatatttgtgggtttggtcacaagggagactagtgcacctaccacaatgactgtggccacaccaatgggatttatccagtggtaggacagtcggtacagtggaaaaacttgctcctcatctacccatatattttcccgaagcgttacattgcccacacatccctccacggatacgggaagcttttgagaattcaattcacccgctgcgatggtaaactgcgttccaaaggatatccacccggcgagcagagcacttgcaattccgcccacagcagtgcctacagtattggcccagggaacgagcattcccagggtaaacaggccaaaagtggttccagctgcgatggccgtcattgaagtgcaaatgctcaggattccactcagttgttccaggacaaataccagtgatagggccacaaagccaagaactataacagttgactttaccagaatggtggaggctctttcacttggttgcatcttgaagcagccgcgaactatatcctccaggattaccaaggacgttgagttcagaaccacagaaagggagctcaaggcagctccaaatatgccggctataaacaaaccagacataccatagatatgacccacactctgaacgacaaagagcggcagtagctgatcgtcgtgctgcaaggaaataaacgtaagtaaagttcaaaaacaatttattatttactcactgttattagtcccgcactcagaggatcacaatctttgtacatctcatagattagcagtcccacataacaacaaacagagacgaaggcagccacgccaattgtaaaaatggccatggaagcacgagccttcttgagcgatggaagagacatgtatcgctggaccatggtctggttgacggcattgaatgaggtccagtaggagaatcccccgattaggacgctccaaacagtgtgccttacataaggcgatgggtttgtattgttaaagatcaatcggccacctttggcagcatcatcgaaaaggacattcaagccatttgcatagacagtggccaaaatagccacagcaagaacggaaaggaacatgaccagcacctgccaagcatctgtgtggaccactgctttgattcctccctgaaaataggcgccattagtataaaaacatacgtatgaaactctctaaaacttacgacaaaggtgtagaaaacacacacgaccacaattaccactgcaatcacatggagattaatgcccgatactgcaagattatcgaaagattaaagttgtgtttcaaacaattaacaaatgcggcttaccctgattcagagctatagctggtacatacacaatgaaaggcagaaacagaatctaaaattggatcgacaattattacaacattgcagtccaaatattatctttgacttacctcatccagaataaacataaaggatgcaatacttcgtacgaccgaatgaaagcgcatctccaagtactgaaagcaatattatatttcataattcaaatgacttgcgtttaggattcgaaaactaacgtcataaagaccgaaaacgaaaactaattgctcgacacaattgtcaagtggcagaaaaccacattgcaattaatcatatcgaaccgctggaacccagaaaaaagtcgcaacaagtgggcgagtgcaaagtccaagaaattccacttgaggggagggtggtctccgattcccagttaattaaagtgttcactacgtcctccgttcattgattggacaaaagtgacggagcgaaagggggaagacggaaacatcttagaaagtttgtcattcttatcagcaaccactacagatgaacttgtctatctttattttaactaactcgtcattgaaagaaatggtgagtattttatagctaaattaatatttccgttaaaacccaatttacatttttggttgcgttctggacgttattacttttactgttagcataagcttattgacccattagattgtaaatgtataaatcagtttatagaatttacgagtatcgtacctcataggaagagcctacttgaagagccgagaacactggtatgtagacgtaggagacggcaataccttggagcattattgctatggctataaaccaatattgcgtgccataattgtagatctcagaggttgtgcccagtatggtaacgcccgatatatagctggaaataaaagggaacagattgtacaggcatatttggaggtgcgggatcgcatcgccaactctacctggctatcaggctcatggcaacggggaaaactttcagattgcgtgaccctagcagatactcgctcatcttctccgatccgaaatcgtgtttccgcctttttggcgtggtcgtcggcagagtgggttccgcctcctcgagcttcaccttgctcttcctgtaattacaacaattgtttggcaatattccgaggatttgtttaaaggtcactcacttgatgcacccgaaatagatgcccgtgctggtggataatacgatcatgcccaggaaaacggcatagtccacactgccaaatctgtagttctccatgcccttctttgccacctaagaaaaagagttaattttgggtcagtttatgatctttatatgatttagtttaaagtttgttgtgattctccttggcagtgacaatctctatcaggtggttttaaagttcagaaacttaatttgtttcttttgtaagaacaagtgtgcgaaatgaactcagaattcatataatcatcgcacgtctgggtctgtggccaatatacttgtaattgctgtagtttgtcttaaatgggtcataaaatgaaaatgagactcttgcttttaaagtaccaactgtgtacggtaagagattttcttaaaagctaggtataaaaagttagcaaatacatgctaattacaattatctcgctttgtttatttatgtattactccacaatacatttttatctgcttttaaacagtttgtttcgctcgtccaaaatgccatggcttaatcatattattaaaagtggtacttaagtccctacaaccacaatgtccatgtccatgtgaagttatgggaaccaggtcttatcagcaggtgcctgcttattattcatcaatctctacggactagagactttaacccttttccccatgtattatttatttaacatgtttagcaatcgcttcaaaattacaaaacattttattaatatgatttcgcgttattatcaaatgcatatttggcaagataactcgttctggtgactttgacattatccagctttggttttctagattatgaatcttttgttattagcaaaattaatatatttttaatactcccaattttcttttactttcttagttcctatctaatgatgcagacggtgtttagcataaaatactaatttttcgtctgccatttaggttcattgactggatgatcaatcggagccgatcgaatctcagagaagagacttcaaccttttacgcaatatctcgagcagcagcagcattatcgccctggacttggactttgtaacccaaatgccgtgtcccccgctccaaagttcctaaatagctcttaatgtttggaaccggcgaaatgtgcaaaatacgtaccgcttccatattgttggggaccggcaaacgctaggctttacaatggtgggggtggcttccgtaactggagcagcggaggtgaatggaaaattgcgcgtccctcacgaaaatcaacagcaaagcaacgcacgataaacggccagaaagagcaaactaccaacaaattctgcgaaacgtaatgaaaattttcttgtggcaaaaagggtcaacggattccgtgtatttccattggtttttaaaaaagggttctataaacgtacaaagttaatcacatggaacacattaaaacaaaactcggaaacgcacggaaaagtttttcaggtctgttctgtgcgcttttgcccgattctttgaagtcgaaaatacgagtgtacaaaagcgaaatattccacgtccgaatcggagcaacaacatcaaccgattccgcttccgaactgcaactgatgtctgcgagcgggtcgaaaataaaagccactaggccagctgctcgacaaaaacaagtgggacagctagaatggagagtaccgatcaaagtatacccattacctcatatttaacataggaacaacggaacagaataaaaataaaatgtataaataaaactaaatgtataaatgactcaagtattgggaatacaactgatattttctggataaaagtattatttgtaacatgaacataatataccccttaatactgcgctcgaaaagctccctctcccaaccatttatcttgccattgcgtatagagagagtaaaagagcgagtgttgtaaatgtgtgggggctttggcaagattaggtgggagagaaagcttcgttgcttttgtaatcctcacaatgtattatgtcaatgtaagtggttacttggccattcgatcagctaatggagctattaacggaagtttggagcagctagttgcattcagatgaaaaaatactcaactgttgttatccgctattattcgaacaattttaaaaacacatatgttaaaaggttattagtattaatatgacattatgggttttctgtaatattgaaattattatatattcactatcaattgctcaagtaacgtgtagtaaactacacacctaagtttaccattgccacatttaaaaatagaagtaatttgaacactcccttttggtggtaaatgaaaaaataattgattcactaccgacatcgggtccatctagagtttcacttcacgggtttagcggggtactcggaagttgagacgttcctttggttactccgttggatcttctcccacccatcataccacgaaatactctctggattcagaaaatcagaaagtcaatcaatagcaagtgacaggttgtcatgaaagaactatttagaatgagcaaccacaacagataattgcacaattgtcagtgtcagacttttgccaccattcgcactcgcagtg

SEQ ID NO: 18362 - DNA, 2156 bp, DROSOPHILA
ttcggaagcggaatcggttgatgttgttgctccgattcggacgtggaatatttcgcttttgtacactcgtattttcgacttcaaagaatcgggcaaaagcgcacagaacagacctgaaaaacttttccgtgcgtttccgagttttgttttaatgtgttccatgtgattaactttgtacgtttatagaacccttttttaaaaaccaatggaaatacacggaatccgttgaccctttttgccacaagaaaattttcattacgtttcgcagaatttgttggtagtttgctctttctggccgtttatcgtgcgttgctttgctgttgattttcgtgagggacgcgcaattttccattcacctccgctgctccagttacggaagccacccccaccattgtaaagcctagcgtttgccggtccccaacaatatggaagcggtggcaaagaagggcatggagaactacagatttggcagtgtggactatgccgttttcctgggcatgatcgtattatccaccagcacgggcatctatttcgggtgcatcaagaagagcaaggtgaagctcgaggaggcggaacccactctgccgacgaccacgccaaaaaggcggaaacacgatttcggatcggagaagatgagcgagtatctgctagggtcacgcaatctgaaagttttccccgttgccatgagcctgatagccagctatatatcgggcgttaccatactgggcacaacctctgagatctacaattatggcacgcaatattggtttatagccatagcaataatgctccaaggtattgccgtctcctacgtctacataccagtgttctcggctcttcaagtaggctcttcctatgagtacttggagatgcgctttcattcggtcgtacgaagtattgcatcctttatgtttattctggatgagattctgtttctgcctttcattgtgtatgtaccagctatagctctgaatcaggtatcgggcattaatctccatgtgattgcagtggtaattgtggtcgtgtgtgttttctacacctttgtcggaggaatcaaagcagtggtccacacagatgcttggcaggtgctggtcatgttcctttccgttcttgctgtggctattttggccactgtctatgcaaatggcttgaatgtccttttcgatgatgctgccaaaggtggccgattgatctttaacaatacaaacccatcgccttatgtaaggcacactgtttggagcgtcctaatcgggggattctcctactggacctcattcaatgccgtcaaccagaccatggtccagcgatacatgtctcttccatcgctcaagaaggctcgtgcttccatggccatttttacaattggcgtggctgccttcgtctctgtttgttgttatgtgggactgctaatctatgagatgtacaaagattgtgatcctctgagtgcgggactaataacacacgacgatcagctactgccgctctttgtcgttcagagtgtgggtcatatctatggtatgtctggtttgtttatagccggcatatttggagctgccttgagctccctttctgtggttctgaactcaacgtccttggtaatcctggaggatatagttcgcggctgcttcaagatgcaaccaagtgaaagagcctccaccattctggtaaagtcaactgttatagttcttggctttgtggccctatcactggtatttgtcctggaacaactgagtggaatcctgagcatttgcacttcaatgacggccatcgcagctggaaccacttttggcctgtttaccctgggaatgctcgttccctgggccaatactgtaggcactgctgtgggcggaattgcaagtgctctgctcgccgggtggatatcctttggaacgcagtttaccatcgcagcgggtgaattgaattctcaaaagcttcccgtatccgtggagggatgtgtgggcaatgtaacgcttcgggaaaatatatgggtagatgaggagcaagtttttccactgtaccgactgtcctaccactggataaatcccattggtgtggccacagtcattgtggtaggtgcactagtctcccttgtgaccaaacccacaaatatgaaaacactagatccggatctaatatcaccagtgattcacaggtaa

SEQ ID NO: 18363 - protein, 568 aa, DROSOPHILA
MENYRFGSVDYAVFLGMIVLSTSTGIYFGCIKKSKVKLEEAEPTLPTTTPKRRKHDFGSEKMSEYLLGSRNLKVFPVAMSLIASYISGVTILGTTSEIYNYGTQYWFIAIAIMLQGIAVSYVYIPVFSALQVGSSYEYLEMRFHSVVRSIASFMFILDEILFLPFIVYVPAIALNQVSGINLHVIAVVIVVVCVFYTFVGGIKAVVHTDAWQVLVMFLSVLAVAILATVYANGLNVLFDDAAKGGRLIFNNTNPSPYVRHTVWSVLIGGFSYWTSFNAVNQTMVQRYMSLPSLKKARASMAIFTIGVAAFVSVCCYVGLLIYEMYKDCDPLSAGLITHDDQLLPLFVVQSVGHIYGMSGLFIAGIFGAALSSLSVVLNSTSLVILEDIVRGCFKMQPSERASTILVKSTVIVLGFVALSLVFVLEQLSGILSICTSMTAIAAGTTFGLFTLGMLVPWANTVGTAVGGIASALLAGWISFGTQFTIAAGELNSQKLPVSVEGCVGNVTLRENIWVDEEQVFPLYRLSYHWINPIGVATVIVVGALVSLVTKPTNMKTLDPDLISPVIHR

SEQ ID NO: 18364 - DNA, 3263 bp, DROSOPHILA
tcggtcaagtagctcaccaagttggattcctgattgcgtgcactgctatcatcctcgtcgatcagtttgtccagtagaatattcgaagtgaagtcaattgtggagccggaagagctctgttctgccggagcggcgtccgtagcctccaccttaataccgaattcagcggttagatcctcccggaacttgagacatgacttcctgtatccacatacatacattttacggactgtacttgcaaatgagcgggaaaaattataatacatacctatggataatcagcctgtctatgctggtgtttgattggcatttccgacagtgggtgcacagcgctcggtacttcttcggctccccatccttgccgcccttgaacgcgggtagaaagcccagtttcttccaagtttcatccttcgaaaggcccgagggtcgcttggccttttttgcttgcgacatttttacatacggtttgtgttaaattacgtgacagtgttgctgctgtaaattcaaccgatgtatcgataacatgccatcgaattctatcgatggtcgcttgcatttgaatattaattatatttttacttttgaatcatctgtgaaatgactgaattgtaaaaaatgactttgtctgggtcataaataacaaatttttgaaaagaataagtttaatatttagctttgtatatttaacgattaattaatcgggcagtaaatagtaccatgaatgtatctgaaaatatatgcgtggaacctttaaaaaatagactatattgaagggcgttcatatattacaaatacatataagtaaaattaagaagcaaatccttttaaaagtttactacttcacccgttatatacatataaaattatttctgatctttattaaatatcgttttgactaaaagaaacgcatcgaactgatcaatatcaaaatggttttatcgatatgtcgatacatgtctatcgtatgcaagcgtggattttacatgcatctgtagtgaagccatttttatttgcatcgtgtatagtacattggaatttactgcgattgttgtattttaaaatgccccgaaagaagtccgaggatttttacagaacccacggatttaccgccaatttggagaatggcaaatactcggccacctgtcacttctgcgaaaaagtactccaaaatacggcgctatcccggctatcgttacacaggtaaccatacaaacatacaccaaacattgtgtttacatgcgtcaagtaattctcattaaattgtaggcaaacctgcgatgcccggcgaagtagaagcgctgtagtgtacacttctgccgacgagaaggatcatgacgaggctcctaggataaaggtaattcgatgcttccaatttggatacattggatgtatgtatatgtctggtgtaggacgtcagtggacaaatgcacttcaaaataaatcccaaagatactttgcacactataatgtcaaccccaagtaatttgacaaatattcggttcgaactttgtccgaatacaatatatagtgcttaatgatttgacttttgaaattactaacccatatcgtctcatatgaacattcatatgtaaattaaatgttacttatatatcgctaatgctctaaaatatattttttatgcagatccagaagatttcgggcgacgatgatggcggcctggataatgccaacgaaggcaaggagatcattgttaaggtgagtaggtgaaaaatgcgtaaactaaatcaaatacttacattatggttatttttcattccagatacaacaaattctggacgatgctgacgaggctgaggcgcccaaggagcaacccagagtgaaacgagaaattcgcaaaaggaaactgaccaaaacggaagagtctggcgagcaaaatttggaatttgaaatttccaacgttgaaattaaaaatcccgaatactctgagtacctggacgaaagcaaagaagtaaatattcacaatttgataagtatcttagacattttaacgattatcgaacagcattacatattgcagcaaaacccggatgacttagccaatggatcggcgacgatcatcgaggccaggccaagaaatggtttagctgcattgcgagcggaaaaggcgcgagccgagatcagtcagttccagagtaagaccaagtttcttaaaacggaaacggacaatctaaaagtagagcgcacactgactttgcttaagattcagaagcttcgattggaaatcgacgccctacgcgattaaaatgtattttaactatagataacttttaaatgtccgcatggtgaacccttaatttttgttaagatgacgaaaatgtctgtcttgaattcaacatagatttattacatttaactttgtaaaggtgattacaaaatacattattttaagcctgattactcgaatctttttattaaataataatgtaataatgcaatgcttacaagtgttattaaaatcgatgtaatctaatgcttacatacataaatattacatacatcaaaattattgaataaataaaaatacataataaataaaactagaaatactagtacaatcgatagttcgcactcttcgacaaccctactgatacccattcgataactgaccccaagcaaccctgttcatcacatgatagtcagggtgatatcggggaagagaaaaggttttctttgcagtcgttcgtcatatgattaaaagtccagcggaaaactgaaaatgttgagagttttcgtgattttctcgctgtttatagcggccagtaagtagatctaccatctataatcaagtaaaatgcatgcgcagcaagtggaaagcggtcacaaagtggatattctgtactcatcgattcctctttgggggtggtgacacccagaactcgggactccaaagggctccccacatgcatgcgcagaatcttggacaaaggagacgaatatgttagattctacagaacttatgagctacgtcttcctattttgcagtcaatgcctctggcgaattcaccgtgctgaaccgtcccaaggcaatcagtttcaagggcaacgatgcactggaaagccactacgtgggtgatgtactctacgcttccatgggcaacgccgtcagcggcgataccaactggaacggactgaccatcaacgatcccttcaacctggccaagggcgtcattctggtgcatgtccagggcattggtcacgtgaccaccgccggcaacgtcaagacctacgagctgacaggctcc

SEQ ID NO: 18365 - DNA, 789 bp, DROSOPHILA
ccatttttatttgcatcgtgtatagtacattggaatttactgcgattgttgtattttaaaatgccccgaaagaagtccgaggatttttacagaacccacggatttaccgccaatttggagaatggcaaatactcggccacctgtcacttctgcgaaaaagtactccaaaatacggcgctatcccggctatcgttacacaggcaaacctgcgatgcccggcgaagtagaagcgctgtagtgtacacttctgccgacgagaaggatcatgacgaggctcctaggataaagatccagaagatttcgggcgacgatgatggcggcctggataatgccaacgaaggcaaggagatcattgttaagatacaacaaattctggacgatgctgacgaggctgaggcgcccaaggagcaacccagagtgaaacgagaaattcgcaaaaggaaactgaccaaaacggaagagtctggcgagcaaaatttggaatttgaaatttccaacgttgaaattaaaaatcccgaatactctgagtacctggacgaaagcaaagaacattacatattgcagcaaaacccggatgacttagccaatggatcggcgacgatcatcgaggccaggccaagaaatggtttagctgcattgcgagcggaaaaggcgcgagccgagatcagtcagttccagagtaagaccaagtttcttaaaacggaaacggacaatctaaaagtagagcgcacactgactttgcttaagattcagaagcttcgattggaaatcgacgccctacgcgattaa

SEQ ID NO: 18366 - protein, 242 aa, DROSOPHILA
MPRKKSEDFYRTHGFTANLENGKYSATCHFCEKVLQNTALSRLSLHRQTCDARRSRSAVVYTSADEKDHDEAPRIKIQKISGDDDGGLDNANEGKEIIVKIQQILDDADEAEAPKEQPRVKREIRKRKLTKTEESGEQNLEFEISNVEIKNPEYSEYLDESKEHYILQQNPDDLANGSATIIEARPRNGLAALRAEKARAEISQFQSKTKFLKTETDNLKVERTLTLLKIQKLRLEIDALRD

SEQ ID NO: 18367 - DNA, 4710 bp, DROSOPHILA
cgtatgtgcgtatgcgtacgtgagaaaatcaaccaacaccgttacccgatttgttagcaggttacacttatactacacttaactattgcactacaaaccattacaaccaagcctacttgccaccaattggaaaggaaaggagtcgtggactccctcgcactattttcatttcatttctcttttgcttttttttattcttcgcactacaaaatcgactttgcactttttgtcgtcgtgtatggcaaccgctttggacaccattacttacagtttattattcatattggatggcattttcacacttaatggttgcaacttaacgcactgagaagaaatcgagtcgaacgaaaattgacttttgttgtaaaacttgctttgattggggtgcaaacctcccagcaatttgtgatctgatgtcgtcaaaagttagtataaaactgaagaaaataccaacgtgctactccttttatacgtttctcgccgactttttcggtacatctctggccggctaagtttggtcacactaggttcaagctccagcaacctattgtcacaaacaacagttacttctttaagggattcttaaatctaatttacgtgttccaattttatacaggcgtaccttttctgcttttacaattgtaaataacttgaggatatagtatagaagttttacgtcgatttcctaagcgggtctcattaattgttaatattgattaacttaaaaaacataagaaacgatccaattaggctaatgtcgagatatgaatatcgtaatggtaaataattacagttatgctataaagtaacgtgacagttttaaataattaacagctgtcagattgacaaatccatgaaatttaagtacaacttaaataaagcctttaacatctaagagaatatcccaattactaatttacaataatcaaaaaaatattagaaaatatcgataacattctggtcgttctcgcaaccctagtcacaacgcgtttggtcaaatttaggatcagtcgttcgttcgttcgttggaataaaataaactcgggaattaaatcttggaaaaacgtgcgaatccgtcatcctttcatctaaaaaaccatgagcgcctttcccggtacgttcgcgttcgacgaatatggtcggcctttcatcatcctgcgcgaccaggagcgccagaagcgcatcacaggaacagatgccataaaggtaaatgaaactgcgattcaccatctcctggcgttgtattccgcatcctggacgagctggtcaggatcagattcgtaggcaaatgccctgcgtgcaattggtgtgctcactaagtcacaggagtgacgcatcgtctgcggaacattccagatgttctaaaaagccggttttaaatagtctttttgttgctaatatttaataatatgctgaatatatccttctttggtagtgagctattactccgaacaagctttcattctttagttgcactcataaacaatgcattttggaaaaacaatttgtctggccgattttgaggttaaaacggcgcccagatgtttttctttcattgccggctgagtcacgcgcactgcgaaaagtttggaagtccggataaaaagtcactgaaatgcttaaagaacccaataattccatctgcagatgcagattctattgcttttgtatgaaaattactgtatacacatgtccatcctagtcttcattcagttattggtatattctagaatccaactagaatatcaatttagaccacgtcgatttaaactttaaatttgaaagtaaatcttaacatttgatttagaagcagttgcgcttgagaaagatctaatttccattcaccatcttactgataaataattgtaatgtctaccctaagtacttactaaattatccattttgctccaacagacgcacattatggccgcccgccagatcgcgtccaccctgaagacctctctgggtcccaagggtctggacaagatcatggtcagtcccgacggcgacgtgactgtgaccaacgatggcgccaccatcatgaagctgatggaggttgaccacgagattgccaagctgatggtgcagctgtcgcagtcacaggacgacgagatcggcgatggaaccaccggcgttgtcgtgctggccggagcactcttggagcaggccgagggactgatcgacaggggcattcatcccattcgcatcgccgatggctttgaattggccgcccagtgcgccatcaagcagctggacgcgatcgcccaacccttccccgtggacccgaagaacaaggagccacttatccagatcgccatgaccacgctgggcagcaagatcgtgaacaagtgccatcgtcagatggccgaaatggctgtggatgctgtgctgaatgtggccgacattgagaagaaggacgtgaacttcgagctcatcaagatcgagaccaaggtgggcggtcgcatggaggactcgatgctggtgaagggtgtcatcgttgacaagaccctcagccattcgcagatgcccaaggagctaaggaacgtcaagctggccattctcacctgcccgtttgagcccccgaagccaaagaccaagcataagctcgatgttacctccgcggaagactacagggcgctgcgcgagtacgagcaggagaagttcacccagatggtcaagcaggtgaaggacgccggcgccacccttgccatctgccagtggggcttcgatgatgaggccaaccacctgttgcttcagcaggagctgcccgccgtgcgctgggttggcggtccggagatcgagctgattgccatcgccaccggtggacgcatcgtgccgcgtttcgaagagctcacgcctgagaaactaggtgttgcgggactcgttcgcgaaatgggtaggttttcattttatagtcggatttagttcattcctaagtgattttgattctttcagcattcggaacatccaaggacaagatgctggtcatcgaggagtgcaaaaactccaaggctgtgaccatcttcttgcgtggaggtaacgccatgatcattgcggaggctaagcgatcgattcacgatgccatctgcgtggtgcgttcgcttgtgaaggactcgcgtattgtttacggtggtggagctgccgagattagctgctcgttggctgtggccaaggaggccgaccaactgtccacgctggagcagtacgccttccgcgccttctccgtggccctggagagcattccgctggctctggcggagaacagcggcctgcatcccatcgagacgttgtcggagctgaaggccagacaggtggccgagaagaagtccagcctgggtgtcgactgcatgctgtcgggtgattcggacatgaagagccataacgtggtggagtcgctgcactcgaagaagcagcagattctgctctccacgcagctcgtcaagatgatactcaagatcgacgacgtgcgctccaagaacgaaggcggcatgtaacgaccgcccagcagcagcatcatacatcagatctagtttcagattcacatccccacgcttcgctatctcttcacgaacaacacccgcgtcaagcctcatctctatgtacatctgtattaattgtttaattttattaatccacaagttctttggaaaagaagaaaattacattaaacaaggggctatccctgttcaaatacactaaaacgaaactaagacatcgactagactttcttgccattgatggtggttagctgcttgcgattgatttgatcgaagaagagcaatcccgccgagcgttccacgctctctggcggcacctgaaacacactgatgggagtgtcgttgctgatcacctgattgggcatcacgtacgactccatgtggagtttgtggtccgcggactcgcccacaataaccttgtagaagtgggtgggaacagccacggtgttggcgccgatgacctcgtacttgacatacgatttcccatcgtcctccttgtgcggtaggtacagtggacccgtacagacgtacacattggagtaggtcttggtcagtctgcgcacgtgtgcctccagcgtgttccaggcatcccggttgaagccctggcccacctgtggcgccatgttcgataggtagaaggtttcgtcgcagtgcttctggtgcagtcggtgatttccagcggcggccatgtgcccgcgatcatagcccgatcgtcggtagtccgtgttctgtgacctgaagaacggatggatgctctcgtcctgcttgaaatcgcacttcgatctgtccacggcatcgttcttcgccaccgactctgccgtaaggtgctcgaacacccagtggggcacccggttcctccgatcgtaagacagcacgtagtccgaatgggagcgcacgtgatcgagtccgggaaatccatacttcatgatctgtccgatccgagacggagttgccgtcaagcttacattgttctcttgggcgggaatcaaactggcagccgaaacagttccaaaggtgggcagaccaggcagccgcggaaggccacttgtggagccattgtgctggcgttcgcgttccacgtgggtgcccagataaaaggcgcccagggcggtggcacccaaagctaatacgccacccactcgaggagcactcattttggcagttttatttaaaaatctggacaaaaagaccagatagcgaccgctattgcaca

SEQ ID NO: 18368 - DNA, 1943 bp, DROSOPHILA
ttaggatcagtcgttcgttcgttcgttggaataaaataaactcgggaattaaatcttggaaaaacgtgcgaatccgtcatcctttcatctaaaaaaccatgagcgcctttcccggtacgttcgcgttcgacgaatatggtcggcctttcatcatcctgcgcgaccaggagcgccagaagcgcatcacaggaacagatgccataaagacgcacattatggccgcccgccagatcgcgtccaccctgaagacctctctgggtcccaagggtctggacaagatcatggtcagtcccgacggcgacgtgactgtgaccaacgatggcgccaccatcatgaagctgatggaggttgaccacgagattgccaagctgatggtgcagctgtcgcagtcacaggacgacgagatcggcgatggaaccaccggcgttgtcgtgctggccggagcactcttggagcaggccgagggactgatcgacaggggcattcatcccattcgcatcgccgatggctttgaattggccgcccagtgcgccatcaagcagctggacgcgatcgcccaacccttccccgtggacccgaagaacaaggagccacttatccagatcgccatgaccacgctgggcagcaagatcgtgaacaagtgccatcgtcagatggccgaaatggctgtggatgctgtgctgaatgtggccgacattgagaagaaggacgtgaacttcgagctcatcaagatcgagaccaaggtgggcggtcgcatggaggactcgatgctggtgaagggtgtcatcgttgacaagaccctcagccattcgcagatgcccaaggagctaaggaacgtcaagctggccattctcacctgcccgtttgagcccccgaagccaaagaccaagcataagctcgatgttacctccgcggaagactacagggcgctgcgcgagtacgagcaggagaagttcacccagatggtcaagcaggtgaaggacgccggcgccacccttgccatctgccagtggggcttcgatgatgaggccaaccacctgttgcttcagcaggagctgcccgccgtgcgctgggttggcggtccggagatcgagctgattgccatcgccaccggtggacgcatcgtgccgcgtttcgaagagctcacgcctgagaaactaggtgttgcgggactcgttcgcgaaatggcattcggaacatccaaggacaagatgctggtcatcgaggagtgcaaaaactccaaggctgtgaccatcttcttgcgtggaggtaacgccatgatcattgcggaggctaagcgatcgattcacgatgccatctgcgtggtgcgttcgcttgtgaaggactcgcgtattgtttacggtggtggagctgccgagattagctgctcgttggctgtggccaaggaggccgaccaactgtccacgctggagcagtacgccttccgcgccttctccgtggccctggagagcattccgctggctctggcggagaacagcggcctgcatcccatcgagacgttgtcggagctgaaggccagacaggtggccgagaagaagtccagcctgggtgtcgactgcatgctgtcgggtgattcggacatgaagagccataacgtggtggagtcgctgcactcgaagaagcagcagattctgctctccacgcagctcgtcaagatgatactcaagatcgacgacgtgcgctccaagaacgaaggcggcatgtaacgaccgcccagcagcagcatcatacatcagatctagtttcagattcacatccccacgcttcgctatctcttcacgaacaacacccgcgtcaagcctcatctctatgtacatctgtattaattgtttaattttattaatccacaagttctttggaaaagaagaaaattacattaaacaaggggctatccctgttcaaatacactaaaacgaaactaa

SEQ ID NO: 18369 - protein, 542 aa, DROSOPHILA
MSAFPGTFAFDEYGRPFIILRDQERQKRITGTDAIKTHIMAARQIASTLKTSLGPKGLDKIMVSPDGDVTVTNDGATIMKLMEVDHEIAKLMVQLSQSQDDEIGDGTTGVVVLAGALLEQAEGLIDRGIHPIRIADGFELAAQCAIKQLDAIAQPFPVDPKNKEPLIQIAMTTLGSKIVNKCHRQMAEMAVDAVLNVADIEKKDVNFELIKIETKVGGRMEDSMLVKGVIVDKTLSHSQMPKELRNVKLAILTCPFEPPKPKTKHKLDVTSAEDYRALREYEQEKFTQMVKQVKDAGATLAICQWGFDDEANHLLLQQELPAVRWVGGPEIELIAIATGGRIVPRFEELTPEKLGVAGLVREMAFGTSKDKMLVIEECKNSKAVTIFLRGGNAMIIAEAKRSIHDAICVVRSLVKDSRIVYGGGAAEISCSLAVAKEADQLSTLEQYAFRAFSVALESIPLALAENSGLHPIETLSELKARQVAEKKSSLGVDCMLSGDSDMKSHNVVESLHSKKQQILLSTQLVKMILKIDDVRSKNEGGM

SEQ ID NO: 18370 - DNA, 9283 bp, DROSOPHILA
ccacgtacctgccccacctgcctctgctccagttgacaaaagaagaggagcagaaaccaaaagacaccaacgaagaagcacttcgatgggcacgtggcgaaccgatgataccctatggtatcagtctctaaaaataatgagcatgttaaaaaaagtaacagtaaagcaactgatattagtttaaatgtaccgtatttactgcatacctcaaatttgtagaagcttacagagcgatgagtatctgagcgtcgactatcgcataccttctgtttttggccttcgtatattatccttatgctgagaaaatggtaaatttcatgggtcatgggtatgtaccgcaatcatcttacacctgttgtcagtgcgtcccccaacaaaagtcgagcatacccattctgatgtagcgctgccaccatcaagagcactctcataaataagaaattgagagtaaacgagacctggccgggatcgggatcgtcgaggggatcccctgagctggggcagaatctatgggtatacgtatactgacttcgataaacattttttgctttcctttcccttccgttgaattcgttgcattttatttttttttttcccgagccgagcggtttcagtttctcgttttgcattgcatcgaacaccaagatcgatcggtggcgaagaatgctcttttcagtcgcgatcttacccagcgtccaggtgtccattccactgtccgtccgtttgtgtgattaatggtaattgcttttatggctttctacggcgctcttctgccacaatttgttgcggtaatttcgcttttagtcgcagtccccaaactgatagccccaccacaccaaaatgaattgggaaattacatatttagaaaagcacttgattcaatttgctgcgaactatacaactaatgaattccttatctgttgcaaagtacttggtagcaaagatttcgttttttatttcacttttcacgatttttgtattcataatgtataaaaaaaaataatatacatgcgattaacattaaaagggacaatggacgacaccggctattcaggggggtaagtatgcagtcggcctttcatcaatcagtcgctgtttctgtttctgtttccgggccgattccgtttcagttccgattgcccagcggcgtgtccccctcgttataggaccgttgatcccgatattggctgaacaagccgcgcaccttgttcaatggtgtttggaatgactgcgtcgctgccgtcaaggcggcaaaactcaaaatcggcgatgccggagtcacagcagttccgaccgactcgccattcgtctcggatgcaacttgaatactggcggcggacggagttcgcgccagacgcggtgtaactggcgccgtcaatggtccggatccgcgtctgccgctgaccacggcattcagctttggcgtggcaagcagacgcttgggatgcaacaatggttggctgttgtggctagaactggttccagaataccaaggctccggcttttgaaccttgacgttccttggggatgggaagctttaatataagtgagcaaaagtcattacaaaaaccctatcatgatgataataaacatacagattcatttcagcacaggagtagctctccatggcagtcttccaggcgtagacatgcggcagtgtttccttatcaatgtcgacattggaaagggcattcagcacatccaaatctcgcttggttggctcgtttctagaatgttaaaaaatgtagtctataaagaaacattctaaactatgattaatctcacccaaaaataaacaactcgtaacgcggctccaaatccatggaaatacctggcgacaagctttgcggcggcgtacggaagttttcctcgtcctcgctgctgcttccataaggcagcgtaacattagtgcagtcgaacttgaaaaaaaaaaacaacaaaaatgtttaggagaaggacaacagtactaaacactgatactcacaaagattacttgctcatcgctgtcgtagtcctcgtcgtcgctttgttgacggcgccaagcatctttcgaagcggacgccacgaccctcgatgctcccaaactggtcgatcccacaccaagcgaagcgtgcaaggcggacgaccctgtcgatcccgaagtatcctgaagctgaccctgagactgaacaacagcagctgcccgcagcgacttagtgcgctttcgacgactggtcttacggctgagatttgcgtcccacagacaggcgcaacactgctccgtctcccaggcggcgcaacatagctcctcggtcttcagagtgtctggtagatgcacggcggatgtcggcgcctgttccagcatcagcaatagactagcgcacacgcagcccaaatgctgttctcgaccacgctcgtcggccagcagttgccgcaaacttcggagcatctgcaacaattgtagacgcatggctacgctgacctcctgcgagtgggtcacatagctggccaccaggtgggcgatacgtgaatgcaccttgctaaagtccacgctaatgaagcgggcatcatcctaaaatggttaaatatcgatattatttgttgttaatgctgagttattcattattttatgcacaccttgaagctgacaatcagcgatttcagtcttttgagctcacagagcagcgtgtcgttgatggacaccatgttgccgattttgttgatcaacgttttagtgatgcgcttggcgaacacttgcagcgacttctctacgcatgtgtacggagtcatgactccggcggatggcgaagttgctcccgcagcctcatttttatcctttcggagttgctgctgttgctcgccggccatcgaatcgaaatactgatgcagatgggcaaagttccagaccgtttctgatttatccgcctgctgttcggtcttttccaggaaatacgcttcaagacgggccaggccttcggtcgtaccaatgtccaaaaatgaatcgagaaaatcccagtactcgcgccactctaactgctcctgtcgtgccagttggcggccgaccacctccagacccttctcgatatcagtgttcttgatgtgccgctcacggaagctgtcatttagcgacgcattcaggctgcggcttaggctcatgtccaggatttgggagtcatcggccaaagatggcgaatcaaagctattgttattgcgataggccatgaataaatccggtttcatttttcgaatgggtgtcgccgggaactccaacggatacactggcttcacattattattgttgtgctcgcactcattggtgccattgggcacgtttttcgtcggttttggtgagctggtcgcctccgccaatggactaaagagcactctgcgtcctgagtggactggactcgagtttccagcacttcggtcaaagatcgacttgcttggggttactttcaccggcgagctaaatggtgaaccagccagcggcgacatcacattgttgctgacccgcggtggtgtcttccaacggcgatagaagttcatggccttttcgcgggacatgggtcccgccagcgcactgattgccaggtccacgctgaggccctcgtaatcgtccgctttgtgttgcaggttctgtaaagtataagcaaaaatatatatatcaatgcgtcgttaattgtttcatgttatgtgggatcctcaataaataactaattagtttatcactctcttagtcgtaatgttgttttctcatacttataacaaatgcaataataaagtattttcttaacggtgggaaattatacaaacaattcgcctgagaaactaaacgtatgttgttcatcgtcaaataattgtaccaatgagaatttaaaattattagtaagcagaataatgtaaaacagttactaaccggtggatctttgggcgagaacggttgacccacttttggcggcagtgtatttgactgggatcttagtacgggcacaaaatgcggatcgtacaagagcagctccagcttcttgatggtcacatgtgtagcattagcattacgcaggcagatgatctgcaggggggagaacaggttacaatatgataatagcgattccttcgcccttttgtgactccaaactcgcaactcacttccttgggctccttgccctcatgattccgcagcgatttgcactccggataggaaacgagaacctcgaccatggccacatgaccgttctttgcggcaaagtggagcggtgtttcgccgcgccccttgtccggcatgttcaggtaatagtccaggagactgatgttgagggcagcacacatcttgccactgcccttcttgccaacgtaaagctgagtgaactcccgatccgaaatggtctttaacagcaactgagcgatcctggccttattgacctgggcgcagatgtgcatggcattatagcgacagccctccttcaaactggtgggcgtatcaccgctgctgatcaaaaatcgtggattctcccatataatcctcttcacccggtctatgtgaccaccttcgatttgcttgcgaaactctaccagttcctgtttggtgggcgcccggaaaggagggccttctccggacacatccggctgctgcggctgctgctgctgttgctgctgcatctgctgctgtcgcccattggcaatgacgttgctggagctgctcggcgaggaagtcggtgagtcactgagcagtaaattcgacattgaggaattgcttcccaggggaatgatgaagccactgccgttacccgtcggcgaggaggagcacgaattgtccgtcgaggtcggtgagctcttgtaaccgctaccgctgattatcggaatgggctctgaaaaaataatacagcgcataagttaaatcactgggtaagcaattatatagctagctatactatgtactcactgctttcgggctttgccttgcaaaatctcttgagcgcctcgatgctctcgaacccaaactgaacgtaactctccgcctgctccagattgggaaactcgcggaggcgcgcctccttgtagtgtcgcaggatgtccagcgccttggatttctccgtgaagatcagccacagtggcgagtccgctgctccgtcgtggcgatggcaatgttgatgtgtgggcatcgagagggataaaccattaataaatgagctggctgttttggtcacgccatcggtttggcgaatggcgaatagcgaacgagtgtcgaatgccagacgggtggaggattgtctcgagcaaaacaaaatcaaaacaagctatgctaaagggggcgttgggtgggcagtgggccgtggggcatatgcgtgtgacgcagtggttggcacaacgccggcaaaattttccgaggccctgccttatcaggagtagcaacagttttgctcgcagattgtcacagatttcaaagatatgtatttccaatacaaacgtggatggatcggaatcgaatgattacattatttagggtttataaaagcactctaagcagcttgccagacactttgaaagcctatgatcacttgtggctaactaacccatttaaatagcacttgttgaatttataaaaaacaaaagcagatatatttagcacacagctgcggcgtacaaacatttcatatatttctcttaacattacctctcgaaattagcgagtgtgccataattaaatttactttcgacccttcgcaatgtgctagcaaaacaaaaacagaaataaaactacaagcaaaaacaccgcagccttggtggtaaagttctaatcaaagatctgagataaaagctcaacatacacatagcatgtagaactaacaacaagtgttggccaatagggagcacgtatgaaagttcaattaaaaggcataaaacatttgctattagattaattggacactaattaggcgtgtttcgatttttatattatatataaggaataaggagattgctttagttatgattactttgaaatattaggaaagtaatttgtaattaaagcaatttaagcacctgtgcttaaattgcttaaagcaatttagttattgcttatttataacatgttataacatattatcccaatcgtagggtatctcataggtcggcgttattgggttttacggaactttgctctcttatttttgcgcgttgacttgggccaaaagacagggacagggccaagtgaaagggacagggacaggcacaacccacaataacacaagccggcaaaattgggcgtatgaacatatatatatatgtaaatataggatccggggattcttgacagtacacgcacacactttttcgggatacttgttgttctgcagctcgcagtataaataaatttgaaaaggaagcaaattggagaaattctgtgtgatatacagttgcgacctaatttatagtttttattatcaactgctgtttcgggatctttctaaaaatcgcaatttaataggtacataagaaataataatataaatatataaatatttactacttatgtgatattgccccgaattttagaatattaagataattgttaagtaacccataattattcttgttaaaaaaaaatatatataaggacctattattttgaccgcagctgtgtgactgctggaacataaatatggcagaatgtgggtgctgacaggtcaaggtcctcgtaatgcatccaatttgggcattgcctggaatgggaactggatgatgtcgatgtggaagtggaatgaactcgccccaatcggttttttgttttcgaatcgcatataattggattaaagagcgaacgactgagagcaggagagttgcatttaattagacaggtaatcgccatcgttcaccatttgtttacaattaaatcgaaagaccgctcccagacaaggaaatcgactgtgcgagcgggacagctgggcaagccccgattccgacttttttctcgaatctcagaagttttgaacacacacatgtaaacttcttcatgggctgttagtcatggaggaacaacagcgcaaaacgaaacttataaaaatgcaacagttgaattaccctatatgtaatttatcccagttaatacatttcatatataataatatttaagcacttaatttaccaaaaatgtgtaatatgcactattaggttcattaaaataacgacttgaaagaacgagttatccatatgctgaacaaatttcgatcaggtatattctgcataaatgggaataaaatttcaaccccttataaaacaaacattattgcagaaattcgtcaagcaattcaggtttagtttcaaaacaaaacctatgcaattccgatcatgaacattcctgttgcttggaaacttcaaccctcgacttttaaatttggttttaaaagtatgtgtatgaatcataaaacctcccacttgctccatacgacacaattgtttaaaaacaaaagcacacgaatacccatcaacgaatcgaccgaacgttcgcgcatgacccccgattacagggtatcacaatagcaacaagcggcaaataactggaacgcaaaacacacacatataccgacactcgcttcatctcgttcgtacttacgtggatagtcgggatcctcgtacttggtggcagcactgccatcgtctgcgttgcccgtttgcacggatgccgccgagccggatggcgatcccgatgctactgatgccgatccagacgccggattggatggctttatgttcaccgcggctatggagccgatgcactgcgacaccgatccctcaaaacagcccgctttggaggtcgggatatagaccccgaaataggtcgacatctctgcgtaaaatggcggatgcactgcaaggtaagcggttaaaatggtttgacatcaacaccaaataacaggcaacttcttcacaactccgtgaaaaaatgtaaagttccgctgatggcaagcgaaggcaacggtaaaaatagggtaacatcaaccacaaaatgccaggaactctactgtcccgttttgttgttgttttcggctgcactcctccactcgcacgcacacaaacacaacaacgcaaaaaaaaaacggaaaaaaaacagcacacgcacatcaacaaccagcgacgcgaactcacgagacctggaagacccaacgaatcggcggaatcacaaacatatatcttgttattcttaccttttagcacaaagggcacaatacatgaaacaaaacccaataatcttaagcgtctttcaaacaaaatgtgcacaaacgaaattaaattagaggcggactgtcagcgaatctaggtgtggagtaatatcgataaaaagtatcgtatgactagctgactattgcagtcaatttcgaattgcagatcaaattgaaatattctaaaacacttgcatgaaaattacgcgagatttatatacaaagctatagcgatgattggatatcggaaattcaaattgattgttacacagagggattcagacatgagaagtgacactttattttaagtcttaaaaggtattttggttgtaagttagtattacgttattcataaaacgtacaaatgaggcattcccccaactttcctcttaatcatatagccaagcaaaacatttgatggtttgagtcaagggtgctatcaataccactggtattttcttagtattttgtaacatttttaaatgcaccgccttgaatttagtcctcttaatttgttcattaactttggccactcacaagcctagcttaaagttagtaacagttgccctgcttatccgcttctatcccttttacacttttaaatacagtttgaatttcatacgttggtttgggtctatggtgaattggttgacgattggtatctttttggtattttataaggctccccatttaacggtggggatttttcggacatatttcaacgaccgtcgacggctgcaaacataacgttcgtggatttcgtggggaatagcggtcgactcgcgcggtctcatttttttaacgtgcttgtgttgtgtgtgtgaatgtgtttggcgtgcggctaacactgttgttgtcgaattgttgttgttgttggtaaaaacttgcgcgccattactaacagtaaattaaaggagtatcactgctaaaaaaaaaaaaattgaatacacgcaaatttgaaagctgcgacccaaaaaggtttgtttaagtcttctagtcaattgtctgattatattttgttccctttttccttttttttggtagctcagggatacacatacccagcaggggtgtgttttcctgcgtgc

SEQ ID NO: 18371 - DNA, 3762 bp, DROSOPHILA
tgacagtccgcctctaatttaatttcgtttgtgcacattttgtttgaaagacgcttaagattattgggttttgtttcatgtattgtgccctttgtgctaaaagtgcatccgccattttacgcagagatgtcgacctatttcggggtctatatcccgacctccaaagcgggctgttttgagggatcggtgtcgcagtgcatcggctccatagccgcggtgaacataaagccatccaatccggcgtctggatcggcatcagtagcatcgggatcgccatccggctcggcggcatccgtgcaaacgggcaacgcagacgatggcagtgctgccaccaagtacgaggatcccgactatccaccggactcgccactgtggctgatcttcacggagaaatccaaggcgctggacatcctgcgacactacaaggaggcgcgcctccgcgagtttcccaatctggagcaggcggagagttacgttcagtttgggttcgagagcatcgaggcgctcaagagattttgcaaggcaaagcccgaaagcaagcccattccgataatcagcggtagcggttacaagagctcaccgacctcgacggacaattcgtgctcctcctcgccgacgggtaacggcagtggcttcatcattcccctgggaagcaattcctcaatgtcgaatttactgctcagtgactcaccgacttcctcgccgagcagctccagcaacgtcattgccaatgggcgacagcagcagatgcagcagcaacagcagcagcagccgcagcagccggatgtgtccggagaaggccctcctttccgggcgcccaccaaacaggaactggtagagtttcgcaagcaaatcgaaggtggtcacatagaccgggtgaagaggattatatgggagaatccacgatttttgatcagcagcggtgatacgcccaccagtttgaaggagggctgtcgctataatgccatgcacatctgcgcccaggtcaataaggccaggatcgctcagttgctgttaaagaccatttcggatcgggagttcactcagctttacgttggcaagaagggcagtggcaagatgtgtgctgccctcaacatcagtctcctggactattacctgaacatgccggacaaggggcgcggcgaaacaccgctccactttgccgcaaagaacggtcatgtggccatggtcgaggttctcgtttcctatccggagtgcaaatcgctgcggaatcatgagggcaaggagcccaaggaaatcatctgcctgcgtaatgctaatgctacacatgtgaccatcaagaagctggagctgctcttgtacgatccgcattttgtgcccgtactaagatcccagtcaaatacactgccgccaaaagtgggtcaaccgttctcgcccaaagatccaccgaacctgcaacacaaagcggacgattacgagggcctcagcgtggacctggcaatcagtgcgctggcgggacccatgtcccgcgaaaaggccatgaacttctatcgccgttggaagacaccaccgcgggtcagcaacaatgtgatgtcgccgctggctggttcaccatttagctcgccggtgaaagtaaccccaagcaagtcgatctttgaccgaagtgctggaaactcgagtccagtccactcaggacgcagagtgctctttagtccattggcggaggcgaccagctcaccaaaaccgacgaaaaacgtgcccaatggcaccaatgagtgcgagcacaacaataataatgtgaagccagtgtatccgttggagttcccggcgacacccattcgaaaaatgaaaccggatttattcatggcctatcgcaataacaatagctttgattcgccatctttggccgatgactcccaaatcctggacatgagcctaagccgcagcctgaatgcgtcgctaaatgacagcttccgtgagcggcacatcaagaacactgatatcgagaagggtctggaggtggtcggccgccaactggcacgacaggagcagttagagtggcgcgagtactgggattttctcgattcatttttggacattggtacgaccgaaggcctggcccgtcttgaagcgtatttcctggaaaagaccgaacagcaggcggataaatcagaaacggtctggaactttgcccatctgcatcagtatttcgattcgatggccggcgagcaacagcagcaactccgaaaggataaaaatgaggctgcgggagcaacttcgccatccgccggagtcatgactccgtacacatgcgtagagaagtcgctgcaagtgttcgccaagcgcatcactaaaacgttgatcaacaaaatcggcaacatggtgtccatcaacgacacgctgctctgtgagctcaaaagactgaaatcgctgattgtcagcttcaaggatgatgcccgcttcattagcgtggactttagcaaggtgcattcacgtatcgcccacctggtggccagctatgtgacccactcgcaggaggtcagcgtagccatgcgtctacaattgttgcagatgctccgaagtttgcggcaactgctggccgacgagcgtggtcgagaacagcatttgggctgcgtgtgcgctagtctattgctgatgctggaacaggcgccgacatccgccgtgcatctaccagacactctgaagaccgaggagctatgttgcgccgcctgggagacggagcagtgttgcgcctgtctgtgggacgcaaatctcagccgtaagaccagtcgtcgaaagcgcactaagtcgctgcgggcagctgctgttgttcagtctcagggtcagcttcaggatacttcgggatcgacagggtcgtccgccttgcacgcttcgcttggtgtgggatcgaccagtttgggagcatcgagggtcgtggcgtccgcttcgaaagatgcttggcgccgtcaacaaagcgacgacgaggactacgacagcgatgagcaagtaatctttttcgactgcactaatgttacgctgccttatggaagcagcagcgaggacgaggaaaacttccgtacgccgccgcaaagcttgtcgccaggtatttccatggatttggagccgcgttacgagttgtttatttttggaaacgagccaaccaagcgagatttggatgtgctgaatgccctttccaatgtcgacattgataaggaaacactgccgcatgtctacgcctggaagactgccatggagagctactcctgtgctgaaatgaatctgaacgtcaaggttcaaaagccggagccttggtattctggaaccagttctagccacaacagccaaccattgttgcatcccaagcgtctgcttgccacgccaaagctgaatgccgtggtcagcggcagacgcggatccggaccattgacggcgccagttacaccgcgtctggcgcgaactccgtccgccgccagtattcaagttgcatccgagacgaatggcgagtcggtcggaactgctgtgactccggcatcgccgattttgagttttgccgccttgacggcagcgacgcagtcattccaaacaccattgaacaaggtgcgcggcttgttcagccaatatcgggatcaacggtcctataacgagggggacacgccgctgggcaatcggaactgaaacggaatcggcccggaaacagaaacagaaacagcgactgattgatgaaaggccgactgcatacttacccccctgaatagccggtgtcgtccattgtcccttttaatgttaatcgcatgtatatta

SEQ ID NO: 18372 - protein, 1169 aa, DROSOPHILA
MSTYFGVYIPTSKAGCFEGSVSQCIGSIAAVNIKPSNPASGSASVASGSPSGSAASVQTGNADDGSAATKYEDPDYPPDSPLWLIFTEKSKALDILRHYKEARLREFPNLEQAESYVQFGFESIEALKRFCKAKPESKPIPIISGSGYKSSPTSTDNSCSSSPTGNGSGFIIPLGSNSSMSNLLLSDSPTSSPSSSSNVIANGRQQQMQQQQQQQPQQPDVSGEGPPFRAPTKQELVEFRKQIEGGHIDRVKRIIWENPRFLISSGDTPTSLKEGCRYNAMHICAQVNKARIAQLLLKTISDREFTQLYVGKKGSGKMCAALNISLLDYYLNMPDKGRGETPLHFAAKNGHVAMVEVLVSYPECKSLRNHEGKEPKEIICLRNANATHVTIKKLELLLYDPHFVPVLRSQSNTLPPKVGQPFSPKDPPNLQHKADDYEGLSVDLAISALAGPMSREKAMNFYRRWKTPPRVSNNVMSPLAGSPFSSPVKVTPSKSIFDRSAGNSSPVHSGRRVLFSPLAEATSSPKPTKNVPNGTNECEHNNNNVKPVYPLEFPATPIRKMKPDLFMAYRNNNSFDSPSLADDSQILDMSLSRSLNASLNDSFRERHIKNTDIEKGLEVVGRQLARQEQLEWREYWDFLDSFLDIGTTEGLARLEAYFLEKTEQQADKSETVWNFAHLHQYFDSMAGEQQQQLRKDKNEAAGATSPSAGVMTPYTCVEKSLQVFAKRITKTLINKIGNMVSINDTLLCELKRLKSLIVSFKDDARFISVDFSKVHSRIAHLVASYVTHSQEVSVAMRLQLLQMLRSLRQLLADERGREQHLGCVCASLLLMLEQAPTSAVHLPDTLKTEELCCAAWETEQCCACLWDANLSRKTSRRKRTKSLRAAAVVQSQGQLQDTSGSTGSSALHASLGVGSTSLGASRVVASASKDAWRRQQSDDEDYDSDEQVIFFDCTNVTLPYGSSSEDEENFRTPPQSLSPGISMDLEPRYELFIFGNEPTKRDLDVLNALSNVDIDKETLPHVYAWKTAMESYSCAEMNLNVKVQKPEPWYSGTSSSHNSQPLLHPKRLLATPKLNAVVSGRRGSGPLTAPVTPRLARTPSAASIQVASETNGESVGTAVTPASPILSFAALTAATQSFQTPLNKVRGLFSQYRDQRSYNEGDTPLGNRN

SEQ ID NO: 18373 - DNA, 3632 bp, DROSOPHILA
ctggataatgccaacgaaggcaaggagatcattgttaaggtgagtaggtgaaaaatgcgtaaactaaatcaaatacttacattatggttatttttcattccagatacaacaaattctggacgatgctgacgaggctgaggcgcccaaggagcaacccagagtgaaacgagaaattcgcaaaaggaaactgaccaaaacggaagagtctggcgagcaaaatttggaatttgaaatttccaacgttgaaattaaaaatcccgaatactctgagtacctggacgaaagcaaagaagtaaatattcacaatttgataagtatcttagacattttaacgattatcgaacagcattacatattgcagcaaaacccggatgacttagccaatggatcggcgacgatcatcgaggccaggccaagaaatggtttagctgcattgcgagcggaaaaggcgcgagccgagatcagtcagttccagagtaagaccaagtttcttaaaacggaaacggacaatctaaaagtagagcgcacactgactttgcttaagattcagaagcttcgattggaaatcgacgccctacgcgattaaaatgtattttaactatagataacttttaaatgtccgcatggtgaacccttaatttttgttaagatgacgaaaatgtctgtcttgaattcaacatagatttattacatttaactttgtaaaggtgattacaaaatacattattttaagcctgattactcgaatctttttattaaataataatgtaataatgcaatgcttacaagtgttattaaaatcgatgtaatctaatgcttacatacataaatattacatacatcaaaattattgaataaataaaaatacataataaataaaactagaaatactagtacaatcgatagttcgcactcttcgacaaccctactgatacccattcgataactgaccccaagcaaccctgttcatcacatgatagtcagggtgatatcggggaagagaaaaggttttctttgcagtcgttcgtcatatgattaaaagtccagcggaaaactgaaaatgttgagagttttcgtgattttctcgctgtttatagcggccagtaagtagatctaccatctataatcaagtaaaatgcatgcgcagcaagtggaaagcggtcacaaagtggatattctgtactcatcgattcctctttgggggtggtgacacccagaactcgggactccaaagggctccccacatgcatgcgcagaatcttggacaaaggagacgaatatgttagattctacagaacttatgagctacgtcttcctattttgcagtcaatgcctctggcgaattcaccgtgctgaaccgtcccaaggcaatcagtttcaagggcaacgatgcactggaaagccactacgtgggtgatgtactctacgcttccatgggcaacgccgtcagcggcgataccaactggaacggactgaccatcaacgatcccttcaacctggccaagggcgtcattctggtgcatgtccagggcattggtcacgtgaccaccgccggcaacgtcaagacctacgagctgacaggctccggaacggacgcctctctgaacgccctggccgccgaactggaggcagccaacgagcccgtctgcgatattaactttgagcagttcgacgatggcgtaagtggtgtcttaaaggggaaaagcacatttcgttagtcagttagctaatttgtcaaaccgcagaaagcatgatcttcatctgaaagttcgtttaaagaagcttctctacaatccgctataacttcccacaaatatgatagatagttattaaaccttaaaaattaattaatcacatgatttatagagtgaatcatagtgccttcccccttacgcatataacgtagagaccaatgtatatttaaccacatattttttataggttcaagcctggaagtcctgctttggtgatttcgaggccccagccgccaagcccaccaagcacctgaacccctctctgcacaccgctgacaagcagttcctccaggaggttggattcatcaacagtgccgccgatcatctggctgagatggccaagccctcgaatgtcctgatgctgcgcgtttccgtcgatggagtggccaaggctcatggcgagaagtccgtggccgtggaggaggccaacaaattgctgtcggccgctatcagccgcctgcttgctgcctcccagaagtccagcgactcggttctgtttgtccagaccacggagaaggacgtggcagcatcgcgtgccaagcgtgataccattgccgcttccaccaccaatccctacaacctggccgtctactacggcagcgactacccggtgatcttcaacatcatcctgtggttcatggtcgtcttcggactgtctctgctggctatctgctacgccatcgctgccatggatcccggcagggactccatcatttaccgcatgacctctacccgcatcaagaaggacaactaaggaggagcaggaggagttgagaagcgagaggagcaggaggagcgagaggagcttgcgttacgctttgttatttcgtcccccttttaagttgaaatttgccaacttctacttcaatccaacagcggataaattgtgtgtttgtgtgtgtgcggacagctgtcgcagtagttggttttattatctataaataagtattaaaaaacttttcagttttcaatgcagttgcgggcgtcgcaacaattccatagaaatttgttacattttcctgttttgttgtactttttaggtttatatatatatacgaatatgcacaacatactcgccaagtcagtcagttcttcaaacgattcatcatatgtaaattatcaaaatgtgaagtgttgaaaagtaaagttaaatatatatagcctaaaaagacaaagttgcgcctggttttgttatctagtttttggggcaaatgataattgaaatcatacgtggtattcttgataatttatttaattattgcacttataaaaaggttaacatgataaactaatataaaatgaaagctatttcaatttttttcttctcaaaatcgtaaagtatggaccttaacttttataggttcatggaatgactttggcaaattgcggatataatataacacaagttttaaattgaatatttaaatgaattccctttgatattcgttaattcaagttacgctccccaatgatcgttgccattatcataaggtgaactacttccgccgctccaggcacagcatccattgccattttgacccacggagctctcccgcagcatggcctgcaggtgattaatgtagttgatggcaatcctgggtaggcaaagatcatataaatatattacagagctctaccgcagatactttcacttacctcaaactctcgattttggagtactttttcccatttggcttggatatgggtagcttggagcgcagtaagtcaaaggctcggttcatgtcccgcatcctggttctttcccgatcgcaggcggtgcgtctatagtccttctccatttgcagcgccttctcccgccaggcgggattgtgctctttggcgatgtccacctcagtgctattggctatactaccgccg

SEQ ID NO: 18374 - DNA, 1147 bp, DROSOPHILA
agaaaaggttttctttgcagtcgttcgtcatatgattaaaagtccagcggaaaactgaaaatgttgagagttttcgtgattttctcgctgtttatagcggccatcaatgcctctggcgaattcaccgtgctgaaccgtcccaaggcaatcagtttcaagggcaacgatgcactggaaagccactacgtgggtgatgtactctacgcttccatgggcaacgccgtcagcggcgataccaactggaacggactgaccatcaacgatcccttcaacctggccaagggcgtcattctggtgcatgtccagggcattggtcacgtgaccaccgccggcaacgtcaagacctacgagctgacaggctccggaacggacgcctctctgaacgccctggccgccgaactggaggcagccaacgagcccgtctgcgatattaactttgagcagttcgacgatggcgttcaagcctggaagtcctgctttggtgatttcgaggccccagccgccaagcccaccaagcacctgaacccctctctgcacaccgctgacaagcagttcctccaggaggttggattcatcaacagtgccgccgatcatctggctgagatggccaagccctcgaatgtcctgatgctgcgcgtttccgtcgatggagtggccaaggctcatggcgagaagtccgtggccgtggaggaggccaacaaattgctgtcggccgctatcagccgcctgcttgctgcctcccagaagtccagcgactcggttctgtttgtccagaccacggagaaggacgtggcagcatcgcgtgccaagcgtgataccattgccgcttccaccaccaatccctacaacctggccgtctactacggcagcgactacccggtgatcttcaacatcatcctgtggttcatggtcgtcttcggactgtctctgctggctatctgctacgccatcgctgccatggatcccggcagggactccatcatttaccgcatgacctctacccgcatcaagaaggacaactaaggaggagcaggaggagttgagaagcgagaggagcaggaggagcgagaggagcttgcgttacgctttgttatttcgtcccccttttaagttgaaatttgccaacttctacttcaatccaacagcg

SEQ ID NO: 18375 - protein, 320 aa, DROSOPHILA
MLRVFVIFSLFIAAINASGEFTVLNRPKAISFKGNDALESHYVGDVLYASMGNAVSGDTNWNGLTINDPFNLAKGVILVHVQGIGHVTTAGNVKTYELTGSGTDASLNALAAELEAANEPVCDINFEQFDDGVQAWKSCFGDFEAPAAKPTKHLNPSLHTADKQFLQEVGFINSAADHLAEMAKPSNVLMLRVSVDGVAKAHGEKSVAVEEANKLLSAAISRLLAASQKSSDSVLFVQTTEKDVAASRAKRDTIAASTTNPYNLAVYYGSDYPVIFNIILWFMVVFGLSLLAICYAIAAMDPGRDSIIYRMTSTRIKKDN

SEQ ID NO: 18376 - DNA, 2905 bp, DROSOPHILA
atgtggctctggccatagaagacctattttggaaaactgatgaatcagaaaggtttccggcatggcgagaattcctaggcaagagcaaacaagaacgcctgtcgcttcagagggtcaggggaactccacgcagctaagcattcgggagtttatgagcgccaaaaagtgccatgaggtaagtaaaccaaccattttaaatgagagtattttaggaattgattaatctctccgattaggtggatctaacagccgttctcgtggaccagcttgtgaagaactccggtcaagattgcttcattgtagacgcgggcgatggcaaagggtatttatcctcgcgcttggcgctccagtatggtcaccgcgtgctcggcatcgatgcgaacgcggcaaacaccgagaacgcattgaataggaatcgcaaattgcaggtaggccgggcttacaaaataaagttagctttatttcattacgtttgtagacttagaagtaaggtgtgggtgtatgtaggtgaatccattggctagtcgcgcatttcgccctcctcgtcgtcgtcctccatgcccttgatatacagcacgttgttgcagcggatgagcacctcgccaagattaccagtcacggagccctcgatcacttcctccgtgttcgccagctgcatgttcatgtagccgtcgacggagaccaggaagcccttgtactcctggccccacttcagcttcaccagcaccggttttcccgtcaggccgttcaggaagggcttggggttaatgggcataccagccgacattctgtttatttgatttttcctgccttttttataaaatattacaacaagcgtgccgaaaatcgccggcttttcgcgttttttttgtgtagtgtgaccacagctgcgctgtgtaaacataccagaacaagaagaagaatagcatagaagaagagtattgaaaaaccattcaaaagcgccaaaattaaaattttatttaatttcagcgcgcttggaatggccttacggaacgagcggagctgcaagtccagggaatcacgcccaagagacgtggtaaaaagtcgccagccagggagagcaccaagagtgcgcctgccttggaaaactacaagacaacggcaaagtttataaccaccgaacttaactttggtgccctgctggcggagaatttcactcagtttagaccggaagacagtccaaacatttgccttactggattgcatacctgtggcaacctggccgccacctgtcttcaggttttccacgcccaaacggactgccggttgctttgtaatgttggctgctgctatcatttgctgcgggagcgctattcgcagcaggagttctttggcaataagtccctgatggagctgcaaacagactatggattcccattgagtcagtacctgcgggagcgacaagtgcgaatgggtcgcaatgcgcggatgctggcggcccagtcaattgaacgcaccttggacaccaaggagctgcctaatgtaacgctctactatcgagctctcttggagattctggtttgccgccatgcgccggagctgaaaaacgaactgcaggtgggcaaggtacggaaattcgagagtttcgaggagtacattcaaaagtgtgccaccaaattggatgctccctggttggcagctgttgagaaagaagaacttcaatccctgctccaggaatatgccgtgcataaatacttcttggatctgttctatctgctgcgcatgtcctttgctccggtgctggagagtctaattctcctggatcgcctgctctacctcaaggaacttggctatgaacgcagctatctgatagatttatttgatcccgtcatttcgcccaggcattttgcaattgtttctataaagcagcaaacgcaacaataatgaaattcacaaatgcatcaaaagcttgacgagaaagccggttgtgtttaattatttatagattatagcgtgcaatacttttcatatcgtatatgtattgcgttaacgcttttaaaaatctaactaaaccatagcacacaaaaagtaaataaggttgttaaaactaagaatcattataataaatgtaatcatgacttgtaattatcttagagtccctctggatttgctgtggtttgtttgtcgtattttaaagctttttccaccacacaggtgaatttataagtatgcacttgaaattgctatctcagaacttttgagactttcgagtataaaaacgcaaacaacatttcaaatcgccccaagtgcggtgcgtagagctttaattgtcggttgtgtacgcgggtgctcagaatttatagatccaataaaagtttccttgaaattgctggacaaacttgttgcgaattaggccagttgcaaataaattgtgtgactaaaaaaacctgtatattttcaaagtaagttatgaaattcggtatacaaaattgtatattttaatttgaaaaagtgtgatatccttgaaaaaaccacacttaatatggaattgagggcaactgtgaaaattaagattacttggttactgttactgttactaaaataaatagagaactggtttctaagaaatatattttggacatttgctctatagaaatagtagtctcatgtataattaataaagcttaggacgaaatccttgctggcaaatttttagtgtcatatttgctgcccgaaaagattttctatttagctttacaagcagcttaattgggtgtagatatggcgggaattactataagcgtatcataaacactcattgtaatgctccctatcataactaattgtaattcgcgttggaatggaaaagataatgccagctaaaaataattaagacggctgatttaataaaatctaggtaaacatgggtagcaaaacactctag

SEQ ID NO: 18377 - DNA, 702 bp, DROSOPHILA
atggccttacggaacgagcggagctgcaagtccagggaatcacgcccaagagacgtggttttccacgcccaaacggactgccggttgctttgtaatgttggctgctgctatcatttgctgcgggagcgctattcgcagcaggagttctttggcaataagtccctgatggagctgcaaacagactatggattcccattgagtcagtacctgcgggagcgacaagtgcgaatgggtcgcaatgcgcggatgctggcggcccagtcaattgaacgcaccttggacaccaaggagctgcctaatgtaacgctctactatcgagctctcttggagattctggtttgccgccatgcgccggagctgaaaaacgaactgcaggtgggcaaggtacggaaattcgagagtttcgaggagtacattcaaaagtgtgccaccaaattggatgctccctggttggcagctgttgagaaagaagaacttcaatccctgctccaggaatatgccgtgcataaatacttcttggatctgttctatctgctgcgcatgtcctttgctccggtgctggagagtctaattctcctggatcgcctgctctacctcaaggaacttggctatgaacgcagctatctgatagatttatttgatcccgtcatttcgcccaggcattttgcaattgtttctataaagcagcaaacgcaacaataa

SEQ ID NO: 18378 - protein, 233 aa, DROSOPHILA
MALRNERSCKSRESRPRDVVFHAQTDCRLLCNVGCCYHLLRERYSQQEFFGNKSLMELQTDYGFPLSQYLRERQVRMGRNARMLAAQSIERTLDTKELPNVTLYYRALLEILVCRHAPELKNELQVGKVRKFESFEEYIQKCATKLDAPWLAAVEKEELQSLLQEYAVHKYFLDLFYLLRMSFAPVLESLILLDRLLYLKELGYERSYLIDLFDPVISPRHFAIVSIKQQTQQ

SEQ ID NO: 18379 - DNA, 2754 bp, DROSOPHILA
gtgtatttacgtagcaaactatagcaatattatatgatatttcccacacgattgtgagcacagcacaaatattgattgatcgaaccgctcgaaaaaaagatggaacataaggcagcaattgaagataaatggataatacttttcgtactgtgtttgattgtataaatataaatattagcttaaagatacacagcagtcaatttttgaactcgaactcaagcaaaatgcgaatacgatagatatttggcatataatcgcactcggttaatatgaataatccggtcccacactctcctagttgttgcaatcaagtttactttaaatgtgtgtacgtgtacaaagcaaactacttatatactatagagcataaatataaactaattatacatatacggaacctatataaaatatttacatttgactaatgtatctataactgaattgcttagaattaacgtgtttaagggcattttgattaattttttattggtctgcgtgtgctaatcaaaattgactataaaatgtcaacaaaaatcaagttttacaactatttttctagttactctgccgctcgcctgaaaatcaaaatccagacaactttacgagccgatctaaacccatttctggatttagttgtgacaattgtattaattgtgtatatttcttggtcatttcgttgcttgtttttgttccttagattgaaaaaaaaaagattcacgtttgtttaccttactatgtaagaattgcaattaaatcaaaaataaatcacaccattgagaattactctaaaaaatgtttctttatttaaacgggtaactttatattatcaaaaaaggaaacaataacttaagtgtataacatgcaaatatttagtttgaactataaattcaaataaagcggttaactaagttcagtgttggctaacgtgtatcgcagcgcttatcgtaacgtatcgttatcgagcccagcagtcagctgtttataacccaaacaatcacacgtgaatttcttaaaaagtaaataaataaaattttaaacgaaaactaaaacaaaaatgtcctctcccagtgaatcctcttcagcttctgagcacgaggctagcgatgacaacgaaactcaggtacaagtaatacaactatacagaaatatggtttactacatatgcgagaacttcgttttagaatgccattcgcgaagatctcaaaggaatgtcattcgaggagataatgaaactaaaagaggagctgggcgccaaggtgtacaaagaggctgtgctcggtagcaagagttctagaccccaaaaaccaaaggccaaaaccgacctcaagcggctaaacaaaaaccgacctcgtgaaatgaccaccagacgacaggttccatttttgggcgccgagcacagagtggagcggaaaaaaaatgttgaactcagagatccaagatttgacgaaaaatccggaacatatagtgcagaaaccttcaagaagaactaccagtttgtctcccagattcgagcaaaggaagttggtcagctgaagaaaaaactggacgaagtggaggatgaggcggagaagcaccatataaaggacaccatgcagcgacttatcaataaaaatgtggaggacaagaagtggcacaccaaacagaagcaactgaaaaaggagcgctccgccattcagaagaaacacgatttgggacaacaacctcattatctgacaaagagtacgtttctgatcgacagcgaaatcaaattttaatttgtttttttttccgacagaggagcgtcgagctaaggaactagttgcccaattcgagaagctgaaaaacactggaaaactcaacaagcacatggaaaagcgacgcaagaagaacgccgccaaggaccgcaaacgcattggtatagaataagacttacgctttaagtataaatgtattttaaacaattaaaagcacagtgcaaataagcaaatctagcccgtgcgcaacatctttgcttcccgcttctcctgcaactcgcgccgttgctgttccacaattaacttgcgctcctccaggaactcgccataggccgccggatctatttccctgaccactttgatgccacaggtccgagcaatgctgatgagcatctcacacatttgctaagagacaaggcataaacttgagtcgaagttatatctcaaacttttcggaataccgacctgcatggtaagaagtacattgggcgggtcctgaatcttaatagctgcaatctcgtacaaatgcttgagagtgatcatgccggcaacctccttgccaggagtcatggtgcccctttgtatgcccgccgcttgcttcaggaaaaatgtggccggcggatggtggatggccaagtcgtagctgcgatcgctgtttacggaaattctgcacggcagcggtacgccctctttcatttccgcggtcttggcattaaagtccttgcagaaagcggcgatattaatcgctctctgtgtgtggttaaaaacaaaattatatacatattttagttttaaagccggctaactcacctgtcccaacatcggtcccaatggcggacctgcagcagccattcccgcaggtatattcgtcttcagtttgctcgtgtgcgtcacacgttccaccgtcttctttagcgatttcagcttacccgctgccttcgacattttaattgatttattttaactaaacaattgattcaaactgttatgcaaagcgaaatgtgttggtggaaggaagaag

SEQ ID NO: 18380 - DNA, 693 bp, DROSOPHILA
gtgaatttcttaaaaagtaaataaataaaattttaaacgaaaactaaaacaaaaatgtcctctcccagtgaatcctcttcagcttctgagcacgaggctagcgatgacaacgaaactcagaatgccattcgcgaagatctcaaaggaatgtcattcgaggagataatgaaactaaaagaggagctgggcgccaaggtgtacaaagaggctgtgctcggtagcaagagttctagaccccaaaaaccaaaggccaaaaccgacctcaagcggctaaacaaaaaccgacctcgtgaaatgaccaccagacgacaggttccatttttgggcgccgagcacagagtggagcggaaaaaaaatgttgaactcagagatccaagatttgacgaaaaatccggaacatatagtgcagaaaccttcaagaagaactaccagtttgtctcccagattcgagcaaaggaagttggtcagctgaagaaaaaactggacgaagtggaggatgaggcggagaagcaccatataaaggacaccatgcagcgacttatcaataaaaatgtggaggacaagaagtggcacaccaaacagaagcaactgaaaaaggagcgctccgccattcagaagaaacacgatttgggacaacaacctcattatctgacaaagagtacgtttctgatcgacagcgaaatcaaattttaa

SEQ ID NO: 18381 - protein, 212 aa, DROSOPHILA
MSSPSESSSASEHEASDDNETQNAIREDLKGMSFEEIMKLKEELGAKVYKEAVLGSKSSRPQKPKAKTDLKRLNKNRPREMTTRRQVPFLGAEHRVERKKNVELRDPRFDEKSGTYSAETFKKNYQFVSQIRAKEVGQLKKKLDEVEDEAEKHHIKDTMQRLINKNVEDKKWHTKQKQLKKERSAIQKKHDLGQQPHYLTKSTFLIDSEIKF

SEQ ID NO: 18382 - DNA, 6177 bp, DROSOPHILA
ccacgtacctgccccacctgcctctgctccagttgacaaaagaagaggagcagaaaccaaaagacaccaacgaagaagcacttcgatgggcacgtggcgaaccgatgataccctatggtatcagtctctaaaaataatgagcatgttaaaaaaagtaacagtaaagcaactgatattagtttaaatgtaccgtatttactgcatacctcaaatttgtagaagcttacagagcgatgagtatctgagcgtcgactatcgcataccttctgtttttggccttcgtatattatccttatgctgagaaaatggtaaatttcatgggtcatgggtatgtaccgcaatcatcttacacctgttgtcagtgcgtcccccaacaaaagtcgagcatacccattctgatgtagcgctgccaccatcaagagcactctcataaataagaaattgagagtaaacgagacctggccgggatcgggatcgtcgaggggatcccctgagctggggcagaatctatgggtatacgtatactgacttcgataaacattttttgctttcctttcccttccgttgaattcgttgcattttatttttttttttcccgagccgagcggtttcagtttctcgttttgcattgcatcgaacaccaagatcgatcggtggcgaagaatgctcttttcagtcgcgatcttacccagcgtccaggtgtccattccactgtccgtccgtttgtgtgattaatggtaattgcttttatggctttctacggcgctcttctgccacaatttgttgcggtaatttcgcttttagtcgcagtccccaaactgatagccccaccacaccaaaatgaattgggaaattacatatttagaaaagcacttgattcaatttgctgcgaactatacaactaatgaattccttatctgttgcaaagtacttggtagcaaagatttcgttttttatttcacttttcacgatttttgtattcataatgtataaaaaaaaataatatacatgcgattaacattaaaagggacaatggacgacaccggctattcaggggggtaagtatgcagtcggcctttcatcaatcagtcgctgtttctgtttctgtttccgggccgattccgtttcagttccgattgcccagcggcgtgtccccctcgttataggaccgttgatcccgatattggctgaacaagccgcgcaccttgttcaatggtgtttggaatgactgcgtcgctgccgtcaaggcggcaaaactcaaaatcggcgatgccggagtcacagcagttccgaccgactcgccattcgtctcggatgcaacttgaatactggcggcggacggagttcgcgccagacgcggtgtaactggcgccgtcaatggtccggatccgcgtctgccgctgaccacggcattcagctttggcgtggcaagcagacgcttgggatgcaacaatggttggctgttgtggctagaactggttccagaataccaaggctccggcttttgaaccttgacgttccttggggatgggaagctttaatataagtgagcaaaagtcattacaaaaaccctatcatgatgataataaacatacagattcatttcagcacaggagtagctctccatggcagtcttccaggcgtagacatgcggcagtgtttccttatcaatgtcgacattggaaagggcattcagcacatccaaatctcgcttggttggctcgtttctagaatgttaaaaaatgtagtctataaagaaacattctaaactatgattaatctcacccaaaaataaacaactcgtaacgcggctccaaatccatggaaatacctggcgacaagctttgcggcggcgtacggaagttttcctcgtcctcgctgctgcttccataaggcagcgtaacattagtgcagtcgaacttgaaaaaaaaaaacaacaaaaatgtttaggagaaggacaacagtactaaacactgatactcacaaagattacttgctcatcgctgtcgtagtcctcgtcgtcgctttgttgacggcgccaagcatctttcgaagcggacgccacgaccctcgatgctcccaaactggtcgatcccacaccaagcgaagcgtgcaaggcggacgaccctgtcgatcccgaagtatcctgaagctgaccctgagactgaacaacagcagctgcccgcagcgacttagtgcgctttcgacgactggtcttacggctgagatttgcgtcccacagacaggcgcaacactgctccgtctcccaggcggcgcaacatagctcctcggtcttcagagtgtctggtagatgcacggcggatgtcggcgcctgttccagcatcagcaatagactagcgcacacgcagcccaaatgctgttctcgaccacgctcgtcggccagcagttgccgcaaacttcggagcatctgcaacaattgtagacgcatggctacgctgacctcctgcgagtgggtcacatagctggccaccaggtgggcgatacgtgaatgcaccttgctaaagtccacgctaatgaagcgggcatcatcctaaaatggttaaatatcgatattatttgttgttaatgctgagttattcattattttatgcacaccttgaagctgacaatcagcgatttcagtcttttgagctcacagagcagcgtgtcgttgatggacaccatgttgccgattttgttgatcaacgttttagtgatgcgcttggcgaacacttgcagcgacttctctacgcatgtgtacggagtcatgactccggcggatggcgaagttgctcccgcagcctcatttttatcctttcggagttgctgctgttgctcgccggccatcgaatcgaaatactgatgcagatgggcaaagttccagaccgtttctgatttatccgcctgctgttcggtcttttccaggaaatacgcttcaagacgggccaggccttcggtcgtaccaatgtccaaaaatgaatcgagaaaatcccagtactcgcgccactctaactgctcctgtcgtgccagttggcggccgaccacctccagacccttctcgatatcagtgttcttgatgtgccgctcacggaagctgtcatttagcgacgcattcaggctgcggcttaggctcatgtccaggatttgggagtcatcggccaaagatggcgaatcaaagctattgttattgcgataggccatgaataaatccggtttcatttttcgaatgggtgtcgccgggaactccaacggatacactggcttcacattattattgttgtgctcgcactcattggtgccattgggcacgtttttcgtcggttttggtgagctggtcgcctccgccaatggactaaagagcactctgcgtcctgagtggactggactcgagtttccagcacttcggtcaaagatcgacttgcttggggttactttcaccggcgagctaaatggtgaaccagccagcggcgacatcacattgttgctgacccgcggtggtgtcttccaacggcgatagaagttcatggccttttcgcgggacatgggtcccgccagcgcactgattgccaggtccacgctgaggccctcgtaatcgtccgctttgtgttgcaggttctgtaaagtataagcaaaaatatatatatcaatgcgtcgttaattgtttcatgttatgtgggatcctcaataaataactaattagtttatcactctcttagtcgtaatgttgttttctcatacttataacaaatgcaataataaagtattttcttaacggtgggaaattatacaaacaattcgcctgagaaactaaacgtatgttgttcatcgtcaaataattgtaccaatgagaatttaaaattattagtaagcagaataatgtaaaacagttactaaccggtggatctttgggcgagaacggttgacccacttttggcggcagtgtatttgactgggatcttagtacgggcacaaaatgcggatcgtacaagagcagctccagcttcttgatggtcacatgtgtagcattagcattacgcaggcagatgatctgcaggggggagaacaggttacaatatgataatagcgattccttcgcccttttgtgactccaaactcgcaactcacttccttgggctccttgccctcatgattccgcagcgatttgcactccggataggaaacgagaacctcgaccatggccacatgaccgttctttgcggcaaagtggagcggtgtttcgccgcgccccttgtccggcatgttcaggtaatagtccaggagactgatgttgagggcagcacacatcttgccactgcccttcttgccaacgtaaagctgagtgaactcccgatccgaaatggtctttaacagcaactgagcgatcctggccttattgacctgggcgcagatgtgcatggcattatagcgacagccctccttcaaactggtgggcgtatcaccgctgctgatcaaaaatcgtggattctcccatataatcctcttcacccggtctatgtgaccaccttcgatttgcttgcgaaactctaccagttcctgtttggtgggcgcccggaaaggagggccttctccggacacatccggctgctgcggctgctgctgctgttgctgctgcatctgctgctgtcgcccattggcaatgacgttgctggagctgctcggcgaggaagtcggtgagtcactgagcagtaaattcgacattgaggaattgcttcccaggggaatgatgaagccactgccgttacccgtcggcgaggaggagcacgaattgtccgtcgaggtcggtgagctcttgtaaccgctaccgctgattatcggaatgggctctgaaaaaataatacagcgcataagttaaatcactgggtaagcaattatatagctagctatactatgtactcactgctttcgggctttgccttgcaaaatctcttgagcgcctcgatgctctcgaacccaaactgaacgtaactctccgcctgctccagattgggaaactcgcggaggcgcgcctccttgtagtgtcgcaggatgtccagcgccttggatttctccgtgaagatcagccacagtggcgagtccgctgctccgtcgtggcgatggcaatgttgatgtgtgggcatcgagagggataaaccattaataaatgagctggctgttttggtcacgccatcggtttggcgaatggcgaatagcgaacgagtgtcgaatgccagacgggtggaggattgtctcgagcaaaacaaaatcaaaacaagctatgctaaagggggcgttgggtgggcagtgggccgtggggcatatgcgtgtgacgcagtggttggcacaacgccggcaaaattttccgaggccctgccttatcaggagtagcaacagttttgctcgcagattgtcacagatttcaaagatatgtatttccaatacaaacgtggatggatcggaatcgaatgattacattatttagggtttataaaagcactctaagcagcttgccagacactttgaaagcctatgatcacttgtggctaactaacccatttaaatagcacttgttgaatttataaaaaacaaaagcagatatatttagcacacagctgcggcgtacaaacatttcatatatttctcttaacattacctctcgaaattagcgagtgtgccataattaaatttactttcgacccttcgcaatgtgctagcaaaacaaaaacagaaataaaactacaagcaaaaacaccgcagccttggtggtaaagttctaatcaaagatctgagataaaagctcaacatacacatagcatgtagaactaacaacaagtgttggccaatagggagcacgtatgaaagttcaattaaaaggcataaaacatttgctattagattaattggacactaattaggcgtgtttcgatttttatattatatataaggaataaggagattgctttagttatgattactttgaaatattaggaaagtaatttgtaattaaagcaatttaagcacctgtgcttaaattgcttaaagcaatttagttattgcttatttataacatgttataacatattatcccaatcgtagggtatctcataggtcggcgttattgggttttacggaactttgctctcttatttttgcgcgttgacttgggccaaaagacaggga

SEQ ID NO: 18383 - DNA, 3483 bp, DROSOPHILA
aaaacagccagctcatttattaatggtttatccctctcgatgcccacacatcaacattgccatcgccacgacggagcagcggactcgccactgtggctgatcttcacggagaaatccaaggcgctggacatcctgcgacactacaaggaggcgcgcctccgcgagtttcccaatctggagcaggcggagagttacgttcagtttgggttcgagagcatcgaggcgctcaagagattttgcaaggcaaagcccgaaagcaagcccattccgataatcagcggtagcggttacaagagctcaccgacctcgacggacaattcgtgctcctcctcgccgacgggtaacggcagtggcttcatcattcccctgggaagcaattcctcaatgtcgaatttactgctcagtgactcaccgacttcctcgccgagcagctccagcaacgtcattgccaatgggcgacagcagcagatgcagcagcaacagcagcagcagccgcagcagccggatgtgtccggagaaggccctcctttccgggcgcccaccaaacaggaactggtagagtttcgcaagcaaatcgaaggtggtcacatagaccgggtgaagaggattatatgggagaatccacgatttttgatcagcagcggtgatacgcccaccagtttgaaggagggctgtcgctataatgccatgcacatctgcgcccaggtcaataaggccaggatcgctcagttgctgttaaagaccatttcggatcgggagttcactcagctttacgttggcaagaagggcagtggcaagatgtgtgctgccctcaacatcagtctcctggactattacctgaacatgccggacaaggggcgcggcgaaacaccgctccactttgccgcaaagaacggtcatgtggccatggtcgaggttctcgtttcctatccggagtgcaaatcgctgcggaatcatgagggcaaggagcccaaggaaatcatctgcctgcgtaatgctaatgctacacatgtgaccatcaagaagctggagctgctcttgtacgatccgcattttgtgcccgtactaagatcccagtcaaatacactgccgccaaaagtgggtcaaccgttctcgcccaaagatccaccgaacctgcaacacaaagcggacgattacgagggcctcagcgtggacctggcaatcagtgcgctggcgggacccatgtcccgcgaaaaggccatgaacttctatcgccgttggaagacaccaccgcgggtcagcaacaatgtgatgtcgccgctggctggttcaccatttagctcgccggtgaaagtaaccccaagcaagtcgatctttgaccgaagtgctggaaactcgagtccagtccactcaggacgcagagtgctctttagtccattggcggaggcgaccagctcaccaaaaccgacgaaaaacgtgcccaatggcaccaatgagtgcgagcacaacaataataatgtgaagccagtgtatccgttggagttcccggcgacacccattcgaaaaatgaaaccggatttattcatggcctatcgcaataacaatagctttgattcgccatctttggccgatgactcccaaatcctggacatgagcctaagccgcagcctgaatgcgtcgctaaatgacagcttccgtgagcggcacatcaagaacactgatatcgagaagggtctggaggtggtcggccgccaactggcacgacaggagcagttagagtggcgcgagtactgggattttctcgattcatttttggacattggtacgaccgaaggcctggcccgtcttgaagcgtatttcctggaaaagaccgaacagcaggcggataaatcagaaacggtctggaactttgcccatctgcatcagtatttcgattcgatggccggcgagcaacagcagcaactccgaaaggataaaaatgaggctgcgggagcaacttcgccatccgccggagtcatgactccgtacacatgcgtagagaagtcgctgcaagtgttcgccaagcgcatcactaaaacgttgatcaacaaaatcggcaacatggtgtccatcaacgacacgctgctctgtgagctcaaaagactgaaatcgctgattgtcagcttcaaggatgatgcccgcttcattagcgtggactttagcaaggtgcattcacgtatcgcccacctggtggccagctatgtgacccactcgcaggaggtcagcgtagccatgcgtctacaattgttgcagatgctccgaagtttgcggcaactgctggccgacgagcgtggtcgagaacagcatttgggctgcgtgtgcgctagtctattgctgatgctggaacaggcgccgacatccgccgtgcatctaccagacactctgaagaccgaggagctatgttgcgccgcctgggagacggagcagtgttgcgcctgtctgtgggacgcaaatctcagccgtaagaccagtcgtcgaaagcgcactaagtcgctgcgggcagctgctgttgttcagtctcagggtcagcttcaggatacttcgggatcgacagggtcgtccgccttgcacgcttcgcttggtgtgggatcgaccagtttgggagcatcgagggtcgtggcgtccgcttcgaaagatgcttggcgccgtcaacaaagcgacgacgaggactacgacagcgatgagcaagtaatctttttcgactgcactaatgttacgctgccttatggaagcagcagcgaggacgaggaaaacttccgtacgccgccgcaaagcttgtcgccaggtatttccatggatttggagccgcgttacgagttgtttatttttggaaacgagccaaccaagcgagatttggatgtgctgaatgccctttccaatgtcgacattgataaggaaacactgccgcatgtctacgcctggaagactgccatggagagctactcctgtgctgaaatgaatctgaacgtcaaggttcaaaagccggagccttggtattctggaaccagttctagccacaacagccaaccattgttgcatcccaagcgtctgcttgccacgccaaagctgaatgccgtggtcagcggcagacgcggatccggaccattgacggcgccagttacaccgcgtctggcgcgaactccgtccgccgccagtattcaagttgcatccgagacgaatggcgagtcggtcggaactgctgtgactccggcatcgccgattttgagttttgccgccttgacggcagcgacgcagtcattccaaacaccattgaacaaggtgcgcggcttgttcagccaatatcgggatcaacggtcctataacgagggggacacgccgctgggcaatcggaactgaaacggaatcggcccggaaacagaaacagaaacagcgactgattgatgaaaggccgactgcatacttacccccctgaatagccggtgtcgtccattgtcccttttaatgttaatcgcatgtatatta

SEQ ID NO: 18384 - protein, 1105 aa, DROSOPHILA
MPTHQHCHRHDGAADSPLWLIFTEKSKALDILRHYKEARLREFPNLEQAESYVQFGFESIEALKRFCKAKPESKPIPIISGSGYKSSPTSTDNSCSSSPTGNGSGFIIPLGSNSSMSNLLLSDSPTSSPSSSSNVIANGRQQQMQQQQQQQPQQPDVSGEGPPFRAPTKQELVEFRKQIEGGHIDRVKRIIWENPRFLISSGDTPTSLKEGCRYNAMHICAQVNKARIAQLLLKTISDREFTQLYVGKKGSGKMCAALNISLLDYYLNMPDKGRGETPLHFAAKNGHVAMVEVLVSYPECKSLRNHEGKEPKEIICLRNANATHVTIKKLELLLYDPHFVPVLRSQSNTLPPKVGQPFSPKDPPNLQHKADDYEGLSVDLAISALAGPMSREKAMNFYRRWKTPPRVSNNVMSPLAGSPFSSPVKVTPSKSIFDRSAGNSSPVHSGRRVLFSPLAEATSSPKPTKNVPNGTNECEHNNNNVKPVYPLEFPATPIRKMKPDLFMAYRNNNSFDSPSLADDSQILDMSLSRSLNASLNDSFRERHIKNTDIEKGLEVVGRQLARQEQLEWREYWDFLDSFLDIGTTEGLARLEAYFLEKTEQQADKSETVWNFAHLHQYFDSMAGEQQQQLRKDKNEAAGATSPSAGVMTPYTCVEKSLQVFAKRITKTLINKIGNMVSINDTLLCELKRLKSLIVSFKDDARFISVDFSKVHSRIAHLVASYVTHSQEVSVAMRLQLLQMLRSLRQLLADERGREQHLGCVCASLLLMLEQAPTSAVHLPDTLKTEELCCAAWETEQCCACLWDANLSRKTSRRKRTKSLRAAAVVQSQGQLQDTSGSTGSSALHASLGVGSTSLGASRVVASASKDAWRRQQSDDEDYDSDEQVIFFDCTNVTLPYGSSSEDEENFRTPPQSLSPGISMDLEPRYELFIFGNEPTKRDLDVLNALSNVDIDKETLPHVYAWKTAMESYSCAEMNLNVKVQKPEPWYSGTSSSHNSQPLLHPKRLLATPKLNAVVSGRRGSGPLTAPVTPRLARTPSAASIQVASETNGESVGTAVTPASPILSFAALTAATQSFQTPLNKVRGLFSQYRDQRSYNEGDTPLGNRN

SEQ ID NO: 18385 - DNA, 5173 bp, DROSOPHILA
ttctgtaagtaatatagataatacagattatacaggttaaaagttttttaatttacttaccccacgaattccaggttattaaaaatgaacgtcttgttgacatcgaatccaatggccacaatatccttggcgttttcacgtccaagcttgatggcatcctccactttcagatccttccacaaggtcttctcgtcgtcggtcaattgaataaccagcggcacatcaaaggtctcctgcagccacttggtcatgatgaagggcaccaggtggcccacgtgcagggatccggaactgggaccgcgaccagtgtacaaatagaagggtttgccctgttcgcgcagtgttagaatcgtatgaagatcccggtgcgagaagaacatgccccttcggatgaagtggtgggcgggctttcccgtgattttctcgaaacgcgcgataagctcctcatcgattttgctggagccaaaccgttctgcaacgtgtcaacatgtcgtttgattaacttgattaataatttgccttgcaaatgtcttcttacttatcagcttatcatagtcgacgcccgcgtcattactactggccacattccatggatccacaacatcttcagtgggtgcagtggctccctcctgtgcctgggcatccgtgcccgtttccacgggttctgcgtccggttttccatttagtgtcaacgcctccacgccctccacaaccgtctccttggtgtccgccattctgtcagtctgattgttaagaatttaacagataatttaatactggccagtgtaattgggcccttcacatgtgaaatgaggcgcttattagtgtcccaaccatcgattacaccatcgattatttcatctgctctcctgttaatggtaattgttatgctcaatttcaactgttaaaaatatcgataatgagaaatatcgatggattgcaaatttgctattgagtgacaactctggaaaatcagctgttgcgctgcaaactgtgggtgaaaaatgcaagcggataagactaatgtttttcgattaaaataaggaactaataactcagacaacatgcctatcatgtacaacacgggggagtggttcaaggtgcgaccggactactacaggtgggtaatcctaatccatccgttctatacaaaccaactgaaggatacgcccattaatcccattcacagaaaagtggaactggctacgcctgattggcctctggacctggacttggagtatatgtgggtggaagtggctccctatggaggaccactggcggtcactcgtgatccgaccaaattggtgccggtaaagggtaacgctagacccatgattcgcatctttgataccaccggcagggaaatgggtcacatattggtgagttaatcgaaagtaagaaatattatctcaaatattgaaatcaccgtagtggaaccatggcaaacttattgccatgggctggtcagacatggaggagcttatctgcatccaggagaacgccaccgtctttgtctacgacatgtttggtcgggaaaaggagtcctacagcatcggcgatgaggccagtgtcacaaagattgtggagggcaaggtgttccagtcctcagctggcacaggagtggctgtaatgaccacatccggtcgggttttcctcaagcagaacagcagcaagactgaaagaaagctgccggatattcccagtaagaaaaccattgaaataccaaaagaatattatgtcattgctcaacagattccagcatgaactgttcctgctgggagatcgtaaccgagggacgcaacagctactgtctgctgggaagggatcgagaggtcataaagctgtttccaggcgaaactgtgggaactattaccgccaatctctttgagaaaccgcacgagcgaatcataaagatatctgtgtcgtacaaccatcagcacttggcactgtacaccaacaccggtcttctttggctgggcagcgtagatatgcggcaaaagtattgtgaattcgacaccggacgtaaagatatgcccctccaaatggagtggatcatgaactctgacaacagcgaggcggatgcggtggtcatttcatatccatcgtacctcttaattgtaaatcgtaacgctgatcgcagtgactttccctacgatccggtgatgtttcttgtggctgaaatggatggcgttcgcattattactcagagttcgcatgaaataatacagcgcctgccaaaatgcgttgagaacatatttgcagtgaatagccaggaaccggctagctatctctttgaggcacagaaaaagtttgaggagaagtcctacaagtcggatgagtatctcagcatgtgtcgggaaaagatcgatctggcagtgtccgaatgtattgaggcggcttcatatgagttttgtccggaaactcaaaagagcttgcttagggtaagatagtcatggacttcttatatttataaattataaccactcgatttctttttagacggcctattttggaaaaggctttattcgtaaccacaatccagatgaatatatgcgtattatgcgaatactgagggttcttaacaccttgcggcatgagcgaattgccatgcccatcaccttcaaacagtaatcatctttttaacttttattattggtttcatcaatacttttttttcagattctcacatcttaataccgaggtcatactcagccgtttggtattccgcaaacactatgccattgcgatacaagtggccaagcatttaaatctgcccgaatcgtggatcttggaacactgggcttaccataaagtgatgaatgatcccagtgagttattgtccttttatctttagaactgatagttacaaactttttattttaagatgatactgaagtggcgcgtaagataactgaaaagttcaagaatccgtcggtcgagggaatttctttctgcaatattgcgtcaaaggcgcatcaagctggacgagatgacctggccattaagctgctagagctcgagtctcgtgcttcgcttcacgtaccactacttctgaagatgcgcaagtttgatcgggcggtgggcagtgccacacagtccggcgatacagagttgatcacccaagttctcttggagatgaaaatgcacatgatgctgtccaatttgcacgtaagtctagcatatgaatctttgaataagtgtgttttagtgatgtaattattgaataatatttctagatgactattagggaccatccactggctctaaacatatacaaaaagataatgcgggagtccaacagagctggactctatgggatttacaacaccgaagacgaccaaaaggccatcgctgagtatcacttccagaatgccattgaaactgaaggattggagtcgaatctttcgatgattggaaacgcctatgcccagggccgttgcacattggaagcggagctttgtgcggataccagccgattgattaagctgcaaaagactctaagcaccaagtataatgtcagcttaaatggcttgtcaatacatgagaccattcaagaattactgctgatcggcgaattgaaagaggcagagcgaatcagaagcgaatttaaagtgcccgatcgtcggttctggtggctacgaatcctcacactttctagtcaacacaagtgggaggagttggaaaagttagctaaaagtaaaaagagccccattggctacgatccttttgttgaggtctgcttaaaacaggacaatgtaatggaggcccgaaagtatataccaaggtgtcgggacaatcgccgggtcgtctggtatatgcgagcaaagtgagtatccttatatgcttacctatccctttaacggtagcacaactttctttttgatagcctatttaacgaagccatagattccgccttcgagcagcgtgatgtgcacagtctctttgagttgcaaaagaaccaggcgatcgttaacaatggcacactgttgagcaaagtttgcgattgcattgccatgctggagggaaagtagtcaaaacattcgtattcataaacaattattcatgtctatacgaatagcactcttaagcttattcggtattgtcaatcaggacgtgctcttgataaaagtaattatgctcgtaataaatataaattattttgtaaataaaatcaaaaaatgcaataatcattcgcttaaaggtattaaacgaagtgtgtgtgatgcaaaaaatgttaggatataacgtagtttatttcttattcctcacctccgagttgaaggcataaaactcaccggcctgttttcccaaaagttacatccatccctctgtcatcctgtcccactaaaaaccaaccactgagccgaggccagtaactataaacccagttaacgcacacacaatttgctgttgtcctttgcataagtaactcagcttcgcttggccccccgcaatttgtagacaattttgttatacggaccataaacgcgaattcccgatgctcgacgcctgtgtaaataaaatttataatcagtgccacatccaaggctcaaaggaagccaaggaaaaagtgtacttttgtgacgacactcggccccatcttactttttttttccttcctatttttttggtaggatagccgggctctgtgaacgcaaaatggcgaatgttgacgcctttattgggttcaaagtgtgaatggcgtcatggtgcaggggaggaataggcacaggcacatttggggctgccggccgagctgtaagtagttgacattgctcctaaacacgtttgccagccgcagagagacgaagaatgggaggctggaaaatgtgactgcaggggaagccaagctggcaacacgaaattccaattagtcttcattttaagcaaatttaacacacactccctttttcttttttttttttcctttttcaccctgccaattttgaaagcggcaaccacattcatacccgttctgatgtcctgatagcaaacattttggccactatttatgtgcgattcaatgttcgattcggcttggccgtgtagcctgtaagccgaatttatttggcaattttcgggcgttgtttaaaaatcgcttttgctgacagtcgaaaaccattggtggttttttctgcctgcggtttttcgggcctcaactgcgacattttcg

SEQ ID NO: 18386 - DNA, 2708 bp, DROSOPHILA
aaaaatgcaagcggataagactaatgtttttcgattaaaataaggaactaataactcagacaacatgcctatcatgtacaacacgggggagtggttcaaggtgcgaccggactactacagaaaagtggaactggctacgcctgattggcctctggacctggacttggagtatatgtgggtggaagtggctccctatggaggaccactggcggtcactcgtgatccgaccaaattggtgccggtaaagggtaacgctagacccatgattcgcatctttgataccaccggcagggaaatgggtcacatattgtggaaccatggcaaacttattgccatgggctggtcagacatggaggagcttatctgcatccaggagaacgccaccgtctttgtctacgacatgtttggtcgggaaaaggagtcctacagcatcggcgatgaggccagtgtcacaaagattgtggagggcaaggtgttccagtcctcagctggcacaggagtggctgtaatgaccacatccggtcgggttttcctcaagcagaacagcagcaagactgaaagaaagctgccggatattcccaattccagcatgaactgttcctgctgggagatcgtaaccgagggacgcaacagctactgtctgctgggaagggatcgagaggtcataaagctgtttccaggcgaaactgtgggaactattaccgccaatctctttgagaaaccgcacgagcgaatcataaagatatctgtgtcgtacaaccatcagcacttggcactgtacaccaacaccggtcttctttggctgggcagcgtagatatgcggcaaaagtattgtgaattcgacaccggacgtaaagatatgcccctccaaatggagtggatcatgaactctgacaacagcgaggcggatgcggtggtcatttcatatccatcgtacctcttaattgtaaatcgtaacgctgatcgcagtgactttccctacgatccggtgatgtttcttgtggctgaaatggatggcgttcgcattattactcagagttcgcatgaaataatacagcgcctgccaaaatgcgttgagaacatatttgcagtgaatagccaggaaccggctagctatctctttgaggcacagaaaaagtttgaggagaagtcctacaagtcggatgagtatctcagcatgtgtcgggaaaagatcgatctggcagtgtccgaatgtattgaggcggcttcatatgagttttgtccggaaactcaaaagagcttgcttaggacggcctattttggaaaaggctttattcgtaaccacaatccagatgaatatatgcgtattatgcgaatactgagggttcttaacaccttgcggcatgagcgaattgccatgcccatcaccttcaaacaattctcacatcttaataccgaggtcatactcagccgtttggtattccgcaaacactatgccattgcgatacaagtggccaagcatttaaatctgcccgaatcgtggatcttggaacactgggcttaccataaagtgatgaatgatcccaatgatactgaagtggcgcgtaagataactgaaaagttcaagaatccgtcggtcgagggaatttctttctgcaatattgcgtcaaaggcgcatcaagctggacgagatgacctggccattaagctgctagagctcgagtctcgtgcttcgcttcacgtaccactacttctgaagatgcgcaagtttgatcgggcggtgggcagtgccacacagtccggcgatacagagttgatcacccaagttctcttggagatgaaaatgcacatgatgctgtccaatttgcacatgactattagggaccatccactggctctaaacatatacaaaaagataatgcgggagtccaacagagctggactctatgggatttacaacaccgaagacgaccaaaaggccatcgctgagtatcacttccagaatgccattgaaactgaaggattggagtcgaatctttcgatgattggaaacgcctatgcccagggccgttgcacattggaagcggagctttgtgcggataccagccgattgattaagctgcaaaagactctaagcaccaagtataatgtcagcttaaatggcttgtcaatacatgagaccattcaagaattactgctgatcggcgaattgaaagaggcagagcgaatcagaagcgaatttaaagtgcccgatcgtcggttctggtggctacgaatcctcacactttctagtcaacacaagtgggaggagttggaaaagttagctaaaagtaaaaagagccccattggctacgatccttttgttgaggtctgcttaaaacaggacaatgtaatggaggcccgaaagtatataccaaggtgtcgggacaatcgccgggtcgtctggtatatgcgagcaaacctatttaacgaagccatagattccgccttcgagcagcgtgatgtgcacagtctctttgagttgcaaaagaaccaggcgatcgttaacaatggcacactgttgagcaaagtttgcgattgcattgccatgctggagggaaagtagtcaaaacattcgtattcataaacaattattcatgtctatacgaatagcactcttaagcttattcggtattgtcaatcaggacgtgctcttgataaaagtaattatgctcgtaataaatataaattattttgtaaataaaatc

SEQ ID NO: 18387 - protein, 833 aa, DROSOPHILA
MPIMYNTGEWFKVRPDYYRKVELATPDWPLDLDLEYMWVEVAPYGGPLAVTRDPTKLVPVKGNARPMIRIFDTTGREMGHILWNHGKLIAMGWSDMEELICIQENATVFVYDMFGREKESYSIGDEASVTKIVEGKVFQSSAGTGVAVMTTSGRVFLKQNSSKTERKLPDIPNSSMNCSCWEIVTEGRNSYCLLGRDREVIKLFPGETVGTITANLFEKPHERIIKISVSYNHQHLALYTNTGLLWLGSVDMRQKYCEFDTGRKDMPLQMEWIMNSDNSEADAVVISYPSYLLIVNRNADRSDFPYDPVMFLVAEMDGVRIITQSSHEIIQRLPKCVENIFAVNSQEPASYLFEAQKKFEEKSYKSDEYLSMCREKIDLAVSECIEAASYEFCPETQKSLLRTAYFGKGFIRNHNPDEYMRIMRILRVLNTLRHERIAMPITFKQFSHLNTEVILSRLVFRKHYAIAIQVAKHLNLPESWILEHWAYHKVMNDPNDTEVARKITEKFKNPSVEGISFCNIASKAHQAGRDDLAIKLLELESRASLHVPLLLKMRKFDRAVGSATQSGDTELITQVLLEMKMHMMLSNLHMTIRDHPLALNIYKKIMRESNRAGLYGIYNTEDDQKAIAEYHFQNAIETEGLESNLSMIGNAYAQGRCTLEAELCADTSRLIKLQKTLSTKYNVSLNGLSIHETIQELLLIGELKEAERIRSEFKVPDRRFWWLRILTLSSQHKWEELEKLAKSKKSPIGYDPFVEVCLKQDNVMEARKYIPRCRDNRRVVWYMRANLFNEAIDSAFEQRDVHSLFELQKNQAIVNNGTLLSKVCDCIAMLEGK

SEQ ID NO: 18388 - DNA, 4768 bp, DROSOPHILA
tccacgcccaaacggactgccggttgctttgtaatgttggctgctgctatcatttgctgcgggagcgctattcgcagcaggagttctttggcaataagtccctgatggagctgcaaacagactatggattcccattgagtcagtacctgcgggagcgacaagtgcgaatgggtcgcaatgcgcggatgctggcggcccagtcaattgaacgcaccttggacaccaaggagctgcctaatgtaacgctctactatcgagctctcttggagattctggtttgccgccatgcgccggagctgaaaaacgaactgcaggtgggcaaggtacggaaattcgagagtttcgaggagtacattcaaaagtgtgccaccaaattggatgctccctggttggcagctgttgagaaagaagaacttcaatccctgctccaggaatatgccgtgcataaatacttcttggatctgttctatctgctgcgcatgtcctttgctccggtgctggagagtctaattctcctggatcgcctgctctacctcaaggaacttggctatgaacgcagctatctgatagatttatttgatcccgtcatttcgcccaggcattttgcaattgtttctataaagcagcaaacgcaacaataatgaaattcacaaatgcatcaaaagcttgacgagaaagccggttgtgtttaattatttatagattatagcgtgcaatacttttcatatcgtatatgtattgcgttaacgcttttaaaaatctaactaaaccatagcacacaaaaagtaaataaggttgttaaaactaagaatcattataataaatgtaatcatgacttgtaattatcttagagtccctctggatttgctgtggtttgtttgtcgtattttaaagctttttccaccacacaggtgaatttataagtatgcacttgaaattgctatctcagaacttttgagactttcgagtataaaaacgcaaacaacatttcaaatcgccccaagtgcggtgcgtagagctttaattgtcggttgtgtacgcgggtgctcagaatttatagatccaataaaagtttccttgaaattgctggacaaacttgttgcgaattaggccagttgcaaataaattgtgtgactaaaaaaacctgtatattttcaaagtaagttatgaaattcggtatacaaaattgtatattttaatttgaaaaagtgtgatatccttgaaaaaaccacacttaatatggaattgagggcaactgtgaaaattaagattacttggttactgttactgttactaaaataaatagagaactggtttctaagaaatatattttggacatttgctctatagaaatagtagtctcatgtataattaataaagcttaggacgaaatccttgctggcaaatttttagtgtcatatttgctgcccgaaaagattttctatttagctttacaagcagcttaattgggtgtagatatggcgggaattactataagcgtatcataaacactcattgtaatgctccctatcataactaattgtaattcgcgttggaatggaaaagataatgccagctaaaaataattaagacggctgatttaataaaatctaggtaaacatgggtagcaaaacactctagattgcatttgaaaccatcgaccgtttcaaatgcgatcgagataagataatgctgagggcactggcatttgattaattgttttagcgattaatttcagagtggcgatacccattacatcgacatccccaaaatggtgttgaccgaggtcctctttgtggtggtcgccgcactggtggcgctctacacttggttccagcgcaaccatagctactggcaacgcaagggcataccctatattccgcccacgccgatcattggcaacaccaaggtggtcttcaagatggagaactcctttgggatgcacctatcggagatatacaatgatccgcggctgaaggacgaggctgtggtgggcatctactccatgaacaagcccggcttgataatacgcgacatagagctgatcaaatccattctgatcaaggacttcaatcggttccacaaccgatacgcccgctgcgatccccatggcgatccattgggctataataacctgttcttcgtcagggatgcccattggaagggaattcgcaccaagctgactcccgttttcaccagcggcaaggtcaagcagatgtacacccttatgcaggaggtaaggatttgtgttgaaacttatttatccttatgagggatttaacatacatatatgctgtgcagattggaaaggatctggagctggcactgcagaggcgtggagagaagaactctgggagtttcattacggagattaaggagatctgcgctcagttctccacggacagcatagccacgattgcatttggcattcgtgctaacagcctagagaatcccaacgcagagttccgtaactatggacgcaagatgttcaccttcaccgtagcgcgtgccaaggacttctttgtggccttcttcctgcccaagctggtgtcgctgatgcgcatccagttcttcacggcggacttttcccactttatgcgcagcaccattggtcacgttatggaggagcgagagcgatcgggcctgctccgcaatgatctcatagatgtcttggtgagtctgcgcaaagaggcggctgccgagccttcgaagcctcactatgccaagaaccaggacttcctggtggctcaggcgggcgtgttttttacggcgggtttcgagacctcctcctcgaccatgtcttttgccctgtacgagatggccaagcatccagagatgcagaaacgcctgcgcgacgagatcaacgaagctttggtggagggcggtgggtcattgagctacgagaaaatccagtccctggagtatctggccatggtggtggacgaggtgctgcgcatgtatccggtgctgccgttcctggaccgcgagtacgagagcgtggagggacagccagacttgagcctgaagccgttctacgactacactctcgagaacggaacccctgtgttcatacccatctatgcactgcatcatgatccaaaggtattccatcacattgagaagttcataagccccctcctctaactatctggttattcctagtactggaccaatcccagccaattcgatccggagcgtttctcacccgcgaaccgcaagaacatagtggccatggcatatcaacccttcggatctgggccgcacaactgcattggcagccggattggcctgctacagagcaaactgggactggtcagcctgctgaagaatcactcagtgcgcaactgcgaggccaccatgaaggacatgaaattcgatcccaagggtttcgtgctccaggcagatggtggcatacatttggagatagtcaacgatcgcctctacgatcagagcgctccatcgctccaatgaatttgaatcgcatgaactgtgtgatctgtatggatacacatatggatacatatatgtacatatatggaataagtgattagttgatggggcaatcgccttctgacagctggcatttgcctgacttatgatgcagattatataatgataatccgtgtgttagaagcggcgcctagagtctactaaataaaaacaaaatcattatcaaattacatttaatctgcgtgctgagcagctagcagctactcaattgcgccaccaataaataaatgcaataaatgctatctttacgattataaatccagttcaaaggcatctcccaaatgtaacaaataacccaatagctctcatctgtggaataagtagagtctatacagatacgcttggatcttggagatgtattatatatgtatggatagtattgcattcactattcaccggcgatggaacacgcaatttgccaatcaaattgcctttaagatgcgacaccagctcaattttaaatccccaaacacgcgactccgctgcttagtttccattcagttgttgtaggctccatagtctcaccacccaggaaagaagtatccagattatcccatatcccatattcaggtgagttagacgcccaaagcatcgcgaaccagccgtaggtggatgccgcccttggcttgggttatgatggccttgggatccagctgcatgcgatggggtgtgcgctccgaggtggttatcatgtggttgcgcagcaggttaaccagacccaccttcgcctggagatatccaaaacgttctccgatgcagccatgcggacccaggccgaagggcatgtaggtgtagggcgtgtggagcttgcgattctcgggcgagaatctttcaggcagaaattttcgcggttgaggaaagtactggaaaagggtagtcgttgggtaatgtatgcaaaatgtatctcaacccacctggggatccatgtgcagggcatagcagggtatataaacgggcatgcccttgggcaccacgaactttttgtggaacggagccagcgagtaatccctcccagaagtgcactcgcgatccaaaaacggcagtggcggatacatgcgcagcacctccagcagaatcatttgcatgaactccagtgactcgatcatcttcagcgtcacctgacctccactttcgaccagtgcatccttgatctcctcccgcaggcgctgctgtacgtccgtatccttggccaactcgtacatcgcgaacgccatggtcgaggaggaggactcaaagccggcggtgaagaagagtaccg

SEQ ID NO: 18389 - DNA, 2064 bp, DROSOPHILA
caagtgcggtgcgtagagctttaattgtcggttgtgtacgcgggtgctcagaatttatagatccaataaaagtttccttgaaattgctggacaaacttgttgcgaattaggccagttgcaaataaattgtgtgactaaaaaaacctgtatattttcaaaagtggcgatacccattacatcgacatccccaaaatggtgttgaccgaggtcctctttgtggtggtcgccgcactggtggcgctctacacttggttccagcgcaaccatagctactggcaacgcaagggcataccctatattccgcccacgccgatcattggcaacaccaaggtggtcttcaagatggagaactcctttgggatgcacctatcggagatatacaatgatccgcggctgaaggacgaggctgtggtgggcatctactccatgaacaagcccggcttgataatacgcgacatagagctgatcaaatccattctgatcaaggacttcaatcggttccacaaccgatacgcccgctgcgatccccatggcgatccattgggctataataacctgttcttcgtcagggatgcccattggaagggaattcgcaccaagctgactcccgttttcaccagcggcaaggtcaagcagatgtacacccttatgcaggagattggaaaggatctggagctggcactgcagaggcgtggagagaagaactctgggagtttcattacggagattaaggagatctgcgctcagttctccacggacagcatagccacgattgcatttggcattcgtgctaacagcctagagaatcccaacgcagagttccgtaactatggacgcaagatgttcaccttcaccgtagcgcgtgccaaggacttctttgtggccttcttcctgcccaagctggtgtcgctgatgcgcatccagttcttcacggcggacttttcccactttatgcgcagcaccattggtcacgttatggaggagcgagagcgatcgggcctgctccgcaatgatctcatagatgtcttggtgagtctgcgcaaagaggcggctgccgagccttcgaagcctcactatgccaagaaccaggacttcctggtggctcaggcgggcgtgttttttacggcgggtttcgagacctcctcctcgaccatgtcttttgccctgtacgagatggccaagcatccagagatgcagaaacgcctgcgcgacgagatcaacgaagctttggtggagggcggtgggtcattgagctacgagaaaatccagtccctggagtatctggccatggtggtggacgaggtgctgcgcatgtatccggtgctgccgttcctggaccgcgagtacgagagcgtggagggacagccagacttgagcctgaagccgttctacgactacactctcgagaacggaacccctgtgttcatacccatctatgcactgcatcatgatccaaagtactggaccaatcccagccaattcgatccggagcgtttctcacccgcgaaccgcaagaacatagtggccatggcatatcaacccttcggatctgggccgcacaactgcattggcagccggattggcctgctacagagcaaactgggactggtcagcctgctgaagaatcactcagtgcgcaactgcgaggccaccatgaaggacatgaaattcgatcccaagggtttcgtgctccaggcagatggtggcatacatttggagatagtcaacgatcgcctctacgatcagagcgctccatcgctccaatgaatttgaatcgcatgaactgtgtgatctgtatggatacacatatggatacatatatgtacatatatggaataagtgattagttgatggggcaatcgccttctgacagctggcatttgcctgacttatgatgcagattatataatgataatccgtgtgttagaagcggcgcctagagtctactaaataaaaacaaaatcattatcaaattacatttaatctgcgtgctgagcagctagcagctactcaattgcgccaccaataaataaatgcaataaatgctatctttacgattataaa

SEQ ID NO: 18390 - protein, 524 aa, DROSOPHILA
MVLTEVLFVVVAALVALYTWFQRNHSYWQRKGIPYIPPTPIIGNTKVVFKMENSFGMHLSEIYNDPRLKDEAVVGIYSMNKPGLIIRDIELIKSILIKDFNRFHNRYARCDPHGDPLGYNNLFFVRDAHWKGIRTKLTPVFTSGKVKQMYTLMQEIGKDLELALQRRGEKNSGSFITEIKEICAQFSTDSIATIAFGIRANSLENPNAEFRNYGRKMFTFTVARAKDFFVAFFLPKLVSLMRIQFFTADFSHFMRSTIGHVMEERERSGLLRNDLIDVLVSLRKEAAAEPSKPHYAKNQDFLVAQAGVFFTAGFETSSSTMSFALYEMAKHPEMQKRLRDEINEALVEGGGSLSYEKIQSLEYLAMVVDEVLRMYPVLPFLDREYESVEGQPDLSLKPFYDYTLENGTPVFIPIYALHHDPKYWTNPSQFDPERFSPANRKNIVAMAYQPFGSGPHNCIGSRIGLLQSKLGLVSLLKNHSVRNCEATMKDMKFDPKGFVLQADGGIHLEIVNDRLYDQSAPSLQ

SEQ ID NO: 18391 - DNA, 8974 bp, DROSOPHILA
ccacgtacctgccccacctgcctctgctccagttgacaaaagaagaggagcagaaaccaaaagacaccaacgaagaagcacttcgatgggcacgtggcgaaccgatgataccctatggtatcagtctctaaaaataatgagcatgttaaaaaaagtaacagtaaagcaactgatattagtttaaatgtaccgtatttactgcatacctcaaatttgtagaagcttacagagcgatgagtatctgagcgtcgactatcgcataccttctgtttttggccttcgtatattatccttatgctgagaaaatggtaaatttcatgggtcatgggtatgtaccgcaatcatcttacacctgttgtcagtgcgtcccccaacaaaagtcgagcatacccattctgatgtagcgctgccaccatcaagagcactctcataaataagaaattgagagtaaacgagacctggccgggatcgggatcgtcgaggggatcccctgagctggggcagaatctatgggtatacgtatactgacttcgataaacattttttgctttcctttcccttccgttgaattcgttgcattttatttttttttttcccgagccgagcggtttcagtttctcgttttgcattgcatcgaacaccaagatcgatcggtggcgaagaatgctcttttcagtcgcgatcttacccagcgtccaggtgtccattccactgtccgtccgtttgtgtgattaatggtaattgcttttatggctttctacggcgctcttctgccacaatttgttgcggtaatttcgcttttagtcgcagtccccaaactgatagccccaccacaccaaaatgaattgggaaattacatatttagaaaagcacttgattcaatttgctgcgaactatacaactaatgaattccttatctgttgcaaagtacttggtagcaaagatttcgttttttatttcacttttcacgatttttgtattcataatgtataaaaaaaaataatatacatgcgattaacattaaaagggacaatggacgacaccggctattcaggggggtaagtatgcagtcggcctttcatcaatcagtcgctgtttctgtttctgtttccgggccgattccgtttcagttccgattgcccagcggcgtgtccccctcgttataggaccgttgatcccgatattggctgaacaagccgcgcaccttgttcaatggtgtttggaatgactgcgtcgctgccgtcaaggcggcaaaactcaaaatcggcgatgccggagtcacagcagttccgaccgactcgccattcgtctcggatgcaacttgaatactggcggcggacggagttcgcgccagacgcggtgtaactggcgccgtcaatggtccggatccgcgtctgccgctgaccacggcattcagctttggcgtggcaagcagacgcttgggatgcaacaatggttggctgttgtggctagaactggttccagaataccaaggctccggcttttgaaccttgacgttccttggggatgggaagctttaatataagtgagcaaaagtcattacaaaaaccctatcatgatgataataaacatacagattcatttcagcacaggagtagctctccatggcagtcttccaggcgtagacatgcggcagtgtttccttatcaatgtcgacattggaaagggcattcagcacatccaaatctcgcttggttggctcgtttctagaatgttaaaaaatgtagtctataaagaaacattctaaactatgattaatctcacccaaaaataaacaactcgtaacgcggctccaaatccatggaaatacctggcgacaagctttgcggcggcgtacggaagttttcctcgtcctcgctgctgcttccataaggcagcgtaacattagtgcagtcgaacttgaaaaaaaaaaacaacaaaaatgtttaggagaaggacaacagtactaaacactgatactcacaaagattacttgctcatcgctgtcgtagtcctcgtcgtcgctttgttgacggcgccaagcatctttcgaagcggacgccacgaccctcgatgctcccaaactggtcgatcccacaccaagcgaagcgtgcaaggcggacgaccctgtcgatcccgaagtatcctgaagctgaccctgagactgaacaacagcagctgcccgcagcgacttagtgcgctttcgacgactggtcttacggctgagatttgcgtcccacagacaggcgcaacactgctccgtctcccaggcggcgcaacatagctcctcggtcttcagagtgtctggtagatgcacggcggatgtcggcgcctgttccagcatcagcaatagactagcgcacacgcagcccaaatgctgttctcgaccacgctcgtcggccagcagttgccgcaaacttcggagcatctgcaacaattgtagacgcatggctacgctgacctcctgcgagtgggtcacatagctggccaccaggtgggcgatacgtgaatgcaccttgctaaagtccacgctaatgaagcgggcatcatcctaaaatggttaaatatcgatattatttgttgttaatgctgagttattcattattttatgcacaccttgaagctgacaatcagcgatttcagtcttttgagctcacagagcagcgtgtcgttgatggacaccatgttgccgattttgttgatcaacgttttagtgatgcgcttggcgaacacttgcagcgacttctctacgcatgtgtacggagtcatgactccggcggatggcgaagttgctcccgcagcctcatttttatcctttcggagttgctgctgttgctcgccggccatcgaatcgaaatactgatgcagatgggcaaagttccagaccgtttctgatttatccgcctgctgttcggtcttttccaggaaatacgcttcaagacgggccaggccttcggtcgtaccaatgtccaaaaatgaatcgagaaaatcccagtactcgcgccactctaactgctcctgtcgtgccagttggcggccgaccacctccagacccttctcgatatcagtgttcttgatgtgccgctcacggaagctgtcatttagcgacgcattcaggctgcggcttaggctcatgtccaggatttgggagtcatcggccaaagatggcgaatcaaagctattgttattgcgataggccatgaataaatccggtttcatttttcgaatgggtgtcgccgggaactccaacggatacactggcttcacattattattgttgtgctcgcactcattggtgccattgggcacgtttttcgtcggttttggtgagctggtcgcctccgccaatggactaaagagcactctgcgtcctgagtggactggactcgagtttccagcacttcggtcaaagatcgacttgcttggggttactttcaccggcgagctaaatggtgaaccagccagcggcgacatcacattgttgctgacccgcggtggtgtcttccaacggcgatagaagttcatggccttttcgcgggacatgggtcccgccagcgcactgattgccaggtccacgctgaggccctcgtaatcgtccgctttgtgttgcaggttctgtaaagtataagcaaaaatatatatatcaatgcgtcgttaattgtttcatgttatgtgggatcctcaataaataactaattagtttatcactctcttagtcgtaatgttgttttctcatacttataacaaatgcaataataaagtattttcttaacggtgggaaattatacaaacaattcgcctgagaaactaaacgtatgttgttcatcgtcaaataattgtaccaatgagaatttaaaattattagtaagcagaataatgtaaaacagttactaaccggtggatctttgggcgagaacggttgacccacttttggcggcagtgtatttgactgggatcttagtacgggcacaaaatgcggatcgtacaagagcagctccagcttcttgatggtcacatgtgtagcattagcattacgcaggcagatgatctgcaggggggagaacaggttacaatatgataatagcgattccttcgcccttttgtgactccaaactcgcaactcacttccttgggctccttgccctcatgattccgcagcgatttgcactccggataggaaacgagaacctcgaccatggccacatgaccgttctttgcggcaaagtggagcggtgtttcgccgcgccccttgtccggcatgttcaggtaatagtccaggagactgatgttgagggcagcacacatcttgccactgcccttcttgccaacgtaaagctgagtgaactcccgatccgaaatggtctttaacagcaactgagcgatcctggccttattgacctgggcgcagatgtgcatggcattatagcgacagccctccttcaaactggtgggcgtatcaccgctgctgatcaaaaatcgtggattctcccatataatcctcttcacccggtctatgtgaccaccttcgatttgcttgcgaaactctaccagttcctgtttggtgggcgcccggaaaggagggccttctccggacacatccggctgctgcggctgctgctgctgttgctgctgcatctgctgctgtcgcccattggcaatgacgttgctggagctgctcggcgaggaagtcggtgagtcactgagcagtaaattcgacattgaggaattgcttcccaggggaatgatgaagccactgccgttacccgtcggcgaggaggagcacgaattgtccgtcgaggtcggtgagctcttgtaaccgctaccgctgattatcggaatgggctctgaaaaaataatacagcgcataagttaaatcactgggtaagcaattatatagctagctatactatgtactcactgctttcgggctttgccttgcaaaatctcttgagcgcctcgatgctctcgaacccaaactgaacgtaactctccgcctgctccagattgggaaactcgcggaggcgcgcctccttgtagtgtcgcaggatgtccagcgccttggatttctccgtgaagatcagccacagtggcgagtccgctgctccgtcgtggcgatggcaatgttgatgtgtgggcatcgagagggataaaccattaataaatgagctggctgttttggtcacgccatcggtttggcgaatggcgaatagcgaacgagtgtcgaatgccagacgggtggaggattgtctcgagcaaaacaaaatcaaaacaagctatgctaaagggggcgttgggtgggcagtgggccgtggggcatatgcgtgtgacgcagtggttggcacaacgccggcaaaattttccgaggccctgccttatcaggagtagcaacagttttgctcgcagattgtcacagatttcaaagatatgtatttccaatacaaacgtggatggatcggaatcgaatgattacattatttagggtttataaaagcactctaagcagcttgccagacactttgaaagcctatgatcacttgtggctaactaacccatttaaatagcacttgttgaatttataaaaaacaaaagcagatatatttagcacacagctgcggcgtacaaacatttcatatatttctcttaacattacctctcgaaattagcgagtgtgccataattaaatttactttcgacccttcgcaatgtgctagcaaaacaaaaacagaaataaaactacaagcaaaaacaccgcagccttggtggtaaagttctaatcaaagatctgagataaaagctcaacatacacatagcatgtagaactaacaacaagtgttggccaatagggagcacgtatgaaagttcaattaaaaggcataaaacatttgctattagattaattggacactaattaggcgtgtttcgatttttatattatatataaggaataaggagattgctttagttatgattactttgaaatattaggaaagtaatttgtaattaaagcaatttaagcacctgtgcttaaattgcttaaagcaatttagttattgcttatttataacatgttataacatattatcccaatcgtagggtatctcataggtcggcgttattgggttttacggaactttgctctcttatttttgcgcgttgacttgggccaaaagacagggacagggccaagtgaaagggacagggacaggcacaacccacaataacacaagccggcaaaattgggcgtatgaacatatatatatatgtaaatataggatccggggattcttgacagtacacgcacacactttttcgggatacttgttgttctgcagctcgcagtataaataaatttgaaaaggaagcaaattggagaaattctgtgtgatatacagttgcgacctaatttatagtttttattatcaactgctgtttcgggatctttctaaaaatcgcaatttaataggtacataagaaataataatataaatatataaatatttactacttatgtgatattgccccgaattttagaatattaagataattgttaagtaacccataattattcttgttaaaaaaaaatatatataaggacctattattttgaccgcagctgtgtgactgctggaacataaatatggcagaatgtgggtgctgacaggtcaaggtcctcgtaatgcatccaatttgggcattgcctggaatgggaactggatgatgtcgatgtggaagtggaatgaactcgccccaatcggttttttgttttcgaatcgcatataattggattaaagagcgaacgactgagagcaggagagttgcatttaattagacaggtaatcgccatcgttcaccatttgtttacaattaaatcgaaagaccgctcccagacaaggaaatcgactgtgcgagcgggacagctgggcaagccccgattccgacttttttctcgaatctcagaagttttgaacacacacatgtaaacttcttcatgggctgttagtcatggaggaacaacagcgcaaaacgaaacttataaaaatgcaacagttgaattaccctatatgtaatttatcccagttaatacatttcatatataataatatttaagcacttaatttaccaaaaatgtgtaatatgcactattaggttcattaaaataacgacttgaaagaacgagttatccatatgctgaacaaatttcgatcaggtatattctgcataaatgggaataaaatttcaaccccttataaaacaaacattattgcagaaattcgtcaagcaattcaggtttagtttcaaaacaaaacctatgcaattccgatcatgaacattcctgttgcttggaaacttcaaccctcgacttttaaatttggttttaaaagtatgtgtatgaatcataaaacctcccacttgctccatacgacacaattgtttaaaaacaaaagcacacgaatacccatcaacgaatcgaccgaacgttcgcgcatgacccccgattacagggtatcacaatagcaacaagcggcaaataactggaacgcaaaacacacacatataccgacactcgcttcatctcgttcgtacttacgtggatagtcgggatcctcgtacttggtggcagcactgccatcgtctgcgttgcccgtttgcacggatgccgccgagccggatggcgatcccgatgctactgatgccgatccagacgccggattggatggctttatgttcaccgcggctatggagccgatgcactgcgacaccgatccctcaaaacagcccgctttggaggtcgggatatagaccccgaaataggtcgacatctctgcgtaaaatggcggatgcactgcaaggtaagcggttaaaatggtttgacatcaacaccaaataacaggcaacttcttcacaactccgtgaaaaaatgtaaagttccgctgatggcaagcgaaggcaacggtaaaaatagggtaacatcaaccacaaaatgccaggaactctactgtcccgttttgttgttgttttcggctgcactcctccactcgcacgcacacaaacacaacaacgcaaaaaaaaaacggaaaaaaaacagcacacgcacatcaacaaccagcgacgcgaactcacgagacctggaagacccaacgaatcggcggaatcacaaacatatatcttgttattcttaccttttagcacaaagggcacaatacatgaaacaaaacccaataatcttaagcgtctttcaaacaaaatgtgcacaaacgaaattaaattagaggcggactgtcagcgaatctaggtgtggagtaatatcgataaaaagtatcgtatgactagctgactattgcagtcaatttcgaattgcagatcaaattgaaatattctaaaacacttgcatgaaaattacgcgagatttatatacaaagctatagcgatgattggatatcggaaattcaaattgattgttacacagagggattcagacatgagaagtgacactttattttaagtcttaaaaggtattttggttgtaagttagtattacgttattcataaaacgtacaaatgaggcattcccccaactttcctcttaatcatatagccaagcaaaacatttgatggtttgagtcaagggtgctatcaataccactggtattttcttagtattttgtaacatttttaaatgcaccgccttgaatttagtcctcttaatttgttcattaactttggccactcacaagcctagcttaaagttagtaacagttgccctgcttatccgcttctatcccttttacacttttaaatacagtttgaatttcatacgttggtttgggtctatggtgaattggttgacgattggtatctttttggtattttataaggctccccatttaacggtggggatttttcggacatatttcaacgaccgtcgacggctgcaaacataacgttcgtggatttcgtggggaatagcggtcga

SEQ ID NO: 18392 - DNA, 3790 bp, DROSOPHILA
ttgatgttaccctatttttaccgttgccttcgcttgccatcagcggaactttacattttttcacggagttgtgaagaagttgcctgttatttggtgttgatgtcaaaccattttaaccgcttaccttgcagtgcatccgccattttacgcagagatgtcgacctatttcggggtctatatcccgacctccaaagcgggctgttttgagggatcggtgtcgcagtgcatcggctccatagccgcggtgaacataaagccatccaatccggcgtctggatcggcatcagtagcatcgggatcgccatccggctcggcggcatccgtgcaaacgggcaacgcagacgatggcagtgctgccaccaagtacgaggatcccgactatccaccggactcgccactgtggctgatcttcacggagaaatccaaggcgctggacatcctgcgacactacaaggaggcgcgcctccgcgagtttcccaatctggagcaggcggagagttacgttcagtttgggttcgagagcatcgaggcgctcaagagattttgcaaggcaaagcccgaaagcaagcccattccgataatcagcggtagcggttacaagagctcaccgacctcgacggacaattcgtgctcctcctcgccgacgggtaacggcagtggcttcatcattcccctgggaagcaattcctcaatgtcgaatttactgctcagtgactcaccgacttcctcgccgagcagctccagcaacgtcattgccaatgggcgacagcagcagatgcagcagcaacagcagcagcagccgcagcagccggatgtgtccggagaaggccctcctttccgggcgcccaccaaacaggaactggtagagtttcgcaagcaaatcgaaggtggtcacatagaccgggtgaagaggattatatgggagaatccacgatttttgatcagcagcggtgatacgcccaccagtttgaaggagggctgtcgctataatgccatgcacatctgcgcccaggtcaataaggccaggatcgctcagttgctgttaaagaccatttcggatcgggagttcactcagctttacgttggcaagaagggcagtggcaagatgtgtgctgccctcaacatcagtctcctggactattacctgaacatgccggacaaggggcgcggcgaaacaccgctccactttgccgcaaagaacggtcatgtggccatggtcgaggttctcgtttcctatccggagtgcaaatcgctgcggaatcatgagggcaaggagcccaaggaaatcatctgcctgcgtaatgctaatgctacacatgtgaccatcaagaagctggagctgctcttgtacgatccgcattttgtgcccgtactaagatcccagtcaaatacactgccgccaaaagtgggtcaaccgttctcgcccaaagatccaccgaacctgcaacacaaagcggacgattacgagggcctcagcgtggacctggcaatcagtgcgctggcgggacccatgtcccgcgaaaaggccatgaacttctatcgccgttggaagacaccaccgcgggtcagcaacaatgtgatgtcgccgctggctggttcaccatttagctcgccggtgaaagtaaccccaagcaagtcgatctttgaccgaagtgctggaaactcgagtccagtccactcaggacgcagagtgctctttagtccattggcggaggcgaccagctcaccaaaaccgacgaaaaacgtgcccaatggcaccaatgagtgcgagcacaacaataataatgtgaagccagtgtatccgttggagttcccggcgacacccattcgaaaaatgaaaccggatttattcatggcctatcgcaataacaatagctttgattcgccatctttggccgatgactcccaaatcctggacatgagcctaagccgcagcctgaatgcgtcgctaaatgacagcttccgtgagcggcacatcaagaacactgatatcgagaagggtctggaggtggtcggccgccaactggcacgacaggagcagttagagtggcgcgagtactgggattttctcgattcatttttggacattggtacgaccgaaggcctggcccgtcttgaagcgtatttcctggaaaagaccgaacagcaggcggataaatcagaaacggtctggaactttgcccatctgcatcagtatttcgattcgatggccggcgagcaacagcagcaactccgaaaggataaaaatgaggctgcgggagcaacttcgccatccgccggagtcatgactccgtacacatgcgtagagaagtcgctgcaagtgttcgccaagcgcatcactaaaacgttgatcaacaaaatcggcaacatggtgtccatcaacgacacgctgctctgtgagctcaaaagactgaaatcgctgattgtcagcttcaaggatgatgcccgcttcattagcgtggactttagcaaggtgcattcacgtatcgcccacctggtggccagctatgtgacccactcgcaggaggtcagcgtagccatgcgtctacaattgttgcagatgctccgaagtttgcggcaactgctggccgacgagcgtggtcgagaacagcatttgggctgcgtgtgcgctagtctattgctgatgctggaacaggcgccgacatccgccgtgcatctaccagacactctgaagaccgaggagctatgttgcgccgcctgggagacggagcagtgttgcgcctgtctgtgggacgcaaatctcagccgtaagaccagtcgtcgaaagcgcactaagtcgctgcgggcagctgctgttgttcagtctcagggtcagcttcaggatacttcgggatcgacagggtcgtccgccttgcacgcttcgcttggtgtgggatcgaccagtttgggagcatcgagggtcgtggcgtccgcttcgaaagatgcttggcgccgtcaacaaagcgacgacgaggactacgacagcgatgagcaagtaatctttttcgactgcactaatgttacgctgccttatggaagcagcagcgaggacgaggaaaacttccgtacgccgccgcaaagcttgtcgccaggtatttccatggatttggagccgcgttacgagttgtttatttttggaaacgagccaaccaagcgagatttggatgtgctgaatgccctttccaatgtcgacattgataaggaaacactgccgcatgtctacgcctggaagactgccatggagagctactcctgtgctgaaatgaatctgaacgtcaaggttcaaaagccggagccttggtattctggaaccagttctagccacaacagccaaccattgttgcatcccaagcgtctgcttgccacgccaaagctgaatgccgtggtcagcggcagacgcggatccggaccattgacggcgccagttacaccgcgtctggcgcgaactccgtccgccgccagtattcaagttgcatccgagacgaatggcgagtcggtcggaactgctgtgactccggcatcgccgattttgagttttgccgccttgacggcagcgacgcagtcattccaaacaccattgaacaaggtgcgcggcttgttcagccaatatcgggatcaacggtcctataacgagggggacacgccgctgggcaatcggaactgaaacggaatcggcccggaaacagaaacagaaacagcgactgattgatgaaaggccgactgcatacttacccccctgaatagccggtgtcgtccattgtcccttttaatgttaatcgcatgtatatta

SEQ ID NO: 18393 - protein, 1169 aa, DROSOPHILA; identical to SEQ ID NO: 18372

SEQ ID NO: 18394 - DNA, 3042 bp, DROSOPHILA
atagatgacaaaattctgtacacactggttttgcaaatgggtgagcttaatgcgttgtaaccctttgtttgttattaataatttaaatttcttttacgtcacttagccaaagaactacaaaagcaacagctgcgactcattttggtcattcctccattccgcaaggaaacaggccacctttttggagaaaagcacatggacaagctgttcaagcacatatacgccttctctctgatgacttacgacttctccagcgtgcagcgtcccggagcaaatgcaccattatatttcgtccgtaaggctgtggagacaatagctccagaaggttgcgctgatatgacggctaagagggctaaaattctgttgggactgaatatgtacgggaatgattacacgcccgatggaggtggacccatcaccttctcccagtacttggatctagtcaggcatgtgaagaagcacctaacttacgatgagcgggatgtggaaaatttctttgaaatcaagtgagttttctactgcagcgtatgcagagtgtaaggcgaagatgatgaatatcattactttcagaaacgatgacggtcgccacattgtcttttatcccactctctattccataaacgagcgaataaagctcgcccaggaactgggcactggcatttcaatctgggaacttggccaaggcctaaactatttttacgatctcttctagttagcctgtaagcagcatgcaatgcacaatacctattccaaataaaggaaattatatataagccataatgcttcataatttttccaatttacaattttagtaaccaactttgaaatgaggcgccaatttgttagtcaaccgacagccgcttgacagcactgtttaatttatcgaatattttaaatttatatcgggccgtttactcgtttaaaacgatactatcgctgatggtttttcagctctagaataaatttgttattatttttttagccggtgagaaatcctgaaatgcgctttctttatgcctgctttgtgatcgtgctgtgcgccctgatcttctgcgaatatgtggcggactttgtggtgctgcaaaagtgcaagtggccggagataaagcgaaagaagtatgtggacgatccgcttagggcaatgattctagcggatccgcatctgctgggaccgcatcgtggtcactggctggacaagctctaccgggagtggcacatgacgcgggcctttcaggcggcatcacgtctgttccagcccgacgtggtcttcgtcttgggcgatttgttcgacgagggcgacatggtcagcgacaagcagttccaggaatatgtgtggcgctacctgaagatgttccacctaccaccgggaattccgctcatcagtgtcgcgggaaatcatgacgtgggcttccattacaagtaagtcaataagagactatgtgtattccctgatatttgttaaaccgcgctcttgtgtgttttccagaatgcatcccttctttatgtcgcgttttgagagttatctgaacaactcctcggtcaatttgtacaccattaaacaaatccattttgtggtgataaattcgatggctatggaaggtgatggttgcatgttttgcacccaggccgaggatcagttgaaaaacatttcgaggactttgtactgcatgaagtatccactagaggcggagtgcgctcgcaccaggcggcacccgtacagccagccaattctattgcagcactttcccacctaccgcatttcggataccatgtgcgaggagcacgatgctccgtacatcgaggcgttccgagagcggtttcatgtgctctccaaggatgccacggatatgctgggagagctgcttaagccaaggctggcattcgccggtcattcacatcacttctgtcacagtgtaaatcgactgggcatcgatgagtacacggtggcctcattcagctggcgaaacaaagttaatcccagctttatgctggtgagtattatatttgctcttacgattgttagcccttcgaacttgtactaacatgccataacttttaggccactataacccccgatgactatgtggtttccaagtgcaaaatgctgccacagcagtttgtcttcaatagctatctgagtgctggcattctttgcctaattgtcatcgggttccagctacgaaagtgcatccaaagcagaagacagtcgtcggctgtagatcatcggaaggttaattagtatgtataagcatgcctatacaaggcatatcctcttttgtgatttacgcctgattggggcttagtttagactagatacgccagattccagactcagatcccagatccagatccagacagaggtcatatcattcctgctgctttgcaaccgcttaactatattctaggtgtacaaaattcggatagtatgtatgatctatttattgaatttatcacagacattatgcttgtaaagtcaaacggaatacataatgagacacagtctgctgactacaaatcgaaaatgccaaaaaaataatgcttgaacaaaggctggaaagtaaagaacggatacaaacagaacaattaaataaagctatattataatacatttactatataacgttaatgattgtgcactctgtattctgagatgcagattcataggttcctgtacttcggtttatgtcttccaatatctggatcacattgtactagactaggctatctataaggtaactaccacaaagcaactacaactacaaactatgctaacaaaacagggtgtggaattcaatgccatcaattccattagtttggcacaggaagttctggttcgtctattttaggatacgtttaagaggtttttgtgcgcctgcgcatggagattgcgaccactaaagcattcttttggaaggaatctagaagaaaaaatgggtttaataacagaggttaaacatgtggttacaaaaattacctgtgaatcactggtgatattagatccggatctagtgttttcatatttgtgggtttggtcacaaggga

SEQ ID NO: 18395 - DNA, 975 bp, DROSOPHILA
atgcgctttctttatgcctgctttgtgatcgtgctgtgcgccctgatcttctgcgaatatgtggcggactttgtggtgctgcaaaagtgcaagtggccggagataaagcgaaagaagtatgtggacgatccgcttagggcaatgattctagcggatccgcatctgctgggaccgcatcgtggtcactggctggacaagctctaccgggagtggcacatgacgcgggcctttcaggcggcatcacgtctgttccagcccgacgtggtcttcgtcttgggcgatttgttcgacgagggcgacatggtcagcgacaagcagttccaggaatatgtgtggcgctacctgaagatgttccacctaccaccgggaattccgctcatcagtgtcgcgggaaatcatgacgtgggcttccattacaaaatgcatcccttctttatgtcgcgttttgagagttatctgaacaactcctcggtcaatttgtacaccattaaacaaatccattttgtggtgataaattcgatggctatggaaggtgatggttgcatgttttgcacccaggccgaggatcagttgaaaaacatttcgaggactttgtactgcatgaagtatccactagaggcggagtgcgctcgcaccaggcggcacccgtacagccagccaattctattgcagcactttcccacctaccgcatttcggataccatgtgcgaggagcacgatgctccgtacatcgaggcgttccgagagcggtttcatgtgctctccaaggatgccacggatatgctgggagagctgcttaagccaaggctggcattcgccggtcattcacatcacttctgtcacagtgtaaatcgactgggcatcgatgagtacacggtggcctcattcagctggcgaaacaaagttaatcccagctttatgctggtgagtattatatttgctcttacgattgttagcccttcgaacttgtactaa

SEQ ID NO: 18396 - protein, 324 aa, DROSOPHILA
MRFLYACFVIVLCALIFCEYVADFVVLQKCKWPEIKRKKYVDDPLRAMILADPHLLGPHRGHWLDKLYREWHMTRAFQAASRLFQPDVVFVLGDLFDEGDMVSDKQFQEYVWRYLKMFHLPPGIPLISVAGNHDVGFHYKMHPFFMSRFESYLNNSSVNLYTIKQIHFVVINSMAMEGDGCMFCTQAEDQLKNISRTLYCMKYPLEAECARTRRHPYSQPILLQHFPTYRISDTMCEEHDAPYIEAFRERFHVLSKDATDMLGELLKPRLAFAGHSHHFCHSVNRLGIDEYTVASFSWRNKVNPSFMLVSIIFALTIVSPSNLY

SEQ ID NO: 18397 - DNA, 3572 bp, DROSOPHILA
cgcggcacgcagcaggttgaactcgaacacagaacgtccatggcggcggaactcgcacttcggatccgtgaaactgttggcactcactccgtacgctaccgtggctatcacatccgtggtgtagagagcacacagctccttggcctccaagtcgaagcagcgcatccgctcgttgtgcagcggctgctggcggagatgggcatccaagctggcgcccacctcctcgatcaggggaaacatctgcttcagtcgattgccggtgaagaagggcgatagcttcaaacgtacctccttccaggcgggattcttcaggaagaatatgttctgggatcccaaagggtcgcccttggggtcggagctcgagtaccggttggagaagccagcgaagtccttgaccaggatatttctcaccatttcggggtctctcaaaagcagcgccggcttgtggaacacatggatgcccacgaagggttcgttctccgcatcgggatggttatacaattgcgatatgaactccgcgggactcattcgcatgttgagcagtcccatcaggttgcccactatccatttgggcctgatttcgcgtactcccattcgccgccaataggagtaatgctgctgcagcgccagaaaggcaatccctattagggatgccacgaggatcagcagtaccagttccatgctaacgccaccaaacccaatgtccaactggctgaaatattgccagcaccatagagttaaagctttgggtaagcggaaactctactatgagatcatcaagatgatcctgagtgcaatgaatgaatctatttgtgaatggaagtgcttgtcgagatgttaagtgggtcaggttcaacttatgcatatggaaatgcatttcttgacggtcgtgaacaaggtctcctcctcattcaaaagaacgactttttggatcttagctatctttacctaatgctggtatatatttcatagttataatattctatcttatatcttatagacaccatgctgctcatctggctgctgttgctcaccattgtgactctgaatttttggttaaggcacaagtacgattacttcaggagccgtgggattccgcacctgccaccctcctcttggtcaccaatgggcaatttgggacaacttctatttctgcgcatttcttttggcgatctctttcggcagctctacgcagatccacgaaatggtcaggcgaagatcgttggcttcttcatattccaaacgccggcgcttatggttcgggatccggagctaatccgccaggtgttgattaagaatttcaacaactttctcaaccggttcgaatcggcggacgccggagatcccatgggtgcactgacgctaccgctggctaagtaccatcactggaaggagagtcggcaatgcatgtcccagctcttcaccagcggccgtatgcgggatgtcatgtacagccaaatgttggatgtggccagcgacttggagcagtacctcaacaggaagctgggggatcggctggagcgcgttctcccgttgggaagaatgtgccagttgtacaccaccgacgtgacggggaatctcttctacagcctgaatgtcggcggattgcgtcgtggtcgatccgagttgataacaaaaaccaaggagctatttaacaccaatccccgcaaggttttggacttcatgagtgtattctttctgcccaagtggacgggtgtgctgaagcccaaagtttttaccgaagactatgcgcgctatatgaggcacttggtagatgatcatcacgagcccaccaaaggagatctcatcaatcaattgcagcactttcagttgagccgctcatccaaccactattcccagcatccggactttgttgcttcgcaggcgggtatcatactgctggccggatttgaaacctcctcagccctgatgggattcactctctatgagttggccaaggctccggatattcaagaacgactgaggagtgagctacgagaagccttcatctccactgctaccctaagctatgacacactgatgactttgccctatctcaaaatggtgtgtttggaggcactgcgtctctatccggctgctgctttcgtcaacagagagtgcaccagttcggcatccgagggattctcactgcaaccgcatgtggatttcatagtgccaccagggatgccagcatacatctcaatactcggcctccatcgcgatgaaagggttagatttaaaaccaaaggtgatgattatcccaacttacttatgtcaatctaaattccagttttggccggagccctgcgtctttgatcccgagagattcggtccggagcgatctaggcacatccacccgatgacctacataccctttggagcaggtccacatggctgtattggtagtcgcctgggcgtactccaattgaaactgggcatagtgcacattttaaagcaatattgggttgagacttgcgagcgaacagtatcggagattcgctttaatccaaagtccttcatgttggagtctgagaatgagatatacctaagattctgcaggagtagtttgtagagttataggcatcctaaaacaatcggctgtgatatgtaatcacctttgttcctataatctaaatagaatagataatctaaatagctccctaaaatttgaacttaaaacgaaactgaaagtatttatgatagtatatttaaggtttccttacactcctggatcaatgaatcacaatagaaaattatcttcatgcaagttacttattcatttttgccaaagttagatgttttcttttaacgcttacccccttttataaaatctacccaaggcagattttttggccacacacacatccttgaaatgcttatattaatatgacttaattctgtggattcaacttgcttagcttgtcttcgatgtccttgatgcgacaccggatttccggcgccgaatcgcgctggaacttttccaaattcgattcaaagctctgcttgatcaacctcagtggctgctggtttccgtttccgcttccgctcagccgcttgatcagcataagaacgatgttgagcgcctcctttttcaaaccggaatgaggaactccagcggcaagagcaactgcagccaaaacatctgtgcatatcttctcgacaatggcctctcgggtttttggcgccgtctcctctgtcttgatcttcttctcctggtttatctgagtcaaatccggcacttgagcagactcatcaaagacatgaagtctttcgatgtacttagtgagtgctgccagcagactgacttgcactgggcgagtgctctccgccagaatgctcgtacagttttcggcaaagaagagttggtagcggtgctgcgtctcgatggagtgacgcggccaggatttgcccagtgtctcccacacaacctcctttagtcgattgagtgtttgagcccgcttgttgcgctcgtcggcagacagttcctgactggtgttgggctcgtcctcgtcgtccgactccttgcgcagttccttcttttccagcaggttccagctcatgttgtacacttc

SEQ ID NO: 18398 - DNA, 1511 bp, DROSOPHILA
acaccatgctgctcatctggctgctgttgctcaccattgtgactctgaatttttggttaaggcacaagtacgattacttcaggagccgtgggattccgcacctgccaccctcctcttggtcaccaatgggcaatttgggacaacttctatttctgcgcatttcttttggcgatctctttcggcagctctacgcagatccacgaaatggtcaggcgaagatcgttggcttcttcatattccaaacgccggcgcttatggttcgggatccggagctaatccgccaggtgttgattaagaatttcaacaactttctcaaccggttcgaatcggcggacgccggagatcccatgggtgcactgacgctaccgctggctaagtaccatcactggaaggagagtcggcaatgcatgtcccagctcttcaccagcggccgtatgcgggatgtcatgtacagccaaatgttggatgtggccagcgacttggagcagtacctcaacaggaagctgggggatcggctggagcgcgttctcccgttgggaagaatgtgccagttgtacaccaccgacgtgacggggaatctcttctacagcctgaatgtcggcggattgcgtcgtggtcgatccgagttgataacaaaaaccaaggagctatttaacaccaatccccgcaaggttttggacttcatgagtgtattctttctgcccaagtggacgggtgtgctgaagcccaaagtttttaccgaagactatgcgcgctatatgaggcacttggtagatgatcatcacgagcccaccaaaggagatctcatcaatcaattgcagcactttcagttgagccgctcatccaaccactattcccagcatccggactttgttgcttcgcaggcgggtatcatactgctggccggatttgaaacctcctcagccctgatgggattcactctctatgagttggccaaggctccggatattcaagaacgactgaggagtgagctacgagaagccttcatctccactgctaccctaagctatgacacactgatgactttgccctatctcaaaatggtgtgtttggaggcactgcgtctctatccggctgctgctttcgtcaacagagagtgcaccagttcggcatccgagggattctcactgcaaccgcatgtggatttcatagtgccaccagggatgccagcatacatctcaatactcggcctccatcgcgatgaaaggttttggccggagccctgcgtctttgatcccgagagattcggtccggagcgatctaggcacatccacccgatgacctacataccctttggagcaggtccacatggctgtattggtagtcgcctgggcgtactccaattgaaactgggcatagtgcacattttaaagcaatattgggttgagacttgcgagcgaacagtatcggagattcgctttaatccaaagtccttcatgttggagtctgagaatgagatatacctaagattctgcaggagtagtttgtag

SEQ ID NO: 18399 - protein, 501 aa, DROSOPHILA
MLLIWLLLLTIVTLNFWLRHKYDYFRSRGIPHLPPSSWSPMGNLGQLLFLRISFGDLFRQLYADPRNGQAKIVGFFIFQTPALMVRDPELIRQVLIKNFNNFLNRFESADAGDPMGALTLPLAKYHHWKESRQCMSQLFTSGRMRDVMYSQMLDVASDLEQYLNRKLGDRLERVLPLGRMCQLYTTDVTGNLFYSLNVGGLRRGRSELITKTKELFNTNPRKVLDFMSVFFLPKWTGVLKPKVFTEDYARYMRHLVDDHHEPTKGDLINQLQHFQLSRSSNHYSQHPDFVASQAGIILLAGFETSSALMGFTLYELAKAPDIQERLRSELREAFISTATLSYDTLMTLPYLKMVCLEALRLYPAAAFVNRECTSSASEGFSLQPHVDFIVPPGMPAYISILGLHRDERFWPEPCVFDPERFGPERSRHIHPMTYIPFGAGPHGCIGSRLGVLQLKLGIVHILKQYWVETCERTVSEIRFNPKSFMLESENEIYLRFCRSSL

SEQ ID NO: 18400 - DNA, 3569 bp, DROSOPHILA
ctgtacgcctggtacaagctccacacggcggatgcgcaatacacactgtcccgcaccgatcccaccacctggtcggtgctcatcaccggaaacaaaccggtgatgggactctggtatcgcagcagttgacgcttgactgagggaagagaaagtgttagattcacccggttatcgcgtcttaattggctatgcaaataaacaaacgattctgtttacaatcaagtgtggggcgtcgacatttcgcgatgtgcgatgcttattaatagacgccgtcaattggtgctcaattggccgccccacagacgactccaaggttatataaatcctcaccaatgccatagtagatgtccagctgcttcaccgtgtcctcgtagttggacgttttcaggaactggtccagattgatctcctccaagctgttgtggcgaccactgtccggagcacccgaactgccgcctggagttgtgaccgagagaccgagactggaagtggaaatatcctcgccattaatatgggattattttcgatgttttcatacttacgatttcggcacatcgcgcattgtttcttcagcaattgcaaattatattgcaattgcgcttaagaaaatgtatcaaagtcaaaaaaaagtcaaacgcttctaacagctgagcagcttttcattgcgatctggcaatgctctaagctaaaatcgattgttgaagaccaatcgttaaaggcagagcgggtgatttaaatcggatgcgcaatttaagaaacatattaagttctcgttattgtttgaagttgaaataattcggtgatataattttaagcttataaataataaaataaaatatatcaaatataatgttaagtcaagtccaagtaataatttctgaagcacactgctatttaccaatttagggtgaccatttagagtgtctgatgccgtttgccgtttagtgtacgctatggtcactttgctgccggctttttttttgtatgcgatttgtttttgtgcgatttatgctgtggtcctgattgtccttctgtcgaaatgcgtgcgcctgatgcgctcctgctccgcgtcgctctcctgcttctactgctgaccaccgtccgcggaaccctcgccccggacagccacaaatcgaagagcaagaccaaggagagtgctctgcgtggcggtccgcaagaccaagatgttttcgatctgggcttggttagtcccgagcccctggccaaggatatcgtgagcaatcatcgcgggtacttcaaggagacgggattgcgacgcttcaatggcaccaccttgggctatgtgactccagtaagcagaggacgtactcccacattttgtgcatgtgtattaatctattgtttgctttgcttgtagtggaactcgcatggctatgatgtggctaagatatttgccaagaagttcgacattatctcgccggtttggctgcagattgttaagcagggagatcgttatgccgtagccggaacccatgacatcgatgcgggttggctaaccgatgtccggagaaagggtaaacaggtgcacaatcagcgaacggttaaaggtatgagaaaatgatacccgctggcgttagtctaaactcactttccttggatttcagtgtttccccgttttatattcgatcacttcactgatcgggacattaagctcttgcttagcgacgcccaggagaggacgaaagtcaacgacgtgctgatcaagtgctgcaaggataatggcttcgatggactcgtcctggaggtgtggtcccagctagctggacgcatagatgacaaaattctgtacacactggttttgcaaatgggtgagcttaatgcgttgtaaccctttgtttgttattaataatttaaatttcttttacgtcacttagccaaagaactacaaaagcaacagctgcgactcattttggtcattcctccattccgcaaggaaacaggccacctttttggagaaaagcacatggacaagctgttcaagcacatatacgccttctctctgatgacttacgacttctccagcgtgcagcgtcccggagcaaatgcaccattatatttcgtccgtaaggctgtggagacaatagctccagaaggttgcgctgatatgacggctaagagggctaaaattctgttgggactgaatatgtacgggaatgattacacgcccgatggaggtggacccatcaccttctcccagtacttggatctagtcaggcatgtgaagaagcacctaacttacgatgagcgggatgtggaaaatttctttgaaatcaagtgagttttctactgcagcgtatgcagagtgtaaggcgaagatgatgaatatcattactttcagaaacgatgacggtcgccacattgtcttttatcccactctctattccataaacgagcgaataaagctcgcccaggaactgggcactggcatttcaatctgggaacttggccaaggcctaaactatttttacgatctcttctagttagcctgtaagcagcatgcaatgcacaatacctattccaaataaaggaaattatatataagccataatgcttcataatttttccaatttacaattttagtaaccaactttgaaatgaggcgccaatttgttagtcaaccgacagccgcttgacagcactgtttaatttatcgaatattttaaatttatatcgggccgtttactcgtttaaaacgatactatcgctgatggtttttcagctctagaataaatttgttattatttttttagccggtgagaaatcctgaaatgcgctttctttatgcctgctttgtgatcgtgctgtgcgccctgatcttctgcgaatatgtggcggactttgtggtgctgcaaaagtgcaagtggccggagataaagcgaaagaagtatgtggacgatccgcttagggcaatgattctagcggatccgcatctgctgggaccgcatcgtggtcactggctggacaagctctaccgggagtggcacatgacgcgggcctttcaggcggcatcacgtctgttccagcccgacgtggtcttcgtcttgggcgatttgttcgacgagggcgacatggtcagcgacaagcagttccaggaatatgtgtggcgctacctgaagatgttccacctaccaccgggaattccgctcatcagtgtcgcgggaaatcatgacgtgggcttccattacaagtaagtcaataagagactatgtgtattccctgatatttgttaaaccgcgctcttgtgtgttttccagaatgcatcccttctttatgtcgcgttttgagagttatctgaacaactcctcggtcaatttgtacaccattaaacaaatccattttgtggtgataaattcgatggctatggaaggtgatggttgcatgttttgcacccaggccgaggatcagttgaaaaacatttcgaggactttgtactgcatgaagtatccactagaggcggagtgcgctcgcaccaggcggcacccgtacagccagccaattctattgcagcactttcccacctaccgcatttcggataccatgtgcgagga

SEQ ID NO: 18401 - DNA, 1316 bp, DROSOPHILA
tgcgatttatgctgtggtcctgattgtccttctgtcgaaatgcgtgcgcctgatgcgctcctgctccgcgtcgctctcctgcttctactgctgaccaccgtccgcggaaccctcgccccggacagccacaaatcgaagagcaagaccaaggagagtgctctgcgtggcggtccgcaagaccaagatgttttcgatctgggcttggttagtcccgagcccctggccaaggatatcgtgagcaatcatcgcgggtacttcaaggagacgggattgcgacgcttcaatggcaccaccttgggctatgtgactccatggaactcgcatggctatgatgtggctaagatatttgccaagaagttcgacattatctcgccggtttggctgcagattgttaagcagggagatcgttatgccgtagccggaacccatgacatcgatgcgggttggctaaccgatgtccggagaaagggtaaacaggtgcacaatcagcgaacggttaaagtgtttccccgttttatattcgatcacttcactgatcgggacattaagctcttgcttagcgacgcccaggagaggacgaaagtcaacgacgtgctgatcaagtgctgcaaggataatggcttcgatggactcgtcctggaggtgtggtcccagctagctggacgcatagatgacaaaattctgtacacactggttttgcaaatggccaaagaactacaaaagcaacagctgcgactcattttggtcattcctccattccgcaaggaaacaggccacctttttggagaaaagcacatggacaagctgttcaagcacatatacgccttctctctgatgacttacgacttctccagcgtgcagcgtcccggagcaaatgcaccattatatttcgtccgtaaggctgtggagacaatagctccagaaggttgcgctgatatgacggctaagagggctaaaattctgttgggactgaatatgtacgggaatgattacacgcccgatggaggtggacccatcaccttctcccagtacttggatctagtcaggcatgtgaagaagcacctaacttacgatgagcgggatgtggaaaatttctttgaaatcaaaaacgatgacggtcgccacattgtcttttatcccactctctattccataaacgagcgaataaagctcgcccaggaactgggcactggcatttcaatctgggaacttggccaaggcctaaactatttttacgatctcttctagttagcctgtaagcagcatgcaatgcacaatacctattccaaataaaggaaattatatataagccataa

SEQ ID NO: 18402 - protein, 402 aa, DROSOPHILA
MRAPDALLLRVALLLLLLTTVRGTLAPDSHKSKSKTKESALRGGPQDQDVFDLGLVSPEPLAKDIVSNHRGYFKETGLRRFNGTTLGYVTPWNSHGYDVAKIFAKKFDIISPVWLQIVKQGDRYAVAGTHDIDAGWLTDVRRKGKQVHNQRTVKVFPRFIFDHFTDRDIKLLLSDAQERTKVNDVLIKCCKDNGFDGLVLEVWSQLAGRIDDKILYTLVLQMAKELQKQQLRLILVIPPFRKETGHLFGEKHMDKLFKHIYAFSLMTYDFSSVQRPGANAPLYFVRKAVETIAPEGCADMTAKRAKILLGLNMYGNDYTPDGGGPITFSQYLDLVRHVKKHLTYDERDVENFFEIKNDDGRHIVFYPTLYSINERIKLAQELGTGISIWELGQGLNYFYDLF

SEQ ID NO: 18403 - DNA, 3969 bp, DROSOPHILA
ttttgcatgcctgaaagttggccactgggaatgtctagaatgcgtccgatggttcagaaaaaaaatatgcttcttaatttggctcgaatcgggagatgactttagtcagaagaaaaccagttaacacgaccattaagtcgtcgagaattctgttaggttcttatgggtttttaaattaaccggtttggcttggaaatcgtattccaaaacctaatgttaagcttatgttcgaactttaagaggttgctataaaatctttaatattcgcattgtaaaattcattagacctttgtcttaacagaaataaaaatcacaaacctcttttatagttctgatgtgcagagataaaaataaaatttttgaaaggataataaactttaaattagttgataataactaacgtttttttgtcgccttgtctttcaataactcgcacccaaaaacacaaaccaattttaaaattattttctgaaagcgtcttaaatccgtttgaaagtaaaataacattgagtttaagcaaggaaaatacttttaattaaatgtgtaatccccccgagcagcgactcaggttgtgtgttagcaagtcttcgcagaattttccattaatgttgtccctttttccaaagcacaacaagcacgcacacagacacgcgttcaggcgatgcccaataagtgtcagttgtggttgacaaatcgcataaaaagcagatgtagattcaggaccacgaggagtgcggctttgtatggtggaaaagctggtgtggagttagcagctgagaacagggaattcatatttccatgcaaatgcaaataacaaaataataaaatgcacagcaagaagaaaaacactgatagcacaggactcgcatgcatgagggtggaaaaaatggggttgagaaaacagaagcacactcacacatatgcgcaaatttgcaaggcaaacgatttttcatgaccctgtgaagcagcttcctctgatgatggcgacttttcatgtgcaatgcacctaggagctgagtgtttgtccttgtattttgtcgtaaatttcacgcataacagagctttatcttcatcctgccgggtgctcagtttacctttgactcacaatttgggcgaaaatataaagtaatgccgacacttatcatttttcctgttgccgtttatttattttgcagatagcaaaaaagtgattgatccgccggcgaactttgaggagaatcctggcgagctgggaaaacccgtgcgcctgcccaaggaaatgtccgacgaaatgaagaaggccgttgacgatggctggaccaaaaacgccttcaatcaatatgtatcggatctcatatccgttcatcgaactctgcccgatcctcgagatgcctggtgcaaggacgaggcgcgctatctaaccaatctgccaaagaccgatgtcatcatctgcttccacaacgaagcctggaccgtgctgttgagaacagttcactcagtgctggacaggtcgccggaacatctaatagggaagataatcctcgtcgatgactacagcgatatgcgtgagtttggatatgatacctttctgcattttacttgagttcttattgttttatctctatattatagctcatttgaagaggcagctggaggactactttgctgcctatcccaaagtccagataattcgtggccaaaagcgagagggtctgatccgagcccgaattttgggtgccaaccatgccaagtcccctgttctcacctatttggattcccactgcgagtgcaccgaaggtgagttgaaaataagtgaattaaatatgccggctccctaaaagtatactgcacttttttccaaccacaacttttccacctttcctttttttgggcatttccatttcaatttgcaatattgtcaatatgctaattgccaaaattaagctcttaattgactaaccaacttttgttagccaatgctggtccataaaaaattcaggttaaataaatatttgaattatatgtaaatatatgacagcgttcagtcgaattcaagagttaaatattcaaaaggtttaacgtttgagtgacgttaaagattccttttataacaatcgttttttgttagccgagatttgtccatttcccaacggattcacgtcgtatctcgtttaatgacgagtatactgttctttgccatactcaattttgatggccatcaaaggaaatccgttgggacgcacacaatgccaataaaacaagagcctagctctagaaaaatcacttaatcttcggcattaggccaactctgttaccattttttgcctctcattttctccttttattttaagctgatgcaaaaagacaaagcgtagagctacgaaaaatgcaatcaatttagtttattgagaaagttgacagatgattgccgaaaagtaaacaaaatcagcacaaagtgaaatacatttttctcttccgttgatggatggaaaaaagcaattaaaccagactgcaaacgaacattttttccatattattttgatccttctatgatgatttatgatttaatattaaatggtatccctttgcaggatggcttgaaccacttttggaccgaattgcacgtaattccaccactgtcgtgtgtcccgttattgatgtcattagcgatgagaccctggagtaccactatcgcgattcgggcggagttaatgtcggaggattcgattggaatcttcagttcagctggcatccggttcccgaacgtgaaaggaagcgccacaatgtaagtgaagttagagctttacaaattttaaccgttcagctataatttcttgctgtgtactaaagatattaggcaccatagaatgagcggtttttgtgcggttgacttaaacatgcatgaccatttataccgcaatgtttgcttttagttatgtttgttttacgttgccagggttatagccatatcctccaactttgctttctaactccattcgggcagtttttcccatcggaatgccaaaaacatgaagccgcttaaagcgctcgaacgtgactacaaaaactgaatgtttgccgtggaaagggaatgcgcctgtcaatacaaacacacattcacgtacgaacggtaaagtgggaaacggaaacaaacacccattctcacgtacaggccacaaaagtgtcgttcgcaatatgagctattagaactaagagtcgtttccctcgcgcagatgagcttgcaaattcatactctagttggactgaagttagtggaaaagttatagccttgcttagttatgtatgtatacggttggatagtggcgaatagccgtaaagcattccggaatttttaaagagctacaaaagctataaccgtaaaatagaggattcttaaggtctatctatccctatttcttggttaaataagaataatgggatttatggagagcatcaaagtgcagtaaagtaaatacctgaagactaacgaacaaaaactgggcttttaaatttccatacgataattctaaaatacattacaatttcccggaatgattattttccatgtctcagggtttttgcacttccttgaaagtttaaatgattttttcaccttttagcagtttctatctatcccttcaactttttcacagaacattttcttattttatgaccgcctgcgcccagcacgtacaaacttttcccatacactgacaagcaattagatactcccgcgcttggtgatgggggccaaaggagcttcacaaatggccattcgaaactgtcgatggcttttcagatccgtcgacagctgctgccgcatgtgtaaaagcgggtgaaagtcctgcttgccaaagccgttttccgcttttcacctggcatacatacacgaggcaaatgcaatcgagaaatgcaggccgtttcaatttactatttgtttaatgctttaattaaaagttcataattacaccgtgctctaccgtgattctt

SEQ ID NO: 18404 - DNA, 804 bp, DROSOPHILA
atgcacctaggagctgagtatagcaaaaaagtgattgatccgccggcgaactttgaggagaatcctggcgagctgggaaaacccgtgcgcctgcccaaggaaatgtccgacgaaatgaagaaggccgttgacgatggctggaccaaaaacgccttcaatcaatatgtatcggatctcatatccgttcatcgaactctgcccgatcctcgagatgcctggtgcaaggacgaggcgcgctatctaaccaatctgccaaagaccgatgtcatcatctgcttccacaacgaagcctggaccgtgctgttgagaacagttcactcagtgctggacaggtcgccggaacatctaatagggaagataatcctcgtcgatgactacagcgatatgcctcatttgaagaggcagctggaggactactttgctgcctatcccaaagtccagataattcgtggccaaaagcgagagggtctgatccgagcccgaattttgggtgccaaccatgccaagtcccctgttctcacctatttggattcccactgcgagtgcaccgaaggatggcttgaaccacttttggaccgaattgcacgtaattccaccactgtcgtgtgtcccgttattgatgtcattagcgatgagaccctggagtaccactatcgcgattcgggcggagttaatgtcggaggattcgattggaatcttcagttcagctggcatccggttcccgaacgtgaaaggaagcgccacaatttatgtttgttttacgttgccagggttatagccatatcctccaactttgctttctaa

SEQ ID NO: 18405 - protein, 267 aa, DROSOPHILA
MHLGAEYSKKVIDPPANFEENPGELGKPVRLPKEMSDEMKKAVDDGWTKNAFNQYVSDLISVHRTLPDPRDAWCKDEARYLTNLPKTDVIICFHNEAWTVLLRTVHSVLDRSPEHLIGKIILVDDYSDMPHLKRQLEDYFAAYPKVQIIRGQKREGLIRARILGANHAKSPVLTYLDSHCECTEGWLEPLLDRIARNSTTVVCPVIDVISDETLEYHYRDSGGVNVGGFDWNLQFSWHPVPERERKRHNLCLFYVARVIAISSNFAF

SEQ ID NO: 18406 - DNA, 8925 bp, DROSOPHILA
tgtttgccaaattactcttcctataccgatcgcccgaaacgctaatcaagtggacgcgtcccaaggaggagtacgtggacgatgatggcgacaccgactcgattcccagtcgaatgagcgtgcgccggccggagcaactgcagccacagcaaccgcaataacataggcctaatccaatcgcttaactaaagtagagtttgtttacgtatttattacgtattgcgttatcgtaggtttcatagtcttttttaaacgtttttataaggagaaagagaacacaaatcgaaacacaaaagtacgcatcacccatttatacagtcgttcgattttttgtcaaaagtactgcccatgtgtaaaactgtgtatttagtaactaagcgaaaagtgttgatgtttgttaaatcaaacaattgcaaataatagtaaattataattgcctaatcaaggaaataatttatttaagttacttctaaataagtgtaaaaattgaagattaagtgcgaaaatactaataataatgatgaaaactcatattcagggaatttagcattttacagaaaccgtaaatataataactaacctaaagcatccgagttattaagtaaaaatagcgattaaataataaatgttttatatttatacaaaaaaaaacaatatcatgtaaaattagccattgcttcgattcgcatacatttctatgctgtttgcctaattgtgccctttacaactgattaaatatattacgtaaatgttatactgtttactactatataactaaatcgatacatattgcatatatagagcgttgactttagttttaggcatatcacttgacatatttttgtattgaatgcaaatattatttgcttaaataactcctttctaggcaaattcatatcaaaatgaaaaaattaaatgatatatagtgcgttggcttcgaatggaaatttctcccttttgcaatctcttaaaattagtaaacgccaactagctcggtatgttttttttttatataccaaaacgaaactaaaatgatgaatgtaaaaaaaaatgaatttttatactaagaatcgaacaacttaaaacgtaaatgtaatatgtatgcatctatttttttagcgattcatttccaaaattagcttattaactgcgtggaatacttgcgaaataaaataaagaattaaaattgattgtaataaaaattaattgtgtaactgcgtttcagtcttataacattggagtttaatctgttataatcgtgaaattatattatggattataaaaattagattccataaaactttgccaaccagaaactcgatttttttggagtgtttgttgttttattgttttcacttaattctgatacaaatttatagattatcaaaaaagattaaagatggtatatccactcaaggaatacgcgtggcacagtttctatagtgggtgaacctcagttcgttatcctcacttatgtcgctctcgctgctcccttgacgattgaacttgacgacaggatacacctcctcccattccgattgagtgcgactaaggacaccgcgccgtcgcggcgttgtgaaggagctttctggctgcgatctggcggtggcagcggctggtgccggaggcattggattgttcagcatttgggtaacgcttttggacagtcgaatcgactggatgcgattatatccactgcccgttggcttgtagcgctcgagccttgatgtgaggcgcgccatttcattgctcatccactctggagcgcgcatggtgtggtgttcaattgcgacgactgctggtcaagtaaaccgagtgaggaatcggtgaagagcttttatagccatgggcaagtgacataagtcgaggcgaaaatcaatacggcttgccttaagcgaggttagggctcagttgctcgggtttccacccccagtgttattgacctattaactaatcaaacactcgaccatgtaacaccttcgattattgcaacaaaatatacataacatttaattaagaactaggcgaacggcgagggacacagagagagacaagttaaattagaataacagaataaaatagctacaacattcgagctaatggtgggtcagtactacgaaaatatgtcaaactgtgctatgtacataatctaagtccggatttccttggcttaggataccttacagttgtcgtcgtgcaaacgatcgccatcgagctgaacatcctcttcattggtggagaagatgccaccctgcaaaaccttgttgaccgcggcgcgagccaaatagcccgtggtctcggaatatggcaacgaatagaaagccttgagatcctcatttttggtctgctcatgctctggttttggttgatgctgtatgttgttgtccttgcagtacattgcgaacgcttccgccaagatgccgtccaagtctagagcttgcttaaagtgcagctcggggttactgaaacaaaatcaaatcaaattcaaaaatcctgactaattgtgtattttttaccgattaagaatggtggccacaatgcacaaaagctccacggttatctgacgcctttccggacggtcaatgcaaatcagagtttcctcgaccagcagattgaaggtcaactcgccgcggctcatgttggttagtgtgggcgtggctggcaaatgatgcccctgggtcagtatgccttgaggggttcgctgtaggatttcccagattttgttataaaaatgttttggcacacggcacaagcatccctccagttgacgacgttgtagggtagtgagcctaaaagaaatatatttaaaaacttggcctaataacataatattgtattacttacttttcttctacagcccattcgctgacggttaagactttctgaagaagtatgcggacttggaagggcgaaaggttgtcaacatcaatgctctgttgtcctgagatttgtaaatagatgcgcatggcctccagtacccaaccaatgcgaatttttaatatgccacgaaacattgatggattggtggctattaaacggccacaatacagaaccacttcctgctgcaacactgcctggatgacgtcgtagggttggacactcgtgtacatgacattttgaatctccgccggcgtcattggcttgtcgaataccgtctccttctggccaatgatgcccactgtgagctccttgccattcaccaacacagtggtgataaatggactaatggagtccacaatgtggtgaagaagagaggaacagtatcgcacggcacgccagtagcgcaaggaaccagcgcgatggtatagctgcgtcaaggccgtgtttacgttcagaccgtttacctcaaaatgaggaccctcgcggttgagaataataccccacaattggcacaaacagtaaatggaatccgtgctacgtagtgcgttgatgatatccggcgtgggtttggtatcgaagtgctgaaaaatgtataaatatgtaaattattgatcttaaatattgttccaactagcatactaaccgcaacagaaatcttttcctccacatatgtcagagctttgggcacatctgttagcgattggtagccaatatactcatggtttatctgcgagaacgcattctcgttgtcggtcagatcactttggttcataaagtcaagatgctcgatgcacgagctgctaatcagattctgtagacgaccgatgcgaactttcatgccatcgcagtagccctttttgagcatggccagcaggtcgagcatctccttaaactgcggatcacgcatgtgctcctcgcgaataagcagacaaactgtaggtctgcccgatagccgccagtacttgcccacaaactgtagctctgtcttgatgtcatcgataagtagagccatgtcccggtagagataaaagtcggagacctcaaagattagtggatagcagaggacggtcatgccgcagatgcgatacaccttgctggtgcccaaagaacccaccggtctgcatggacgaccggacaggccaaccttgttgttaactccgagatgttgatatactttaatgagctctgtagagctccagatttgcacaggttccacctaataaaaaataatgtgtaagtagaactttaaaaatatgagatctgtgaccggacttacctcatggggggtttgtgtttgaatgccataggtggccatcatagcctgcagtcgcatggactcggcaatcaggacaatctgcaccacaagatcagtggctgtgccctgtaaggattaccaaggtattatgagaagaggcattttcgaacaatattatatgttaggatgcatgaggccaattcaatattcttgggttttaatcacatgacaagaaaatttgtactagccagatgccaaaatgcaaaaacacacaaaggtaaacataaattgaagaaaggatcagggaaatactagcagagggataagagtgcgggatttgggagagtttaagtaacagttggagtatattaacatgccaaacaaatattagaattttataatatcttacaatttgaaacccccattagtaaatttgggattgaatttggaaaaatgtatcatacgttttttttaggatatttccaattgatatatttttgccgattagagttccctatcaaaattaagagagcctgtcaaaaccaaaaaatttcgacccaaaaattacctttttgtcatccaatattataggtatgcgtggtttctttattcacaatgcagaatttttagttgaggagcatatggatatttagcaatggcagttaattagttgttaacattttctaagggctcaagcaaagctgctgtctcttggcattttatttgtaatcgctgccccgaaaaacatttgaaattaagaatgcattgcacattggaaggcgtgatcatattttagaacattttaaggcgaattcccaatgttagcacctttttgaaacatcaagccaaatcaagcttatgcggccattgggttaattacataataaattaggaactgcaaactacgtaaataaacccaaaatctggtgacaattacttacagtgcccggtttagcctatagagcgtgtgtttatgttcattttttaaacaaaatatgcagtatattgataggtatataaggaggaaaagaaaccgaaaagagtagagagaaaacttttgatttagataccaaaaagaatttgttcactatatacaaataaaacgggaatacagaaataataatttatactgaaaataggcaaataatcatttctatagtgtaggtgtgtgtgatttgatttgatcgtaaagcgtgtcatagttatatattttcgatcagtgtgtcttgccgaacatgaaaagccacaatgtaaactaggtagtgatcttttgtgctaatgtgtctgtggtcttaaaaagcaaaatttagtttgtacacatacgcataatttaggttttagataattttgaatttagaaatcaataaaatatgttggtacagcagggcatctacttactttgtgtttttcgtcaatagctttgccctgtttttacgaaaccaattataatacaatttgggatttgattttgatcattttggatatatagacgtgtggtagcagtagtattgggtagtggttggtagtagagaatgaatagatgtatatagaattaaatatcaagagccaattataaactaaacccatctaatgtacttaggcaaaaaacaacttatgtgtaaagtattccaattgagatcgaacgcagacacacacggcagacacacaaaactcatcagcggcagcggcggcagaagcgaaaactcccatataggcaagtaggaacccttttaaaccgacgctatgaaatgtctttccaatggcaaaaggagaaatcatagtttcttaacttctttcatctttcagaaataacgatgtttaacctattgtgatccagaatgctttgccattggttaacaatttaagaaaacacttcatagcgcttagtgccctccaagaatcccgattccaactcacctggaaagccgaataacgacccgcccttctaggccgattatagcttggcaagtagcggcggattggatccagttcattgatgtgtaggagtcctgcggtcagcagctgggctatgataaagaaggactgcccccagaggaacagcgattgcgatggagcacgcatgtaggagccatctccatccggcgcatagtacatggtcactacgggatctccattgacatcagtacgcaaacagcgcctcaaatcgttttggaactcttcaatttgttcattgttattcttgaacacgccatcgataatcatggctatgaaaaagagcggccattcacattccaggccttcgaattcctttagctcgccagagtgataatagcgtcgcgatttgtcctcgtttttgctgaggaatccatcacgggtgaagcgcttaaagcccattttgcagcgcaaacgatttacaacattttgtttggtctgctccaccaggcgatcttcatgcgaggcaaaggctgggaaagaaagggtgagaagcagtgaagcatcaactccctaaaagttgaaactttaattaaatgatgcaaactacaagtaaaatattttagcacaacctttgagcttgattccctgggcagcatggtttcgaaaatactgcgattccggttgtgggcatcaatgtccacatagacaacgctccatgaagctcctttctcgccgaacagattgcacccgttaatggcctccaaggcggacttagccatgccaatggaggaggcatggatctccggggtgccattgttatatttagagccccgctcccacatgccaaagtcgggcgtacgataggcgcgctccacatagtacactagattctggacaaaggccacctcgtcgtgggtgtaaatgatctgcaggccagaggttatcatctggacgaggaacaacagatagagagaaacctaggaggagaagttcaatgcattttaaaactcttcgataagaaatcccctagaactcacgcaatctatctgtaggtgattgtaaaactcatccggatatatcttctctccggtgtgcagctggaatttgctatgcagtgcgtgctgattggactggcgctgcttaaagagctccacccgcgatgcctgcttgacccagcactcaagaatgcctcgcatgcacttcacagtgctctggcccagttcgtaggactttccgcggtcatcgtcgatccgtctgtacgcctggtacaagctccacacggcggatgcgcaatacacactgtcccgcaccgatcccaccacctggtcggtgctcatcaccggaaacaaaccggtgatgggactctggtatcgcagcagttgacgcttgactgagggaagagaaagtgttagattcacccggttatcgcgtcttaattggctatgcaaataaacaaacgattctgtttacaatcaagtgtggggcgtcgacatttcgcgatgtgcgatgcttattaatagacgccgtcaattggtgctcaattggccgccccacagacgactccaaggttatataaatcctcaccaatgccatagtagatgtccagctgcttcaccgtgtcctcgtagttggacgttttcaggaactggtccagattgatctcctccaagctgttgtggcgaccactgtccggagcacccgaactgccgcctggagttgtgaccgagagaccgagactggaagtggaaatatcctcgccattaatatgggattattttcgatgttttcatacttacgatttcggcacatcgcgcattgtttcttcagcaattgcaaattatattgcaattgcgcttaagaaaatgtatcaaagtcaaaaaaaagtcaaacgcttctaacagctgagcagcttttcattgcgatctggcaatgctctaagctaaaatcgattgttgaagaccaatcgttaaaggcagagcgggtgatttaaatcggatgcgcaatttaagaaacatattaagttctcgttattgtttgaagttgaaataattcggtgatataattttaagcttataaataataaaataaaatatatcaaatataatgttaagtcaagtccaagtaataatttctgaagcacactgctatttaccaatttagggtgaccatttagagtgtctgatgccgtttgccgtttagtgtacgctatggtcactttgctgccggctttttttttgtatgcgatttgtttttgtgcgatttatgctgtggtcctgattgtccttctgtcgaaatgcgtgcgcctgatgcgctcctgctccgcgtcgctctcctgcttctactgctgaccaccgtccgcggaaccctcgccccggacagccacaaatcgaagagcaagaccaaggagagtgctctgcgtggcggtccgcaagaccaagatgttttcgatctgggcttggttagtcccgagcccctggccaaggatatcgtgagcaatcatcgcgggtacttcaaggagacgggattgcgacgcttcaatggcaccaccttgggctatgtgactccagtaagcagaggacgtactcccacattttgtgcatgtgtattaatctattgtttgctttgcttgtagtggaactcgcatggctatgatgtggctaagatatttgccaagaagttcgacattatctcgccggtttggctgcagattgttaagcagggagatcgttatgccgtagccggaacccatgacatcgatgcgggttggctaaccgatgtccggagaaagggtaaacaggtgcacaatcagcgaacggttaaaggtatgagaaaatgatacccgctggcgttagtctaaactcactttccttggatttcagtgtttccccgtttta

SEQ ID NO: 18407 - DNA, 3838 bp, DROSOPHILA
aagcgtttgacttttttttgactttgatacattttcttaagcgcaattgcaatataatttgcaattgctgaagaaacaatgcgcgatgtgccgaaatctctcggtctctcggtcacaactccaggcggcagttcgggtgctccggacagtggtcgccacaacagcttggaggagatcaatctggaccagttcctgaaaacgtccaactacgaggacacggtgaagcagctggacatctactatggcattgtcaagcgtcaactgctgcgataccagagtcccatcaccggtttgtttccggtgatgagcaccgaccaggtggtgggatcggtgcgggacagtgtgtattgcgcatccgccgtgtggagcttgtaccaggcgtacagacggatcgacgatgaccgcggaaagtcctacgaactgggccagagcactgtgaagtgcatgcgaggcattcttgagtgctgggtcaagcaggcatcgcgggtggagctctttaagcagcgccagtccaatcagcacgcactgcatagcaaattccagctgcacaccggagagaagatatatccggatgagttttacaatcacctacagatagattgcgtttctctctatctgttgttcctcgtccagatgataacctctggcctgcagatcatttacacccacgacgaggtggcctttgtccagaatctagtgtactatgtggagcgcgcctatcgtacgcccgactttggcatgtgggagcggggctctaaatataacaatggcaccccggagatccatgcctcctccattggcatggctaagtccgccttggaggccattaacgggtgcaatctgttcggcgagaaaggagcttcatggagcgttgtctatgtggacattgatgcccacaaccggaatcgcagtattttcgaaaccatgctgcccagggaatcaagctcaaagggagttgatgcttcactgcttctcaccctttctttcccagcctttgcctcgcatgaagatcgcctggtggagcagaccaaacaaaatgttgtaaatcgtttgcgctgcaaaatgggctttaagcgcttcacccgtgatggattcctcagcaaaaacgaggacaaatcgcgacgctattatcactctggcgagctaaaggaattcgaaggcctggaatgtgaatggccgctctttttcatagccatgattatcgatggcgtgttcaagaataacaatgaacaaattgaagagttccaaaacgatttgaggcgctgtttgcgtactgatgtcaatggagatcccgtagtgaccatgtactatgcgccggatggagatggctcctacatgcgtgctccatcgcaatcgctgttcctctgggggcagtccttctttatcatagcccagctgctgaccgcaggactcctacacatcaatgaactggatccaatccgccgctacttgccaagctataatcggcctagaagggcgggtcgttattcggctttccagggcacagccactgatcttgtggtgcagattgtcctgattgccgagtccatgcgactgcaggctatgatggccacctatggcattcaaacacaaaccccccatgaggtggaacctgtgcaaatctggagctctacagagctcattaaagtatatcaacatctcggagttaacaacaaggttggcctgtccggtcgtccatgcagaccggtgggttctttgggcaccagcaaggtgtatcgcatctgcggcatgaccgtcctctgctatccactaatctttgaggtctccgacttttatctctaccgggacatggctctacttatcgatgacatcaagacagagctacagtttgtgggcaagtactggcggctatcgggcagacctacagtttgtctgcttattcgcgaggagcacatgcgtgatccgcagtttaaggagatgctcgacctgctggccatgctcaaaaagggctactgcgatggcatgaaagttcgcatcggtcgtctacagaatctgattagcagctcgtgcatcgagcatcttgactttatgaaccaaagtgatctgaccgacaacgagaatgcgttctcgcagataaaccatgagtatattggctaccaatcgctaacagatgtgcccaaagctctgacatatgtggaggaaaagatttctgttgcgcacttcgataccaaacccacgccggatatcatcaacgcactacgtagcacggattccatttactgtttgtgccaattgtggggtattattctcaaccgcgagggtcctcattttgaggtaaacggtctgaacgtaaacacggccttgacgcagctataccatcgcgctggttccttgcgctactggcgtgccgtgcgatactgttcctctcttcttcaccacattgtggactccattagtccatttatcaccactgtgttggtgaatggcaaggagctcacagtgggcatcattggccagaaggagacggtattcgacaagccaatgacgccggcggagattcaaaatgtcatgtacacgagtgtccaaccctacgacgtcatccaggcagtgttgcagcaggaagtggttctgtattgtggccgtttaatagccaccaatccatcaatgtttcgtggcatattaaaaattcgcattggttgggtactggaggccatgcgcatctatttacaaatctcaggacaacagagcattgatgttgacaacctttcgcccttccaagtccgcatacttcttcagaaagtcttaaccgtcagcgaatgggctgtagaagaaaagctcactaccctacaacgtcgtcaactggagggatgcttgtgccgtgtgccaaaacatttttataacaaaatctgggaaatcctacagcgaacccctcaaggcatactgacccaggggcatcatttgccagccacgcccacactaaccaacatgagccgcggcgagttgaccttcaatctgctggtcgaggaaactctgatttgcattgaccgtccggaaaggcgtcagataaccgtggagcttttgtgcattgtggccaccattcttaatcgtaaccccgagctgcactttaagcaagctctagacttggacggcatcttggcggaagcgttcgcaatgtactgcaaggacaacaacatacagcatcaaccaaaaccagagcatgagcagaccaaaaatgaggatctcaaggctttctattcgttgccatattccgagaccacgggctatttggctcgcgccgcggtcaacaaggttttgcagggtggcatcttctccaccaatgaagaggatgttcagctcgatggcgatcgtttgcacgacgacaacttcgtcgcaattgaacaccacaccatgcgcgctccagagtggatgagcaatgaaatggcgcgcctcacatcaaggctcgagcgctacaagccaacgggcagtggatataatcgcatccagtcgattcgactgtccaaaagcgttacccaaatgctgaacaatccaatgcctccggcaccagccgctgccaccgccagatcgcagccagaaagctccttcacaacgccgcgacggcgcggtgtccttagtcgcactcaatcggaatgggaggaggtgtatcctgtcgtcaagttcaatcgtcaagggagcagcgagagcgacataagtgaggataacgaactgaggttcacccactatagaaactgtgccacgcgtattccttgagtggatataccatctttaatcttttttgataatctataaatttgtatcagaattaagtgaaaacaataaaacaacaaacactccaaaaaaatcgaatataaaaaaaaaa

SEQ ID NO: 18408 - protein, 1216 aa, DROSOPHILA
MRDVPKSLGLSVTTPGGSSGAPDSGRHNSLEEINLDQFLKTSNYEDTVKQLDIYYGIVKRQLLRYQSPITGLFPVMSTDQVVGSVRDSVYCASAVWSLYQAYRRIDDDRGKSYELGQSTVKCMRGILECWVKQASRVELFKQRQSNQHALHSKFQLHTGEKIYPDEFYNHLQIDCVSLYLLFLVQMITSGLQIIYTHDEVAFVQNLVYYVERAYRTPDFGMWERGSKYNNGTPEIHASSIGMAKSALEAINGCNLFGEKGASWSVVYVDIDAHNRNRSIFETMLPRESSSKGVDASLLLTLSFPAFASHEDRLVEQTKQNVVNRLRCKMGFKRFTRDGFLSKNEDKSRRYYHSGELKEFEGLECEWPLFFIAMIIDGVFKNNNEQIEEFQNDLRRCLRTDVNGDPVVTMYYAPDGDGSYMRAPSQSLFLWGQSFFIIAQLLTAGLLHINELDPIRRYLPSYNRPRRAGRYSAFQGTATDLVVQIVLIAESMRLQAMMATYGIQTQTPHEVEPVQIWSSTELIKVYQHLGVNNKVGLSGRPCRPVGSLGTSKVYRICGMTVLCYPLIFEVSDFYLYRDMALLIDDIKTELQFVGKYWRLSGRPTVCLLIREEHMRDPQFKEMLDLLAMLKKGYCDGMKVRIGRLQNLISSSCIEHLDFMNQSDLTDNENAFSQINHEYIGYQSLTDVPKALTYVEEKISVAHFDTKPTPDIINALRSTDSIYCLCQLWGIILNREGPHFEVNGLNVNTALTQLYHRAGSLRYWRAVRYCSSLLHHIVDSISPFITTVLVNGKELTVGIIGQKETVFDKPMTPAEIQNVMYTSVQPYDVIQAVLQQEVVLYCGRLIATNPSMFRGILKIRIGWVLEAMRIYLQISGQQSIDVDNLSPFQVRILLQKVLTVSEWAVEEKLTTLQRRQLEGCLCRVPKHFYNKIWEILQRTPQGILTQGHHLPATPTLTNMSRGELTFNLLVEETLICIDRPERRQITVELLCIVATILNRNPELHFKQALDLDGILAEAFAMYCKDNNIQHQPKPEHEQTKNEDLKAFYSLPYSETTGYLARAAVNKVLQGGIFSTNEEDVQLDGDRLHDDNFVAIEHHTMRAPEWMSNEMARLTSRLERYKPTGSGYNRIQSIRLSKSVTQMLNNPMPPAPAAATARSQPESSFTTPRRRGVLSRTQSEWEEVYPVVKFNRQGSSESDISEDNELRFTHYRNCATRIP

SEQ ID NO: 18409 - DNA, 3707 bp, DROSOPHILA
tacgctttaagtataaatgtattttaaacaattaaaagcacagtgcaaataagcaaatctagcccgtgcgcaacatctttgcttcccgcttctcctgcaactcgcgccgttgctgttccacaattaacttgcgctcctccaggaactcgccataggccgccggatctatttccctgaccactttgatgccacaggtccgagcaatgctgatgagcatctcacacatttgctaagagacaaggcataaacttgagtcgaagttatatctcaaacttttcggaataccgacctgcatggtaagaagtacattgggcgggtcctgaatcttaatagctgcaatctcgtacaaatgcttgagagtgatcatgccggcaacctccttgccaggagtcatggtgcccctttgtatgcccgccgcttgcttcaggaaaaatgtggccggcggatggtggatggccaagtcgtagctgcgatcgctgtttacggaaattctgcacggcagcggtacgccctctttcatttccgcggtcttggcattaaagtccttgcagaaagcggcgatattaatcgctctctgtgtgtggttaaaaacaaaattatatacatattttagttttaaagccggctaactcacctgtcccaacatcggtcccaatggcggacctgcagcagccattcccgcaggtatattcgtcttcagtttgctcgtgtgcgtcacacgttccaccgtcttctttagcgatttcagcttacccgctgccttcgacattttaattgatttattttaactaaacaattgattcaaactgttatgcaaagcgaaatgtgttggtggaaggaagaagaagcagcaacagctgatggtattgctgtcgtttctagttggaacgtatagctgaatagctaaaaacatacttccgaatgtggtctttagcaacattaaacatgagatgatggtttaaaagatccaaatgtcatttgcacaatagcaggcttttaaaaatactatatacaatactatgaaagcagctaaaattttaaaagccctttgaattatagctaaatgtacaatagccaaattcccgtgataagcagacgattagccacccctgatgcgaagaagaagcatcgcggccaacagctgtttgcattgcctatcgcctatcggtagtcgagggtgtcgcagcaggcagcttttgtggcagagtgccaaattgaaatcagctgccagctgagaagtgataaattaaataacaataacaaacgccgtgtaatcacataaacccatggctttgcgcggttcccaccgcttggaagtgatcttcaaacgctgcattgcctccccggtgttacacagtcatgcagccaatcggaggagcagtcaactagcgatcaaagaaggcgatccaaacagcaatggtaacagtgggcaatatcagcaaaatggtgaacaaaaagaaaaaggctggagacgattggttcgattctttgtgcccttctccctgggcgctgtggtcagtgcggcgatcatacagcgggaagacttaacgccaacgatcgccgcttccaaaatgaccggtcgtcggcgggacttcaactttatagctgatgtggtggcaggttgtgcggattcggtggtctacattgagattaaggacacccgccactttgactacttcagcggccaaccgattacggcatcgaatggttccggcttcattattgagcagaacggtctcatccttaccaacgcccatgtggtgatcaacaaaccacacacaatggtacaggtgaggctatccgatggcaggacttttcccgccaccatcgaggacgtggatcagacatccgatctggcgactttgcgcatacaggtaagcgtacagttgaatttctaagcagcgcaagttctatatgcatatctttaaatccaatcttacaggtgaacaatctttcggtgatgcggctaggcaagagcagtaccctgcgatccggcgagtgggttgtggccttaggcagtccgctggccctaagcaatacggtgacagcaggcgtaatcagttcaacgcagcgtgcatctcaagaacttggccttcgaaacagggatatcaactacctgcaaacggatgctgcgattacgtttggcaactccggcggtcccttggtcaatctggatggcgaggctattggagttaactcgatgaaggtgacggctggcattagcttcgcaatacccattgactatgtaaaggtgtttctggagcgggcggccgagaaacgaaagaagggctcggcctacaagactggctatccggtgaagcggtacatgggcatcaccatgctgacgctcacaccggatattctgttcgagctcaagtcacgaagccaaaacatgcccagcaacttaacgcacggcgtgctcgtgtggaaggttatcgttgggtcaccggcgcacaggtgggtcaatacctaagtggttaacctatcaatcaaccagcattttccattacaacgtgcttttttgctctacctcctttttagtggtggactccaacccggagacatagtgacccacataaacaagaaggagatcaagaactcatcggatgtctacgatgccctggcggataatagtaaaactctagatatagtgatcctgcgaggtgtgaagcagatgcacgtgaccattacgccagaagatccctagtttaacctgtatgcagcacctgtacccaattgtatatatttatatatctaaacaaaacctaccgatcctgggaagaaatcgctgacaaacccaccccccacacgctcctattcctaatcgggtgcgcctgcctatatttgtctctggctaacgagtagggaaatttgcatagatcgcgggctcgttatcagtggccattattaacagcggcacgaccataagttaatctacgcatcggacggcacgaaaatgtatctccgactgggtcgattgggtcgtctgtccgtttccgaacatcatcgatttctctttcatggagcgctgtgcgtgtcccctaccatccgtctgtctgaccgtccgtccgtccgtccgtccgtttgtcctcttccaacaacgacaaaaatatatttacgctaattgaaatatcttgcgttgcgatcaatcgatgccatattttttataggccaaacctcggcagtgcaaaaaatgcagcagcaacatcagacgcaaaaaacgtcgaaaagcgaaatgcaaatttcaataaatttatgcaactgtattcccagcgcttcacttggccagctgttcaataccctcgataggggtacgttaggtatattttacaaaatgaaaaattctattttttgggtgctgagaagttcaatggtcgaatagcgaacttattgcaaattattattaataattattttatgaaactgaacctttaaaatgtattgtctagttgaatcacattgcatattcagacaaaaatattcagtcgtagtttatgatgttaaccctatttcatcgaaacaaacatgaatgtgtaattgaaatgagtcttctcaaatctacatgttatgtgcataaacaaaacaaacctaaaatatgacctaatagttgaaatgcattaaatggaatttgtatccgaaacaatctttgtacacatttaaaaaaaagggtattcaaacctcacatagctgagctcagattggtttgg

SEQ ID NO: 18410 - DNA, 1555 bp, DROSOPHILA
aaatactatatacaatactatgaaagcagctaaaattttaaaagccctttgaattatagctaaatgtacaatagccaaattcccgtgataagcagacgattagccacccctgatgcgaagaagaagcatcgcggccaacagctgtttgcattgcctatcgcctatcggtagtcgagggtgtcgcagcaggcagcttttgtggcagagtgccaaattgaaatcagctgccagctgagaagtgataaattaaataacaataacaaacgccgtgtaatcacataaacccatggctttgcgcggttcccaccgcttggaagtgatcttcaaacgctgcattgcctccccggtgttacacagtcatgcagccaatcggaggagcagtcaactagcgatcaaagaaggcgatccaaacagcaatggtaacagtgggcaatatcagcaaaatggtgaacaaaaagaaaaaggctggagacgattggttcgattctttgtgcccttctccctgggcgctgtggtcagtgcggcgatcatacagcgggaagacttaacgccaacgatcgccgcttccaaaatgaccggtcgtcggcgggacttcaactttatagctgatgtggtggcaggttgtgcggattcggtggtctacattgagattaaggacacccgccactttgactacttcagcggccaaccgattacggcatcgaatggttccggcttcattattgagcagaacggtctcatccttaccaacgcccatgtggtgatcaacaaaccacacacaatggtacaggtgaggctatccgatggcaggacttttcccgccaccatcgaggacgtggatcagacatccgatctggcgactttgcgcatacaggtgaacaatctttcggtgatgcggctaggcaagagcagtaccctgcgatccggcgagtgggttgtggccttaggcagtccgctggccctaagcaatacggtgacagcaggcgtaatcagttcaacgcagcgtgcatctcaagaacttggccttcgaaacagggatatcaactacctgcaaacggatgctgcgattacgtttggcaactccggcggtcccttggtcaatctggatggcgaggctattggagttaactcgatgaaggtgacggctggcattagcttcgcaatacccattgactatgtaaaggtgtttctggagcgggcggccgagaaacgaaagaagggctcggcctacaagactggctatccggtgaagcggtacatgggcatcaccatgctgacgctcacaccggatattctgttcgagctcaagtcacgaagccaaaacatgcccagcaacttaacgcacggcgtgctcgtgtggaaggttatcgttgggtcaccggcgcacagtggtggactccaacccggagacatagtgacccacataaacaagaaggagatcaagaactcatcggatgtctacgatgccctggcggataatagtaaaactctagatatagtgatcctgcgaggtgtgaagcagatgcacgtgaccattacgccagaagatccctag

SEQ ID NO: 18411 - protein, 422 aa, DROSOPHILA
MALRGSHRLEVIFKRCIASPVLHSHAANRRSSQLAIKEGDPNSNGNSGQYQQNGEQKEKGWRRLVRFFVPFSLGAVVSAAIIQREDLTPTIAASKMTGRRRDFNFIADVVAGCADSVVYIEIKDTRHFDYFSGQPITASNGSGFIIEQNGLILTNAHVVINKPHTMVQVRLSDGRTFPATIEDVDQTSDLATLRIQVNNLSVMRLGKSSTLRSGEWVVALGSPLALSNTVTAGVISSTQRASQELGLRNRDINYLQTDAAITFGNSGGPLVNLDGEAIGVNSMKVTAGISFAIPIDYVKVFLERAAEKRKKGSAYKTGYPVKRYMGITMLTLTPDILFELKSRSQNMPSNLTHGVLVWKVIVGSPAHSGGLQPGDIVTHINKKEIKNSSDVYDALADNSKTLDIVILRGVKQMHVTITPEDP

SEQ ID NO: 18412 - DNA, 12237 bp, DROSOPHILA
tcgcgatgtcatcgccacgtacggtgtggtgggcaaacgcaccaggagtaacaacatttgcgaaatctatcagacgctgggcatcgaagctgcccgaaccatcattatgagcgagatcaccgaggtgatggagggacacggtatgagcgtcgattggcgccacatcatgctcctggccagccaaatgacggcgcgtggcgaggtgttgggtatcacgcgacacggcttggccaaaatgcgtgagagtgtcttcaatttggcatcggtaagaagagatttcactatgctaagccgtacgtatgtatattaatgtatttcttttttgccacgtcagtttgagaagacggcggaccacttgtttgatgcagcttactatggccagacggatgccatcaatggcgtttcggagcgcattatcctgggaatgccagcgtgcattggcactggcatcttcaagttgctacaacagcacgaggacaagcaggtgccacctattgagcccaccatctgcagttccctgaatctgttgccaagcaaaaccacataagaagcgggccttcttgacgttatacttttataacttcattattgtaaataaatagtatatacatatttgttctgtctagctatgttaagcaaatttacctagattgtacttagctgcggaaattaaagatggtatttcttatattttggagctttgattaaattcgatttaaaattgctgatgcaaataacgaaaatattattattagtagtatattcaaatttgaattaaccgcgcagttcacattccgccgttccacatttgcttatgttcaaattgccacgacatggtcacactgaacgcttgagtttatcaaaacaacgtgttgttattaaattatggttttgatttctgacgcattcggtctggaaatatccccaaacgggatcctggttggtatgtatattgccaaaaccttgcaacgccctctaataaacatcatatacacaggtcatggcgatcaggcggtgttatatagctcagaacccaaagtcgagttgccggttcaactgcgtgagggaaaggttcgaggatttgcgtggagttccttgcgtaaatcgcaaagattattattgctatatagcgagaacgaatactccctgattaggtgtacaaccagctccgaaaacgatctctttcagctcgtttacgagggcgaaaccagagattggattaatgccgctctgtttttggaagatgaaaacgagtcggaggatcgcaaacgatttgttcttcacacatcgcacagtgctctcctttatatggaatatgatctaacgtcgaatgcagattgcactgtcttggagctggctcgatgcaccgacagttccatactctattacacgaaactccatgggagttcctttaataaactggccatcataagcggtaatgcctttggagaacttttggtatggcaaacgcagtttcccacagaatccgatccaaaatctgtaatgaaaacatatcccttgctcttgcgcattgaagcgcacaatggagtgatacactcaattgagtttgacttgcagtcgcagttattggttaccacatcggatgatcgttcggtcaagttttggaatatacaaaagtctggcgactggacaacagctgaaataaagcccatgttcagttgttacggacacagttcgcgtgttatgtgcgttgttatacttaaaatcggtaagatttgcttgaaatatgactatctttcctaattttttataactatccttgccattgcagatgaccgtacatttgtggccagcggcggtgaggattcgtacgtctgcatctggagttcatctggcgaattaatcctaaagcgtcgtcagcagttcggcgcgccaatttggaggctaggcttcagccaagacgcggaaatcctctatagcaccagttcaacgggtaatttggtcgggcaaaatcttaaagaagtcctcaatcgacccaaaattgaatccaccatattgagcagtctaggcgatgcaaatgagttcgtgcgaaatctaaagtttgtcaataatgagataattgtgggtttgagtagcttaaaccgcttgtattacacccgaatatccccggattcttcgcatgagaacaagtggctcatggtcaatgactttccgtcgtacaaacgcactgttttggaagtatttgatgacattatagccacctgtggacatcggcgcataacactgcataggtataacacaaatacaaatgattttgaacaactattcgatggcattaggatgaagggcactatacggtcatttcaattcctaagcagagatcgctatctagtgtccgataacttgggctactgtctgctactgcaaacccaccagctgcatatagagtcgcacatcgcactattcaataaccgcgagccgtggataactgcggccctgctcatttcagagcaatatctattattgggcaaccgcgagggacatgtgatgctctactgccgcagcagtgccagcgacgacttccaattgaaggactcaattcggtatttacacggtaaaatgggctcgaacttttttaagttgctcagtcttaatgcggacaatgcgcatgtgatgagtggtggtcatgaggcatttttaaaataccttagtgtgagattctctgactcaacactacgtgttagccaacgtgagggcattccattggcttgggtcgaagcatctccatcggatgacttgattttgggcttcaacgacaatcacattgtggcctggtcccgacgaaatgatatcctcttgcaattggcctgcggcggaggccatcgttgctgggactttcgactgagtgatggtgatagtcaactttccattgcgtatgtgaagcaaaagcgtgtgtacttctatcgcaactcgctctacaatgccgttgacaatcggcttaaggatatcgaacccaataactggcacgtacgaaattgcaatacccttcgactcattacgccgagaaatcaatccgatccctttatcctttccgctggcgatgataatatcataaaagtcacccaagtgaccaatgactcattgtctcagcgtgcggaaatgcactcccatatctcaacagtgcgaagtttgcaggcgattccatacaaatcgaatggcggcgactcaagtacttggcttgttttctccgtcggcggacgatcgcaattgtgcattagccaacttagcatagatgcgagcaataaatgctggataagtgaaatatccagccacacgctgcacaacgtggccgcatccaaaacgagtaccattgaagcgcgactaatggccatagatgttgtccagcattcggatggggatctcttttcaatatatgttgcaggcggtgatggaaatataagtcactatatatgggagcttgaaacccccaaccaactagacctaaaacattttgtagacatacaaagatgtccactgggcattcagtggattgcgagcaagggaatgctgttggtatccacaacaaatggcgaagtctacggttttgatcgtaccctagaaacgacatattttcagcttcaattgcacgtaactggtataaataccattgatatatatgtggataggcatcttttacacattctatccggcggggatgatgaaagcattaagtacacggtactcaatttaaataacaataatgtagaacaaaaaatcgagtacttgggtcttcacaatgcccaagttaatgccctggcaatacattgtcctaccaaaagtgtcgcagcatccgaattgttcgcctatacctgcagcatagatcgtcagatttatagaatagatctcagtactcataaatataagcgagttggttatacgtgcatagcagacgtgaaaggaatgctcctggatgaacatcagcgaatgtatttctacggatgtggattgcagactatgagcataagtaatatactttaagagaatatccttcgtgtatcattggcacttttgtacatttgttatgttgtctagtgtttaataatagaaaagtgaaactgccttatctgtcatttgtttagatgtaactttagtggcggcaatttttgtatttgtttttaaataaatgtgaatgtagagcctattcaaatgccttgccaaatttgccatgtcttttgcttgctggtttggaagaactttcaaaaacaaaaacacaacaagctagtcttaattctgtcgcttgttttgcctgtgatgtcgtccctttttctgctattcattcgctcatcgagtgattcaaatatgagagactactcgatacgagcagaagccgaacttttggagttcagctggagctcactcattggcaaaatccaagagagacgcgccaaaatggcaagtaagcagcgaaagtaagtagaaccgtactaatatcttagatattgaaatggctcatatcattcacttcatttccgccacttgtagttttacaacaaacgtattcattccggatattcgagtggcattcgcacccaactcaaatgctgcactgcgacggctgatgggcgatgccctgggtaaactttccatgtccgaagataagattgtcgactttgagaattgcaatgatatgcgcatccacgccgcctccgaacattatttggcaagtgtctgcttccggaatgtggatgagtcactaaatggtctgcccaccgtgctgaactttgccataatcatgccgtcggagttgcgcaactacgaggacacttggattggggacagctggaaggaaaccactacgctgatggatcgtgatgtcgccgaggaagacgagttcgacgaggatggctacacggactacatgggcgagggtttcgtgccgctgcagtaccacatcagcatgcagttcctgagagctacggcttccaaggtggaaaagttacccaaagtcgtgatgcgtcgcttcaatgagaatcccaatgtgctgctctccgagggcataggaacttcggtcgtattgctaatacttctgggtttcatgttcccggtgaccatcctaactacggttcgtcctattccatagccaaacacttagcttacattcaactcttctagctgatcgttgaggaacgcgaactgggacagcgttatatgttgaagatactcaacgcgagtgcaacattgcaaatggcagcgtggttcttcaatgtcttcacacacttcctgattacctcattgctcatcacaattctactgaaggtatgtacatatgtatgtacatctcgtatccaacatgatcaatccaacagtccggttcggcattttcagatcgaatggaatggagcgacggcagcagttaacaagtgtccctggcccatattactatgcttcctcatctcgtatggatgctccgtgaccagtttgataatactcatgacatcggctatgcgcagatcgagagtagctatggttatggcaccgatcatatggatactgctggccctgccgcttctatcgaagaaggagctcctgtccgatgggccagatgtgttttacggattcgccaccgtccttctgtgcaacgtatcattcagtcgcggtctctcgaagatcttctacatcgaggactacacgctgggagtgacaataggaaagtatatgttctacagagtcagcaaatccgatttcggaatctttgtgccgatcgtttgtttctatgtacagaccattttttgcaccctactcgcgatgatttttgaaaacaatgcctacttttggctggcaattcgcgtgaagaatctgctaaagaagtaccatgccaccaggtcggctgtgggcaggttgaaacgtcagattccagaagttagtttttcaaaaacatcggctgaagctctgatcgaatttcgtggcgtatggcaaaagtattcgaattcgacatatgttgtgcaggacatcacactgaatgtgtatgccggcgaggtggtcgctctacttggtcacaatgcatcgggcaagagcacgatcataaagatgttatatggtcggacacggcccaagcttggcgagatctatctatccggtttcaatattgtaacgcaacgaaaagaggcactgaaaaattcctcaatatctatgtcgtacaaaaccctgttcaccgagctcgtagtgctcgatcatctagtgtttctttccaggctgcggggtcttagcaagaccgaggccaagctagaggctaaagcacttcttcgatatctaaagcttgaggattgggaaaagactctggttaatgacctgaccattggacagcggagagtgctgcagttcctatgcgccttcgctggaggcaaccagatcgtcatccttgacaagccgttcgatggaatcgatgagcagcggaccagtctgttctatagtttgattctggatcaaaagaagaaccgctcaattttcttcacttccaacaatcaaaaagtggccagcggaatcgccgatcggatttttgtactctccaagggtaaacttcaggcttttggtacggtaaagaagctgtgcaggatgttaaacgagtcctatcgtttggtatgatataatatgatattacaatattcaaattataatcccttttaatccaacagattatttttggcaacgaaaagtgcagtttcaaggatgtgtatgcgttcatggcgacctttataccggaaattgagatggactccatattggctgactgcgcttccttccttgtcaagcacaaataccataccgaactgattaatttgatcgagaacttggccagattgaaaaatgatctaaacgtatacagtttcgaaattcatgagtgcagcattgatgacattttagctagcctatacacgcgtgataagtcgactttagagtttggccagcccggactacaaacacttctggcaagcagacaacagtccgcaaagcggagattcatcataccgaccatgtatttgctggaggagctgcgtcagctgctgatcgccgacacgcgcaactggtttctgccaattctaaaattgactctgccatcgcttgtcgtcgtctggacactgagtatgccatatttctggcacaactgccggcaaccgggacacataacgtttccgatgtccgatcatggcgatggcattatactcatgcaaaaggatacgctagatagcgaactactagtggccagtgagatgtatgccaaagtaggggtcacagaggtggacaagactgtggatatcacgaccttcatctataactacgagtacaaaaacagtctgttatcggatgcggatattatggaggcggtcatattctcaaatgtccagatcgaggtgctcttcaacacgaagtggcctcacacagctccggatagcttggctcaggctttgaactcgctggcagtgtatgtttccatgattgttatatatcgtataaaatcctcacatgcgtctccattttcagtgccttcatcgatggcgatgcgggcatcaaggtggaactggaagtgctgcccttctcgaccatccacacgctgcaactgcatctgaatatcgatggatacgacttgatcttcgccagctgcctgagtttctgcttctgcttcatctggagcatacccctgctccacatgacgctcagtagggacggtcgctacaactacgtggaactgattgccggcatgccgactatcgtgctcatcgtggccttcctgatctacgaactattggtggtgctcctcgccctgttccccattaacatagccgtcatattctttcactgggacttgctaatggattcgaatatacacagtacgttgatcatcgtacacatataccatatgcttattactaatatgatctgcagtatactccgtctatgtcatgttcatcattgctgcgtgtgtgtttagcttgaatattttgataaccatcatgccgatctcggatatgccctttgtgtatctaaaggtactcctcgcctactcactgggcattttggtttacatagcagtgaaggaactgcggccatttacgaatcccaacacagcccacttcctattgctggacttccatccgttctatgccctgctgcacaatctaatgcgcatcgccagcatttcggagaagatctggctctgcagcgatcggcaaatttacgagaccagtgtttatgcggatcagtgcaacacgattcccaactgttgtggtgaggcatccatcaagtgtttagctagtgaccacctagtgtttctttataatcttaactattttaactatccgccgtagatgacgatgcacaggagttctaccacctgcgatacctgtgctgtgtataccttctgctcgtcgtggtttggatctcgattttcatattcctcaaatcgcatatggtgaagcgaaggccacgacaaccgaagtacttttgggatagtgagtgagttgctgtgcaggagcacatttcaaaaatcagtatataaccgacgtgtttccaaagtccggatagcaaatacgatcagaacattctgcatatcatggagcccagcgagctggagaacacctggatccatgaaaaatcgcgtgtgagcactttggaacgcaaccacattgaatcaaaagccctgcatgtggagcatttgagcgtcttttttggcctaaaagcggcaatcaagcacattgacttcatggtcaatcggtaatgataaccatatgcgaaatatccatatacattcatatatatatccatcatgttagctatcaagtcatgagcgttttcggcgccaatggaactggaaaaagtgtgctgctgaagacgattctcggcatttacacacctagttcgggacggataatcagctccaagacggttccattcaagtcgaaggatttggattcctgccatatggtgggctacagtgctcaggagtttcaaacgatgcaattgatgaccatactggagacatgggatctgatactgcgtattcgacgctccaaacagatttccttcagggcggaggccacaaagttgtgcaaaatcttcgggctgtacaaatatcgcttcaactcgctgtccatctgcagtcagggcgtactgaaaagactgagtctcggcattgccctgatgagcgatgccgagctcatcctgctggacgatcccttcacccatttggatatcgtgtcgcagcgcagcatgctgcacataatccacgatttgcgcaggcgtggtcatagcattatctatacctgcagcgacaccgcgtactccacgcccgctctacgtatggctacgctgagctatccaggaatcgcggtgattggggagcgcgaggagatgcaacagaactactactcatcgtactacatggtggagacgagaatccatctggccgagctgggcagtcccattgactttgattcgcaatcgacggaggcaaaggaggatagagcagggaccactgggacgttattgcggcacaagcatcaggagttctccgcggctttcactgacagcgcggacagatggaagtacttaaagctgtgcggagtcatcgaaaacgtatttccacatgccattatcaagtgaggcatttctctgaggcacagctttccatttccatttccattctaattttctctttccttttctatccctgcaggaatgttagttttcccagggtctgcttctggctgtccagtcacatgtaccccatgtccaggatcgtcgatacactgcatcgcaacaagcaggatttctattccttctccgtgtctcagccgtcggtaaactctgtgttccttagcattcatcgccagaaaagcaacaaggatgcatttccttactaaacgaattgtgtaaacagaaagttgcaaagtaattaagtaaagaattattcaagaagtagtagtattattattgttgttagaacatggaacatggatatctaaaagacatcgcataactatttgctcttttcaaaactgttatcaaatgtgaaactggcgagtgcaactatttcgagatgcattatccaaaatagcagacgctgataaaaccattacgagcaatatacatatatctaaatatattccctgccaatttcctaatggtttcattggcgatacacgctagttcccgcagcacgcgcgaaaagtatactgtttgtccaagccgtgttttccacacaagaagtgaacgttacccatgtaaccgtcgccgtctgccgatggcgatggcgataaggaggcgcctccgactataaaagcgagtctggactaaatttgtctcgttattgaaacagcacctccaagccggtttaccaacatgaaagtttgtacgtcgaacaatggattataccacatcgattatatagcaaaggatatatgggatacttcaaaaatagatatatacaatatgatcataatgtctgcatgtgtgtccaaacaacatgcatgtgcaattagcttaaagatcttattgttaaatctatattaaaattgttgtatattctttcgtctttagggattgcacagcatctatttgtggtgatcctagtgtcgtcggcggtgccattgactgaagctttgggcagcaccgtttgtgcggatcgcttcaatggcctgtcgtttgcggatccggccagttgctccagcttctttgtgtgccagcgtggtaatgccgttcggcgcgagtgctccaatggcctgtattacgatccaaagatccagacctgcaatctacccggactagtcaaatgtttcaacggggatcgcggcggttctgtgctgggagacgtcaaagcaaacgtcactttggtgcccaatggaaaggccaatggggaggtcaccacgacgccaccacaaacaaccacctgtccaccgacgacgacagtgacacccgcagtgaccaccaaaaaatcgaaacttattctcgataccgaggatgcagatgatgcccattccatcttccaagttactccgcatccactcactaacagaattgatgtgctgagatcccagcgcgattgccgtggaataaacgatggcgagtatttgacagatcccaaacattgccgtcgtttctatatgtgccataagaatcgggtcaagcgccataattgcccacggaatcagtggttcgatcgggagacgaaatcctgccaagatcgcgagttggtactgaattgcccagtcaatcggaattagacgtgttttccaatagcacatacaatatacaatggttgccatagtagcatatgtggatatcgtaaatactgttgaatgatcttggttcctggatcacaaaatatcagttaaagatatataaatcaattataaaaccattggtgaaataaaccaaagcaacattcgaaacaatgcatcatgaaaatcattttttttttttaattctaaattagaaactatctatatatgtaagtacgaaatatactaagttttgctattgcaaaatattgttattaaaaattagcaattaggctatgcatcctatctgccaatcctagtaaagaaaatcgatttttcaaaatatatatttttttttgacgattcaagataatggaaggaattacaacaaataatttggaacgaaatatgtgtgtgcactgcaagatacgtgtctcaatcaagccatgtgctgtgcgtcgtcctcattcgccttgtgggcatcggtatcgggcatggccgatggtggcattatccttccaccctctgcaatcgcatcgttgttcttctcgccgccggctggcaagttgaggggcagattaagttccctcaggaagcaagtgaagttcaccacacgacccttgttcaggaacgggatcttggggcagagctcgaaggcgtggttcacgggcagcatgtcgcagcccttgccgcatgatacgtcgatgaagttcattaggtcgcacacctcgatgtcgtcgcactcgttgcgattcagaatcgagagtatattgtcgatcagttccaaggagaatggcaggcgacatccccgcagtgccgatctcaccttaacttcgggcaggaatggctggttggtcggattgatgtgatggaagtgctccatcagatcatcccgagcattccacagggttctcttaagctcgagatgagccgccgcccgcaccgtggaccgatcgcaggcatttggttgactcttctccgccgaaaagtgccggcagaggct

SEQ ID NO: 18413 - DNA, 7671 bp, DROSOPHILA
atggcgatcaggcggtgttatatagctcagaacccaaagtcgagttgccggttcaactgcgtgagggaaaggttcgaggatttgcgtggagttccttgcctcgtttacgagggcgaaaccagagattggattaatgccgctctgtttttggaagatgaaaacgagtcggaggatcgcaaacgatttgttcttcacacatcgcacagtgctctcctttatatggaatatgatctaacgtcgaatgcagattgcactgtcttggagctggctcgatgcaccgacagttccatactctattacacgaaactccatgggagttcctttaataaactggccatcataagcggtaatgcctttggagaacttttggtatggcaaacgcagtttcccacagaatccgatccaaaatctgtaatgaaaacatatcccttgctcttgcgcattgaagcgcacaatggagtgatacactcaattgagtttgacttgcagtcgcagttattggttaccacatcggatgatcgttcggtcaagttttggaatatacaaaagtctggcgactggacaacagctgaaataaagcccatgttcagttgttacggacacagttcgcgtgttatgtgcgttgttatacttaaaatcgatgaccgtacatttgtggccagcggcggtgaggattcgtacgtctgcatctggagttcatctggcgaattaatcctaaagcgtcgtcagcagttcggcgcgccaatttggaggctaggcttcagccaagacgcggaaatcctctatagcaccagttcaacgggtaatttggtcgggcaaaatcttaaagaagtcctcaatcgacccaaaattgaatccaccatattgagcagtctaggcgatgcaaatgagttcgtgcgaaatctaaagtttgtcaataatgagataattgtgggtttgagtagcttaaaccgcttgtattacacccgaatatccccggattcttcgcatgagaacaagtggctcatggtcaatgactttccgtcgtacaaacgcactgttttggaagtatttgatgacattatagccacctgtggacatcggcgcataacactgcatagagatcgctatctagtgtccgataacttgggctactgtctgctactgcaaacccaccagctgcatatagagtcgcacatcgcactattcaataaccgcgagccgtggataactgcggccctgctcatttcagagcaatatctattattgggcaaccgcgagggacatgtgatgctctactgccgcagcagtgccagcgacgacttccaattgaaggactcaattcggtatttacacggtaaaatgggctcgaacttttttaagttgctcagtcttaatgcggacaatgcgcatgtgatgagtggtggtcatgaggcatttttaaaataccttagtgtgagattctctgactcaacactacgtgttagccaacgtgagggcattccattggcttgggtcgaagcatctccatcggatgacttgattttgggcttcaacgacaatcacattgtggcctggtcccgacgaaatgatatcctcttgcaattggcctgcggcggaggccatcgttgctgggactttcgactgagtgatggtgatagtcaactttccattgcgtatgtgaagcaaaagcgtgtgtacttctatcgcaactcgctctacaatgccgttgacaatcggcttaaggatatcgaacccaataactggcacgtacgaaattgcaatacccttcgactcattacgccgagaaatcaatccgatccctttatcctttccgctggcgatgataatatcataaaagtcacccaagtgaccaatgactcattgtctcagcgtgcggaaatgcactcccatatctcaacagtgcgaagtttgcaggcgattccatacaaatcgaatggcggcgactcaagtacttggcttgttttctccgtcggcggacgatcgcaattgtgcattagccaacttagcatagatgcgagcaataaatgctggataagtgaaatatccagccacacgctgcacaacgtggccgcatccaaaacgagtaccattgaagcgcgactaatggccatagatgttgtccagcattcggatggggatctcttttcaatatatgttgcaggcgaagccgaacttttggagttcagctggagctcactcattggcaaaatccaagagagacgcgccaaaatggcaagtaagcagcgaaattttacaacaaacgtattcattccggatattcgagtggcattcgcacccaactcaaatgctgcactgcgacggctgatgggcgatgccctgggtaaactttccatgtccgaagataagattgtcgactttgagaattgcaatgatatgcgcatccacgccgcctccgaacattatttggcaagtgtctgcttccggaatgtggatgagtcactaaatggtctgcccaccgtgctgaactttgccataatcatgccgtcggagttgcgcaactacgaggacacttggattggggacagctggaaggaaaccactacgctgatggatcgtgatgtcgccgaggaagacgagttcgacgaggatggctacacggactacatgggcgagggtttcgtgccgctgcagtaccacatcagcatgcagttcctgagagctacggcttccaaggtggaaaagttacccaaagtcgtgatgcgtcgcttcaatgagaatcccaatgtgctgctctccgagggcataggaacttcggtcgtattgctaatacttctgggtttcatgttcccggtgaccatcctaactacgctgatcgttgaggaacgcgaactgggacagcgttatatgttgaagatactcaacgcgagtgcaacattgcaaatggcagcgtggttcttcaatgtcttcacacacttcctgattacctcattgctcatcacaattctactgaagatcgaatggaatggagcgacggcagcagttaacaagtgtccctggcccatattactatgcttcctcatctcgtatggatgctccgtgaccagtttgataatactcatgacatcggctatgcgcagatcgagagtagctatggttatggcaccgatcatatggatactgctggccctgccgcttctatcgaagaaggagctcctgtccgatgggccagatgtgttttacggattcgccaccgtccttctgtgcaacgtatcattcagtcgcggtctctcgaagatcttctacatcgaggactacacgctgggagtgacaataggaaagtatatgttctacagagtcagcaaatccgatttcggaatctttgtgccgatcgtttgtttctatgtacagaccattttttgcaccctactcgcgatgatttttgaaaacaatgcctacttttggctggcaattcgcgtgaagaatctgctaaagaagtaccatgccaccaggtcggctgtgggcaggttgaaacgtcagattccagaagttagtttttcaaaaacatcggctgaagctctgatcgaatttcgtggcgtatggcaaaagtattcgaattcgacatatgttgtgcaggacatcacactgaatgtgtatgccggcgaggtggtcgctctacttggtcacaatgcatcgggcaagagcacgatcataaagatgttatatggtcggacacggcccaagcttggcgagatctatctatccggtttcaatattgtaacgcaacgaaaagaggcactgaaaaattcctcaatatctatgtcgtacaaaaccctgttcaccgagctcgtagtgctcgatcatctagtgtttctttccaggctgcggggtcttagcaagaccgaggccaagctagaggctaaagcacttcttcgatatctaaagcttgaggattgggaaaagactctggttaatgacctgaccattggacagcggagagtgctgcagttcctatgcgccttcgctggaggcaaccagatcgtcatccttgacaagccgttcgatggaatcgatgagcagcggaccagtctgttctatagtttgattctggatcaaaagaagaaccgctcaattttcttcacttccaacaatcaaaaagtggccagcggaatcgccgatcggatttttgtactctccaagggtaaacttcaggcttttggtacggtaaagaagctgtgcaggatgttaaacgagtcctatcgtttgattatttttggcaacgaaaagtgcagtttcaaggatgtgtatgcgttcatggcgacctttataccggaaattgagatggactccatattggctgactgcgcttccttccttgtcaagcacaaataccataccgaactgattaatttgatcgagaacttggccagattgaaaaatgatctaaacgtatacagtttcgaaattcatgagtgcagcattgatgacattttagctagcctatacacgcgtgataagtcgactttagagtttggccagcccggactacaaacacttctggcaagcagacaacagtccgcaaagcggagattcatcataccgaccatgtatttgctggaggagctgcgtcagctgctgatcgccgacacgcgcaactggtttctgccaattctaaaattgactctgccatcgcttgtcgtcgtctggacactgagtatgccatatttctggcacaactgccggcaaccgggacacataacgtttccgatgtccgatcatggcgatggcattatactcatgcaaaaggatacgctagatagcgaactactagtggccagtgagatgtatgccaaagtaggggtcacagaggtggacaagactgtggatatcacgaccttcatctataactacgagtacaaaaacagtctgttatcggatgcggatattatggaggcggtcatattctcaaatgtccagatcgaggtgctcttcaacacgaagtggcctcacacagctccggatagcttggctcaggctttgaactcgctggcagttgccttcatcgatggcgatgcgggcatcaaggtggaactggaagtgctgcccttctcgaccatccacacgctgcaactgcatctgaatatcgatggatacgacttgatcttcgccagctgcctgagtttctgcttctgcttcatctggagcatacccctgctccacatgacgctcagtagggacggtcgctacaactacgtggaactgattgccggcatgccgactatcgtgctcatcgtggccttcctgatctacgaactattggtggtgctcctcgccctgttccccattaacatagccgtcatattctttcactgggacttgctaatggattcgaatatacacatatactccgtctatgtcatgttcatcattgctgcgtgtgtgtttagcttgaatattttgataaccatcatgccgatctcggatatgccctttgtgtatctaaaggtactcctcgcctactcactgggcattttggtttacatagcagtgaaggaactgcggccatttacgaatcccaacacagcccacttcctattgctggacttccatccgttctatgccctgctgcacaatctaatgcgcatcgccagcatttcggagaagatctggctctgcagcgatcggcaaatttacgagaccagtgtttatgcggatcagtgcaacacgattcccaactgttgtgatgacgatgcacaggagttctaccacctgcgatacctgtgctgtgtataccttctgctcgtcgtggtttggatctcgattttcatattcctcaaatcgcatatggtgaagcgaaggccacgacaaccgaagtacttttgggatagtgatccggatagcaaatacgatcagaacattctgcatatcatggagcccagcgagctggagaacacctggatccatgaaaaatcgcgtgtgagcactttggaacgcaaccacattgaatcaaaagccctgcatgtggagcatttgagcgtcttttttggcctaaaagcggcaatcaagcacattgacttcatggtcaatcgctatcaagtcatgagcgttttcggcgccaatggaactggaaaaagtgtgctgctgaagacgattctcggcatttacacacctagttcgggacggataatcagctccaagacggttccattcaagtcgaaggatttggattcctgccatatggtgggctacagtgctcaggagtttcaaacgatgcaattgatgaccatactggagacatgggatctgatactgcgtattcgacgctccaaacagatttccttcagggcggaggccacaaagttgtgcaaaatcttcgggctgtacaaatatcgcttcaactcgctgtccatctgcagtcagggcgtactgaaaagactgagtctcggcattgccctgatgagcgatgccgagctcatcctgctggacgatcccttcacccatttggatatcgtgtcgcagcgcagcatgctgcacataatccacgatttgcgcaggcgtggtcatagcattatctatacctgcagcgacaccgcgtactccacgcccgctctacgtatggctacgctgagctatccaggaatcgcggtgattggggagcgcgaggagatgcaacagaactactactcatcgtactacatggtggagacgagaatccatctggccgagctgggcagtcccattgactttgattcgcaatcgacggaggcaaaggaggatagagcagggaccactgggacgttattgcggcacaagcatcaggagttctccgcggctttcactgacagcgcggacagatggaagtacttaaagctgtgcggagtcatcgaaaacgtatttccacatgccattatcaagaatgttagttttcccagggtctgcttctggctgtccagtcacatgtaccccatgtccaggatcgtcgatacactgcatcgcaacaagcaggatttctattccttctccgtgtctcagccgtcgcatctatttgtggtgatcctagtgtcgtcggcggtgccattgactgaagctttgggcagcaccgtttgtgcggatcgcttcaatggcctgtcgtttgcggatccggccagttgctccagcttctttgtgtgccagcgtggtaatgccgttcggcgcgagtgctccaatggcctgtattacgatccaaagatccagacctgcaatctacccggactagtcaaatgtttcaacggggatcgcggcggttctgtgctgggagacgtcaaagcaaacgtcactttggtgcccaatggaaaggccaatggggaggtcaccacgacgccaccacaaacaaccacctgtccaccgacgacgacagtgacacccgcagtgaccaccaaaaaatcgaaacttattctcgataccgaggatgcagatgatgcccattccatcttccaagttactccgcatccactcactaacagaattgatgtgctgagatcccagcgcgattgccgtggaataaacgatggcgagtatttgacagatcccaaacattgccgtcgtttctatatgtgccataagaatcgggtcaagcgccataattgcccacggaatcagtggttcgatcgggagacgaaatcctgccaagatcgcgagttggtactgaattgcccagtcaatcggaattag

SEQ ID NO: 18414 - protein, 2556 aa, DROSOPHILA
MAIRRCYIAQNPKSSCRFNCVRERFEDLRGVPCLVYEGETRDWINAALFLEDENESEDRKRFVLHTSHSALLYMEYDLTSNADCTVLELARCTDSSILYYTKLHGSSFNKLAIISGNAFGELLVWQTQFPTESDPKSVMKTYPLLLRIEAHNGVIHSIEFDLQSQLLVTTSDDRSVKFWNIQKSGDWTTAEIKPMFSCYGHSSRVMCVVILKIDDRTFVASGGEDSYVCIWSSSGELILKRRQQFGAPIWRLGFSQDAEILYSTSSTGNLVGQNLKEVLNRPKIESTILSSLGDANEFVRNLKFVNNEIIVGLSSLNRLYYTRISPDSSHENKWLMVNDFPSYKRTVLEVFDDIIATCGHRRITLHRDRYLVSDNLGYCLLLQTHQLHIESHIALFNNREPWITAALLISEQYLLLGNREGHVMLYCRSSASDDFQLKDSIRYLHGKMGSNFFKLLSLNADNAHVMSGGHEAFLKYLSVRFSDSTLRVSQREGIPLAWVEASPSDDLILGFNDNHIVAWSRRNDILLQLACGGGHRCWDFRLSDGDSQLSIAYVKQKRVYFYRNSLYNAVDNRLKDIEPNNWHVRNCNTLRLITPRNQSDPFILSAGDDNIIKVTQVTNDSLSQRAEMHSHISTVRSLQAIPYKSNGGDSSTWLVFSVGGRSQLCISQLSIDASNKCWISEISSHTLHNVAASKTSTIEARLMAIDVVQHSDGDLFSIYVAGEAELLEFSWSSLIGKIQERRAKMASKQRNFTTNVFIPDIRVAFAPNSNAALRRLMGDALGKLSMSEDKIVDFENCNDMRIHAASEHYLASVCFRNVDESLNGLPTVLNFAIIMPSELRNYEDTWIGDSWKETTTLMDRDVAEEDEFDEDGYTDYMGEGFVPLQYHISMQFLRATASKVEKLPKVVMRRFNENPNVLLSEGIGTSVVLLILLGFMFPVTILTTLIVEERELGQRYMLKILNASATLQMAAWFFNVFTHFLITSLLITILLKIEWNGATAAVNKCPWPILLCFLISYGCSVTSLIILMTSAMRRSRVAMVMAPIIWILLALPLLSKKELLSDGPDVFYGFATVLLCNVSFSRGLSKIFYIEDYTLGVTIGKYMFYRVSKSDFGIFVPIVCFYVQTIFCTLLAMIFENNAYFWLAIRVKNLLKKYHATRSAVGRLKRQIPEVSFSKTSAEALIEFRGVWQKYSNSTYVVQDITLNVYAGEVVALLGHNASGKSTIIKMLYGRTRPKLGEIYLSGFNIVTQRKEALKNSSISMSYKTLFTELVVLDHLVFLSRLRGLSKTEAKLEAKALLRYLKLEDWEKTLVNDLTIGQRRVLQFLCAFAGGNQIVILDKPFDGIDEQRTSLFYSLILDQKKNRSIFFTSNNQKVASGIADRIFVLSKGKLQAFGTVKKLCRMLNESYRLIIFGNEKCSFKDVYAFMATFIPEIEMDSILADCASFLVKHKYHTELINLIENLARLKNDLNVYSFEIHECSIDDILASLYTRDKSTLEFGQPGLQTLLASRQQSAKRRFIIPTMYLLEELRQLLIADTRNWFLPILKLTLPSLVVVWTLSMPYFWHNCRQPGHITFPMSDHGDGIILMQKDTLDSELLVASEMYAKVGVTEVDKTVDITTFIYNYEYKNSLLSDADIMEAVIFSNVQIEVLFNTKWPHTAPDSLAQALNSLAVAFIDGDAGIKVELEVLPFSTIHTLQLHLNIDGYDLIFASCLSFCFCFIWSIPLLHMTLSRDGRYNYVELIAGMPTIVLIVAFLIYELLVVLLALFPINIAVIFFHWDLLMDSNIHIYSVYVMFIIAACVFSLNILITIMPISDMPFVYLKVLLAYSLGILVYIAVKELRPFTNPNTAHFLLLDFHPFYALLHNLMRIASISEKIWLCSDRQIYETSVYADQCNTIPNCCDDDAQEFYHLRYLCCVYLLLVVVWISIFIFLKSHMVKRRPRQPKYFWDSDPDSKYDQNILHIMEPSELENTWIHEKSRVSTLERNHIESKALHVEHLSVFFGLKAAIKHIDFMVNRYQVMSVFGANGTGKSVLLKTILGIYTPSSGRIISSKTVPFKSKDLDSCHMVGYSAQEFQTMQLMTILETWDLILRIRRSKQISFRAEATKLCKIFGLYKYRFNSLSICSQGVLKRLSLGIALMSDAELILLDDPFTHLDIVSQRSMLHIIHDLRRRGHSIIYTCSDTAYSTPALRMATLSYPGIAVIGEREEMQQNYYSSYYMVETRIHLAELGSPIDFDSQSTEAKEDRAGTTGTLLRHKHQEFSAAFTDSADRWKYLKLCGVIENVFPHAIIKNVSFPRVCFWLSSHMYPMSRIVDTLHRNKQDFYSFSVSQPSHLFVVILVSSAVPLTEALGSTVCADRFNGLSFADPASCSSFFVCQRGNAVRRECSNGLYYDPKIQTCNLPGLVKCFNGDRGGSVLGDVKANVTLVPNGKANGEVTTTPPQTTTCPPTTTVTPAVTTKKSKLILDTEDADDAHSIFQVTPHPLTNRIDVLRSQRDCRGINDGEYLTDPKHCRRFYMCHKNRVKRHNCPRNQWFDRETKSCQDRELVLNCPVNRN

SEQ ID NO: 18415 - DNA, 3939 bp, DROSOPHILA
tgctcagactcagttgcagaccaatattgagttttagttaaagattccgattcctattcctatttcgatttcgattcagttgcagtttcagcatgcggatgaatgaggcatcgtctgcggcttagtcttaccggatacttgggcgttctgctcggcttgcagtgacagcgttgcagtcgtggacaaacaattgaactgatagtcgctagcataaacaactccgtaccgttgtttactttaataaatcgtttttatggcgaagattttttttttgtttttttttttttgtgttttaggttacctcaacattaacatccgtaaatgtcgtagaattatgtggccaccctcgtgtacatggaaattgccaaggatttaaggttgaaaatttttataagtttattttaatttggtgtagaaaatctacgattttcttggtaagcgtttatgttttcgtttttagagagatggtagatgtcttggtatttttccagggctggaaagtgttgtctagcaatgttgcacttggcacagctgaaaaagatgtgggatacgttatcgaaaacgttacacggtcacatatgttactgtttgtaacgtgcattttattcaaaattgtcaaaagcgttatcgcagagaagtctgttaattattttgatctctgttgatttaagtttacaattgtgatttttaaggcatgtgcctttaagccatatgccattatttcaaggggaaaatataccaaatgaaacaagactattttttagctttttctagacagcttaaaaaatattacgatgatttataactgatttcagaaataaaaagatttgaaacataagcaagttaaattttgtacccctacacgttaaatagtaaaggactatgattcattatgaattattattgaactgcataaatagaaattataccattactttcactggcatcgcaaaactttccgtcgctaccttggcgcaacctattctgaatccagcgtgcggtcacactgcagcaatgacataacctagttattgtcaaaaaactgaagtcaattctattccttcgaaaacataaatcgtaacttgcgttaggttcgacggcatgttgaagcttaaccgtgttcgccatctgcgaacgacgtacaagcgctgtttgtccggccagtcgcagctgcagctgaatagtacggacgcagagccggcatatccggagattcaggatctgtccttcaaggcgcgcaagcagaaggatgcggccaactggcacgaggaaatccggcaggtgccgacggtggaggagaagatgatcaagatcaatatgccccgctattacggcttcaaggtggtcgacttcaacgactcgaaaatcccctacaatgcactgccgctcacgcaacattatacgcgcacagtgctcgaggatttgccatctgaaacggataagaaggcacaggctaaggactccgagcaggagcaggagcagccgagcgtggatggtcttttcaaggcggctcgcggggatgttattgatgccctcgagtttgcccacgactactacaagtgggtacaacgaggtccgctttcaacgaaccaagttctccggcgagtttgtggacagtagttggtccaactcacttaagaactcggattggttggagtggtcccagttacaagttcgaccgtctgatattaatgtattcattctcctccattaccaagcgtaggcatctggaaaagcaacacaactctgccgaatcgaaccccgttgaacgtgagcgcatcctaacgcagatcattgtagaacagctgaacagagctctgctgcagtcgctcagcgaggagtacaagcacctggatgagctcgatgtcgactacaatccacgccacgaagcgttctgggccgttggcggcgtagatcctcccaagaacgtgcagaaatcgaagaagggccgggaatggcaaaaggatatggcaaacgagagcgttgatcggatggttcagtatacgggagcgccgtatcttgccctacgccatcgcaagcaattgacgccgtggaaaacggaagcggaaagcgaaaacctcgagctgagcaaacagctgccccgtttcaagcacgacccgcgaaccctcggctacagcaccaagcatcagcacgccaccaatgtgccaggctattggcccaaaggaaatgagaataacttcggcctgctctcatttcaatcgcgtgcacacctgcagatccgtccgaaatcgttcggcgagcaggatcagctggaggcattgcattcgctggcgattaaatcgtcatacgcctggcttttggcccaggcgaactacaatggcttcaacacctacaacgaactgacctatcccatgaacactcaaactgtgatcacgaacggcagggaatggagcttttatgagtatcagcttaatacgctgctgctgcacggcacaaacgtggcggaaaatccccgtgtcaacttctgtcgcggtacaaagccacttccactgtacgccgagatttcggcaagcggcaagtgcgttgatttcaacgataacgcactgcggcacctgctcaatttctatgccaatgcgccatcgattcagcggagcattggggagcagcagccgtatgttgcctccgacgtttccgcctatgagaacgccgaacagcgtgactttatcaataagaccttcaaatatttggcatcaaaccgaccgcgacacttggagctgcccgaaatctacctgtgggagaagctatacaagatcgataacaacaatcgtgccatggaggctaagagacgcttcttcgagctggacatcaatccttggcagcgaacgctggacacacatgacaaggagtatgttccacgtgcggtccgaccagacgtccctaagaataagaacaggttcaagaagacgtactacccttaaatgaataaatataaaacacttcctaaggttacacttgttaaaaatgctgaatttttaatgtgaaatactggattgcagattcggagcaacgaaacggtgtacaaagtttctttaaactttgattaactcaattttccgcaaacttttgtcagtatgttaatgatttttaatataaatattttgttaaatttcaatttaaattctatgccatacaaagtatatatatttattaactttgttatgcttgtggttaaacacttctgtaaatttataagctagtcttttttatcttaaattctttcaaatagatatgattatacaaatacctggaattttgccaattattagtgctgatgatgctaaaacttgccaatgcaatgcttcttatcattatttaattgtttatgcagcacatatttattctagattccattgtttatttcatttatcagcactgcaaacataccgaagttatctcaaaaagtgggtaaaatgcggttacactgcaccagaaccatatttttcgaacgtaaaaaaggtttataatgctatagtgtagtttaaatctttttaccaaatcatatattgtttgaacataatagtgcactaaggtttatatgatattccatataagtacacttcaaactcttacttagtctggtaatatgtatgcattaattaattacttgattattttattatcccatttattatagtagttttacatttacgataatagctttatagtccactacatcaaagttaggattgctgaaaaagttaccacttgttggttatttcggtaacgtcccagctaaccgtatggtatgttataacggccgtgcgacggtcacactggatctgaatagttaggctcgagtaaataaccagtttgagactttacggtggttcggaaactcgtatctggcgcttcggttgtccaaaaaggtagagcagtaacctgttgcatatatatttcttttttttttggtaatagtgg

SEQ ID NO: 18416 - DNA, 1775 bp, DROSOPHILA
gtcacactgcagcaatgacataacctagttattgtcaaaaaactgaagtcaattctattccttcgaaaacataaatcgtaacttgcgttaggttcgacggcatgttgaagcttaaccgtgttcgccatctgcgaacgacgtacaagcgctgtttgtccggccagtcgcagctgcagctgaatagtacggacgcagagccggcatatccggagattcaggatctgtccttcaaggcgcgcaagcagaaggatgcggccaactggcacgaggaaatccggcaggtgccgacggtggaggagaagatgatcaagatcaatatgccccgctattacggcttcaaggtggtcgacttcaacgactcgaaaatcccctacaatgcactgccgctcacgcaacattatacgcgcacagtgctcgaggatttgccatctgaaacggataagaaggcacaggctaaggactccgagcaggagcaggagcagccgagcgtggatggtcttttcaaggcggctcgcggggatgttattgatgccctcgagtttgcccacgactactacaagcatctggaaaagcaacacaactctgccgaatcgaaccccgttgaacgtgagcgcatcctaacgcagatcattgtagaacagctgaacagagctctgctgcagtcgctcagcgaggagtacaagcacctggatgagctcgatgtcgactacaatccacgccacgaagcgttctgggccgttggcggcgtagatcctcccaagaacgtgcagaaatcgaagaagggccgggaatggcaaaaggatatggcaaacgagagcgttgatcggatggttcagtatacgggagcgccgtatcttgccctacgccatcgcaagcaattgacgccgtggaaaacggaagcggaaagcgaaaacctcgagctgagcaaacagctgccccgtttcaagcacgacccgcgaaccctcggctacagcaccaagcatcagcacgccaccaatgtgccaggctattggcccaaaggaaatgagaataacttcggcctgctctcatttcaatcgcgtgcacacctgcagatccgtccgaaatcgttcggcgagcaggatcagctggaggcattgcattcgctggcgattaaatcgtcatacgcctggcttttggcccaggcgaactacaatggcttcaacacctacaacgaactgacctatcccatgaacactcaaactgtgatcacgaacggcagggaatggagcttttatgagtatcagcttaatacgctgctgctgcacggcacaaacgtggcggaaaatccccgtgtcaacttctgtcgcggtacaaagccacttccactgtacgccgagatttcggcaagcggcaagtgcgttgatttcaacgataacgcactgcggcacctgctcaatttctatgccaatgcgccatcgattcagcggagcattggggagcagcagccgtatgttgcctccgacgtttccgcctatgagaacgccgaacagcgtgactttatcaataagaccttcaaatatttggcatcaaaccgaccgcgacacttggagctgcccgaaatctacctgtgggagaagctatacaagatcgataacaacaatcgtgccatggaggctaagagacgcttcttcgagctggacatcaatccttggcagcgaacgctggacacacatgacaaggagtatgttccacgtgcggtccgaccagacgtccctaagaataagaacaggttcaagaagacgtactacccttaa

SEQ ID NO: 18417 - protein, 557 aa, DROSOPHILA
MLKLNRVRHLRTTYKRCLSGQSQLQLNSTDAEPAYPEIQDLSFKARKQKDAANWHEEIRQVPTVEEKMIKINMPRYYGFKVVDFNDSKIPYNALPLTQHYTRTVLEDLPSETDKKAQAKDSEQEQEQPSVDGLFKAARGDVIDALEFAHDYYKHLEKQHNSAESNPVERERILTQIIVEQLNRALLQSLSEEYKHLDELDVDYNPRHEAFWAVGGVDPPKNVQKSKKGREWQKDMANESVDRMVQYTGAPYLALRHRKQLTPWKTEAESENLELSKQLPRFKHDPRTLGYSTKHQHATNVPGYWPKGNENNFGLLSFQSRAHLQIRPKSFGEQDQLEALHSLAIKSSYAWLLAQANYNGFNTYNELTYPMNTQTVITNGREWSFYEYQLNTLLLHGTNVAENPRVNFCRGTKPLPLYAEISASGKCVDFNDNALRHLLNFYANAPSIQRSIGEQQPYVASDVSAYENAEQRDFINKTFKYLASNRPRHLELPEIYLWEKLYKIDNNNRAMEAKRRFFELDINPWQRTLDTHDKEYVPRAVRPDVPKNKNRFKKTYYP

SEQ ID NO: 18418 - DNA, 11520 bp, DROSOPHILA
ttggccttcaagttgaggtgcccaattcggtggtaaccaaggcgattgattagatagggcgaattggttcgtgctagggaaattcacataaattaacttggttttcaacagttcagagtaataagtatagactagattggcagtagctattattaaacgaagcaaattaagttgttattacataggatcgctcaacaaacaactctatatatatagtttagtatagtttccatatagcagagctttcagcagttatcagcttgaacaaatatatataaatatatagtataagtcatcctatgacgcaggcgaagtttgcttttgcatttttgcttcatgattaataacaattatcgcaattcaaaccgcaggccttatattatactcgttaaattctttggcttatcgccgtagagcgagttgcacaaataaacaatcattttcggccgtaaaacaataacagtaacagtaataggtagacgggaatttaatgtgcccgcttttttgcttttggtgctgcaacattagaccctgagaatcgtttttggccagaatgaccgaccggctcctgtgaaactgacaactcgcacgtctcttgtcacatatatgtatgtatatatgtatgtgcatcattcgcatgacaataataaattttggttttgggtaacgcagccatctccactcctcggttctttggagcttcccccctacggggtctttcttgattattcagtcgccgctgacgtcaggttttgttgattcagcggaaacttaacacctttttcaagacaccagatatatatatatatatgtagaaatattataaacatacctagatacagatacaattgtatctggacttgcctggcgacgggcgggcaaacaatacgcaaaattattcaaattaaacacaattgttctctcccttctcgtcttttgttattcccgattgtgttcacttgggtagttttttgtgttgacattgaaattccatcgagatgccgttgaaaagtaattcacaaaacaaaccaggtcgacgtttagtcctatatctatcagtaaaatttattttgttaagaatataaagtcgaaagttacacaacgtttatcataatggtgtgtgttcgattcatttttgctgcgtttcattcaattaatgctctattcatttgtccctttgcaggccgatcagctgacagaggaacagatcgccgagttcaaagaggcattctcgctattcgacaaagacggcgatggcaccatcacaacaaaggagttgggcacagttatgcgctccctgggccagaatcccacagaggccgagctgcaggacatgatcaacgaggttgatgccgacggtaagttgtggaggattgtggggggaaatactctataaagtgggatagccttttgtgggggtaatgtacgtgattgaaatccttcattggggtgatgtaataaatttcaagtcagattcacatttctcatgccctctgagcatttaaaacttacgaattcgcgaaagagattgcaaaatgcatactaatctgcaaatgttagctaaagggttcaaaaatcgtaaataatctggttttgtatgcctcgtaacttcagtatttcaaacaaattgtgaatttgccttaattttctgtgacccacaacatctagactatgaagtcagacttcgtcagagcttacgaccaatgtgcaaatgagctgattttctatgctatgctggctatatatgagagctggctagaaccccttctaacccgatcccgagatgtctaattttgtttaccccaatctatttggtgttctgggcctaatccctcgcactcgttccattccccaactacctctttcgcagacagacatagatcagaccaacatttgtacgacaaacaatgggtggaaaaaaaaaaagaaaaggaaaatcacttcttggctaaaaatatgcaacaaaaacacgtcataggcattaaaaatagatgactaaaatattttggctctttcccgtgtcttgtctttggcagccgctgctgtcagattttttttcgttggtatttcattttttttttttaatgtttatttttgagcaaaggtggttgttcgcttagctcgaaatctcgtacaagttttagtttaacaaactttcttggggaaacgaggaagatccaattttattttcgatgcaagaggaaatcgagcgacacacgcctcgcgccaaaaatgtggcaaaatgcgaaaatttgaatcgtaaaggggtttttcaccttttgccacaaataaatagattttccaattaagtaagcaggtttgtgctttgctgcttttgctaaggataatacttagcaactaaatcataagaactcagtggctggcacaaagtaacttttatgctcatcatcacttgttctttcataagttttgcaagtgtccccgcccaatttgtatttgttttctcgctgctgctccattttctttgccagcttttctcggctgcctgttgttgctgctgctgctgctgttgcgcttgcacgtggaaattctgtgcgcatgttgtcgaaaatatccaggacacaatctgcaaactcggagtcctgcacacagaattttgagcgcaggcgctgtgaaaaacccctgcatgatttttctcttttttttttttttttttgctggagctaaagtgttgcaatcatggacaagtgggtgatgtggggtttggacaaacgagggggtggcgatgcgcatactaactgtttatcaggactaaaaatagtagttcggtatgtgggtgggtggcaaggggtcgccacttgggagtccagcatttttcgccaactttattttgctggaatttgcatatgtgccaaactttttacattgagtgcaagcaaaatgtttttgccaactttattgtgcaacgtttaatatttaaaattacttgcgaaaattgttgcaactcgaaagtggcacttcccactgcccaccacccactgccgcctgctcccagctgactcctctaatttacgatcccacacaatggaatgtattttgtggccatccgaatcacccactcacatggcccactcacgctggtcacaacagccagccaggcaggcagtcaggaatctgacggaaacattaaacattcattacttaaaatttcgctggcgtctcgtcgcagccagttgacgatggccaaaactgcctggctgccttttattttttttttttttggtctgtgaactgcatgcaaacgagtgcaattagttggcggtgggattggtgggcaggtaggaaggattgtccagcggaataaaaatagcgttatagaagtataattatattatatggccatcataggtgaactccaaaggtggttttctttaaattgcgcttgccaaaaagtcgcagttacgcttttagcggaataatctttttttatggtttgcttataatgtcgatctgaataaaagtcgactatttttgatgagaccaatggaaaatgcgcgcaaactaaatttagccgatgcctttgccttgcacacactgtgtgcgccaaccaaaaaaaaaagacaaaacttattacaattttaaattgtctgcaaaattttgcgctcaacgttgcgaatcggcaagtgggagtgttgatgagcagggaaaggaggaggagagagggaatgggcggaacggcgtaatggaaaccgaaatccgcgccagacactggccatcatcatcatcatctcatcgtcgtcgtcatcattatcgccattggcagcgcgatgagcatcataattatggtaattgggctgcgcgcgggttcgtcaaaggcgtttcgggccagtctaagaagcgtctaacaaaaatggcaacaaatttgccaatggctgtgtatgtctatatatgtgtgtgtgtgcggaggctttccttggtatttgttttctgattttctatttttttggctggggaaatcctatcgacaaagccaaaagcaacagaaaatcgcgtcaaatgttttaaatagaatcataaacacaaaaacgcaggcaagacaacaagcaacagaaaaagaaaaaaaataaaagtgaagaaaaaaccaataccgaaatcgaaatgaactaaagccaccggtcgatattgtatttgatgttcctttggctattttcaaaatatatttttgctactcaatgcggccatatttgaataattataatatctaaattagcccaaagtgtaatgttttttctttcgtcaaattttcgaattcaatgcacacattattttgaaatgggaattgcctccagattttttcaattcatttgaattcgtgtgctcgagaagtatttatttattttaaatcaattaattcggcgaattactgtttacttttttataaaccaaatacttgaagattcaaactatttatttttgtttccattatatgtttaacgggctatttgtgtagctacattcagttcattccattttatttggccaaactctttgtcagtaaatctagattgccccaaggaggagatcatttgctattgaagttcaaaagggcttgtgaacctctgactttgcttttttttttttttttgtttggcaatcatatacgaaaagtttcctctggagaaaacccatttccagcaaagtaataaaaaacacattcagttcacaagaaacaaaatgatggcccacaatgaaccacgctccatttggttttgagggtagcaaaaacagaaaactgaaaagcattttatacactttcattttatggacaaaagacgcttcttcttctttctgctgggaatggctcgaaaaagtcagtcaataacaattaaggccaaaagttgttgctgctgcctttatggcgctgctgcggccccaaaaaaaaaaccagaactattctctcaacttaaaacgaacgaaggaaactttttcaattaatataacaagaatttcggttggaccacttcatttgcgtttcacttacggggatgataacctaaagaaaatgtatttggccaaattcttttacaaattttcattccacttggctgcttttttttgagctgcatctgcgatgaagcagccggatataaagagataatagatatagaaaagagagtgtttcaaccgaaatgggattaggcggacttatctctcgcactccgcaaggtgggtggtccacacacacacacacacacacgtgtgggtggggaaaagtttgtttggggcttaggcaaatatgaaaatatgctcgattatataggaggaaccacagcacctcccagggattttggcgtcgaaaaaggcagcgcgtttggaaaagctttaagtagtgtacacagcccccgggtggatggatattcgtatatttgtatggcgttgtcgggaatggtggagagcaaacttggccgtaatgaagaaaaatgccggctgcctttatccctgacttgaatttattataacgctccggggaagaatttaaattgattgtatgatgatatgagggtggtggtggaggagatgtgatatggtgctagtggaatccccgaaatccgacccacaaagtatgcaacgaaattaattgttattctttatggttatttcccctcgcacaggcaacggcacaattgacttccctgaattccttaccatgatggcacgcaaaatgaaggacaccgatagcgaagaggagatccgagaagccttcagagtgttcgacaaggatggcaacggcttcatctcggcggccgagttgcgtcacgtgatgacaaatctgggcgagaaactcacagacgaggaggtcgatgagatgatccgggaggctgatatcgatggcgacggtcaggtcaattacgaaggtaagtcatctgctgcaacccaaaggtggcgatgtggaaagtatcttaaagatagcttgggaatactgtgtagatagtttatttttgcccctcattcaaagctgatgaaataataaggtggctatgaaagggcaaaatcaaagggtttcctcgaagactttacccaagaaaataatgagtgggaattttccgataatctgcatcgaacaattcattttcgaaggtgtcgttttccacaattttgcttttttgttgctcgcgtgtttggtggctaattggatctgtctgctgcagctggcgggtaactaaaacgaaaaacgcaatagtaatgattgaatcacaggcatcgcatttgagtcacaattggcacttggttgtgtcatatggctttgctaattaacccagatctctatcactctctctctctctctttctgcgcttctagcccacttgttatagtaatacttattttcagtgctagctagccattgtatctgaacacacatatatgtagatagttaaaacaaatagtatctcgccatgtgcagtgcattttaatacgaaattttcgtgttttgtgttcttcgtaactttttaatagcttgaaaattgatttttcaattgagcaaacgtcgagagcagtgtgagaaacaatcgccggcatatcaagttgaatagccaaaacaataaaatagcaaaatggaacgaacttttgagaatgcgcagatttactatggcatatcctcccactgcctttggcactttccgaaatttccctttgttgtgcacaacacacatagcgaggccggtaaaagtagcaattaaaatcggacagcatttccacctacatctatatctatatctatatatatatatctatttattcgcatcgcttatagcacacgtttatatgttgatcttcaagttcaaatagaaatcgtttttggctgccgccgcggcatttcgcggatcaaatagattaatcacaagtaatttatgaacaaaatacataaaaatagcgaaaaagtttaaacaaagcaagccgaagaacgatgatccgcatttataatcaattgttgtgtgctgtggtacgatttctagacaagcaaacatcgatagagaggacaagccaagtaggattaagtagttcgtactaagaaagtgcttcaaactgtcagagataaaaggtatcttgtagttctgaggaactgctctgctgggtttttttctttgcaggaatccccacaagtacttttcgaaagaaggcgataatggcaattgtcaagtgtggttttgttcccaaaagattgcactgcaagaaagtagcgatgatttatgcagtctgctttcgtaaatctcttaattggttgaaaatcaacagataaaaaagtgctgtgccatatttcacttgccatttatatatattttccttccacaatcagcgttttttttttacgcctttcgccactttcctgccggcgaaattgaaatgtttttaaaagccaaaataaatgtcgcgcgtaaattccacacttaaatgattaaactgccggggcaaaaagcaaaccagaaccaaaaccaaaaccaaaaaccagaggcgcacggcaacagtgcggatgtgaaagaacaattaaaatgaaatatataaatattgtgcaatattcttaatttcggggtgttataataatacagagattggatgagaatgaatctcatttcgtttttcgttcagtcagcggaatcagcataatgtatgtaaatataaaatgcgcattgttgccatatacatacatacatacatatgtacatacatatgcatatatatatattttgcttattgccaattaagcaaagtctttattgttgtcttgccggctatacagtgtgccggttgggtattgcctaccaccaaccacccactaccaccccgccattcactctttggtaattttgcaagtgaaaattatatggcgcaaacaatgaatttgcagggaaaagatattggggaatgggaatgggaattggaatgggttgggaatgagttgagacttactttggccggttgccagatagaaaaacgctgtgcgaaaagggaacgagagagcgagaagaacatgtcgaaaatcaaataaaatgtttaacaaaatacaaagaacaacaaattaaacattagcacacgaagcgaagcaaattaaatgaacacatcccaaaatgtctgagcgagagagagagagtgtgagagagagagagagcgagagcagcggagatgaattccaaaattagcaaaaacgaaaaaaaataactaaaagaaaaagaaaaattgtgaaaatatacctttgcacagatagaacaagttagtttggcgaatgtaaacaaagcgacgaaagataaacagcagaaccgcaaacgacgtaatgagatgggtgagggggggggggtggaggggcaggggcattgcggccaaatgccgagtttctaaaacaaaatccacgaaaatttgaccaaaacaattttgttgaccagctggaaaaaaattggaacttgatataggtattaatattattttaattggcccaaataacaagaccattaaaggtcatctagaaacatcaaacgactaagacactgcaagaaatgcaattaaattcgaaataaatttctattcaggcatcttaatttttcgcagtgcaaataaactggtcaaccggtagtaggcgtggttgaagtgggagcagtgatgtttgaggactaagatttaatcaaaggagtgaactttcgagcatttgcatatgggaaaattgacaaggctgccccaaaggagcttctatacgccctttttttggggcgttgcccgaaatagggctaataacattttacatttaagcctttttacggcctcgaaagggtttagttttattatcaaaggtgtgtgttggccactcaagtgttgctggtgccgctagctggaaaaataactataaatgttgcgtttgatttcccaaaagtctgataacaatcgatggctaaattctatggccagaacgtttcgcctgcagattgtaaagtgagcaagaaaaacgataagattattaaaaagtactgcagtcaaatctcgagttctgttgaactttgtctacaactacaattgtagccaagctgaaacataatttggcttaaatgagatcccccattaattattcgtttattcccaaaatcctatgtttggtttgtacacattttattggcattcccccataggtgcttgcaaattcttgaccattgcttcctaggaaatccaaccaattacatgccacgcccacccaattcgcctgtcgtccgtcctatctgtgacttttggtaccaccgccctcttgttgtcgtgcttaaatatttataaaaagccaatcaccctagccaactgaaaacagcagggagatggatgatgatgcgatgcaatcagcaagaacagatgcaccagcgtccgagaattcaattctccccctttaaaaatagatgcaggcagcaaacacctgataaattggggacaccaacacatatattataccatctcatatctatggtataatactacttgattctttttcatagatgagttagtttagaaccttttaattttttttttttttttccaattggattgtatgatccatcaatctttatataaacttatattagataggcatcccttcccttgatgcacggtatgtgctagtctggactttcgggcatagctttcccgttatctcacccattcatttgcgaacaatgcaacgtacgtctccattgcacttggcctgcgtcgccgtcaacgtcgcaagcatcctctgctttctatttttggacgaggaaccgaggagagtacataatctctggcgcgattgactgtctgagtctttgcactcaataaattttccttggctatatggctctatttttcagtatggtgttgtgtgtgcgtgtgtgtgagtgtgcggcaagtgttttcatcagacgtctcgtgacttgctcgtttatcttattgattagctggcccgcagtgtaatgctcgtttgctattgattaattggcgtcttaatttagtagaaggttaatgacagcgctcagctattttcgatacttgatttgtcgtgtgaatctctttgcattttgtgtcaattgagtggtttaataagtggttggaaatgatgtttttagatcgagaacgatgctcgtgattaaaaattaaatatttatgggtgcttgtctatagttaagttaaatgcaaataaacctaatactaattctgaatttttttctctttctttgcagaattcgtgactatgatgacatcgaagtgaagcgttaaattatttctttttaagcctttctatttttttaagatgttgacgaagactgtagctgtgcgcaataacatcgcgccacgctgttgctatggaccccagtaaaagatcttaaaaaaaaaacaacaaaaaaaaacaacaacaaacaacaaagagttaagcaaaaaacaaccaacataaaggagaataagaagcaaaaaaccatttaagaaactttaaaacaaataaaaaacttacacatctaaaaaaatgcaaaagcaaatgaaaatttaaacaagcgaaaatgaaacaaccgaattgaattcaaaggtaaagaatttcattaaactgagcgagatgttgaacgagagggaaaacaacataattttaatgcaacaacaaacaacaaccaagcagcatacttaatgaagtcaccgtttaaaaccacaaaccaactacaactacaacaagaacaaccagcagcaacaaacaagagtcgcatgttatcgtttcgagcaacaagaacaacaagtctatcactacacttaaacaaaatgaggagcgagaagaagacgagcaagcagagggagaagcaagaagcagcagcagcatccaccagtattgccgaaagatggcgcccatggcgcactaaggtcagcgcgccacctggcgacggcggctcgcaccggctgcattttgtttgacagttttccactaagaagtaaaaaaaaagaaaataatgaaaaccccccactctgtaagctagcaaattgtgtttaaagtataatgaaaaaattgtcgatttcgttgcgagaaagaataaaaataaaagctaaacaaacaacaaataaaaataaaaatacaaataaaacaaaaactgttaaagaaaactatttgaaatttttgcaaactggcaaagtttatatagacacgctacacgaacacactctcatacacacatacaccacacacacacatttacacccccacacacagacatgtcagaaaaccagaaataaaatatattataaatacaacatatatatattataaataatgtaaaatcaaacaacaacaaattcttcttattaaattatatttaaatttaaaattaataaatataaaaaataaaacaaataaaaattacaaaaaaaaaaaacaaagaaaccaactacaaatacattttcgatataaaattaaattaaaaaccaaaaatgtggcgcgcagcagaagatgaggcatatttttgggggctgtacgaggaccagcaggaccgcagtccaaaaggtccttgaaaggcagct

SEQ ID NO: 18419 - DNA, 995 bp, DROSOPHILA
gccgttgaaaagtaattcacaaaacaaaccaggtcgacgtttagtcctatatctatcagtaaaatttattttgttaagaatataaagtcgaaagttacacaacgtttatcataatggccgatcagctgacagaggaacagatcgccgagttcaaagaggcattctcgctattcgacaaagacggcgatggcaccatcacaacaaaggagttgggcacagttatgcgctccctgggccagaatcccacagaggccgagctgcaggacatgatcaacgaggttgatgccgacggcaacggcacaattgacttccctgaattccttaccatgatggcacgcaaaatgaaggacaccgatagcgaagaggagatccgagaagccttcagagtgttcgacaaggatggcaacggcttcatctcggcggccgagttgcgtcacgtgatgacaaatctgggcgagaaactcacagacgaggaggtcgatgagatgatccgggaggctgatatcgatggcgacggtcaggtcaattacgaagaattcgtgactatgatgacatcgaagtgaagcgttaaattatttctttttaagcctttctatttttttaagatgttgacgaagactgtagctgtgcgcaataacatcgcgccacgctgttgctatggaccccagtaaaagatcttaaaaaaaaaacaacaaaaaaaaacaacaacaaacaacaaagagttaagcaaaaaacaaccaacataaaggagaataagaagcaaaaaaccatttaagaaactttaaaacaaataaaaaacttacacatctaaaaaaatgcaaaagcaaatgaaaatttaaacaagcgaaaatgaaacaaccgaattgaattcaaaggtaaagaatttcattaaactgagcgagatgttgaacgagagggaaaacaacataattttaatgcaacaacaaacaacaaccaagcagcatacttaatgaagtcaccgtttaaaaccacaa

SEQ ID NO: 18420 - protein, 149 aa, DROSOPHILA
MADQLTEEQIAEFKEAFSLFDKDGDGTITTKELGTVMRSLGQNPTEAELQDMINEVDADGNGTIDFPEFLTMMARKMKDTDSEEEIREAFRVFDKDGNGFISAAELRHVMTNLGEKLTDEEVDEMIREADIDGDGQVNYEEFVTMMTSK

SEQ ID NO: 18421 - DNA, 5293 bp, DROSOPHILA
ctgaaaagtccatatcgagctatcagccaaagtctaaacaataattatttcgtggagaccccataaagatctatattcgagtgaaatctgcatcctaatttagattccaggctaattgcttctatattttcccaaaaacagccataaattgttcctaattacaatcgaatttcactgcaatctgcgtcattggctgaggaaaaagattaatcatataattggcccaataaacgatttccctcccccctccccccctctccttttacactctcgtgtaaactgtgaaaagtgccgaagaagaaaaaaaaaacaaaaagctgctgaaagttacactgacttcctaaaaaaaatccgatctgacgtcagccaattgtactaactcgtaactcccaatgggttatcgaacacttggtggcactggcacacttcgttcaatatttatgtttacaccaggcctttggctttcaattagaaactaaacacacacaaaacttacttgactgtttgaagaggagcatccgaaatggtcttataaatacccagcagggccaagagtacggaaagaatggcgctggaggagcgtaaacaaaactataaaaagcttccctcatgaaaggagagaaagaaacgagttggggcgttactttcgagccgaaagttcaacaaaccatgaatggcttttctagaagaacaaaatattgttgtaatgctaacaatatttgtgcaaacaatgctgcttttccaggcatccagtgcatcctacggatgtcgagcagtacacgtattatctgcagctgcagatgcaaatgtatatgtatctgtatctgtatctgcagtattgcagtatcgctgctttattcatatccatgagacgcgtcgcgacatgtgtaaacgtctgggtataatcttttctttataattttttttcttgtttttttgttggacgaggcggcggtcgccttggaacttgatttcctacgtgcgaattggccacgcaaatatgtggaaaaacgctgtgaaaattcagctgcccgatgtggcagactactatatatcgcatataccgaagcaacccgactcgtacccgtttaatgatcgctggcgccataggcgttcgacttttcaggtttctcaattagaatttcacgcgtcgtcgagacgtgcggtcgcaaaatcttacacttcacttcaaccagccaagagaggtcctttttacaagaattaccttgcttttgcagatcatcagttcccgatcgatctgaacaatgtagccaaagatcacaccaatctcgagaacgatcagttgcagtccctctaccgccggctctgcgtcctcaatcgttgtgccaccatgcggctggaccaatcgcacaaaccgcaaacaccacaggtaagaatgtagacccgcaaggatgttttaacacttaacatttgttttttaattatttaattatcgaatatacaaatatagctactgacctttactttaaatcacttaactccacttagcaaaaggaggaatcggatgacgagaacttcgctttgagcgagcactggacattccaaccgcacattcgccgctggtcgcggattggggagatgggcctggaactgccgcctccgggacttttgagcctgaacgtggagaagacggagagttcgtcgaaggaatcgagtccggatcgcttcgaggaagatggtgctggcattacactggtgacaccgggctgcagcaaggccggtggaatacccaacgatggatcatcgttgggcgagggatccgatagcggtcgcttgaggagaagtggcagcgaaaggataaaggatcaggctaaggccttgttgagaagagtggaatccattaagtcgagacgtcgcaaacgacagaatcgcgaaaatgtggtcatcagtggaccgacagtactggacctctcgcaatttggccagaggagcagtttgcgtaaaccggatgccgtatattccaccccgccctcaccatcggccctcagtcccatgcacacattccccaaggcgccgttcttcggcaacgaccttaaagtgcccagtcacagcgataatttcctgagtcccaatcgctccagtcccaagagaacgcccactactccgcgttcgatgaggaccagtccgttgcacttcttctccagtcccatgtcgcaactgaaggagggcaagtcggatgattcgtcgtcgtactacagtgacagtcaggaatcgtccacgggtggcaagttatccctgcgaaaaccctccaaggctcgaagattccttcagcgcacgggaaaagtcgatgatataggcgcccattcagattccgagtgtcatcagggacgcaagctccttataaaggatgccaactccaataccacagaggttaaagtgaagaaactaacgcgcggaggatcactgaacttgggcaaggatcccaagaaacgggatggtttccgatcgtcatctttccgatcacgaagcacttcgcgcaaggaggccaagaatgatgaggatacggctggtgcaaccacaaatggtggatccaagcgacagcccgtggttcgttggcatagtttccagatggaggagcgccccaatatgatattccgcaagtgtttctccaagaaaatcgagcctctgcaggaagatgccggaggaatgccatttgccgccatgtcggcgggtcaactgcaaataatccgcaagctggcactggtcactctaaccggccacatggagcgatactgtccatctcatcgctcgggctggaactgggaactgcctaagttcatcaagaagataaagatgccggactacaaggacaagaaagtattcggagtgccgctgctaatgatcctccagcgaagtggacagactcttcccttggccgtgcgtgctgcattccgctggctccagctaaacgccctcgatcaggttggaattttccggaaaagcggtggaaagtcgcgtatcatgaagctgcgcgaacaaatcgaagtcaccgattccactgccgagtgcatggatgtttttgatctgcaacaggcctacgatgtggccgatatgctgaaacagtatttccgcgagctgcccgaatctctgctgaccaccaagatgtccgagaccttcgtggccatctttcaacgtaagtaaagaaaattgcttttatttatccaaaaaagaatgaaatttttataaaaccttatgtttttaatattttaattttcaaatctttagatctcccggctgaagtgcgtctagatgcagtgcaatgtgctgtgctcctgctgcccgatgaaaatcgggaaatcctgtacgtactccttgagttcctgaccattgtggcggccaactcgcaacagaaccaaatgaccagcaacaatttgggcgtgtgcctggcccaatccattttccactcgtccatttcgacgggttccgcttccgtatccgcctcgccacgtcgcaaaggcaagggatccggaatgccggacatgaaggagctggcggaggcgaaggcctcccacgagtgcctgtccttcatgatcgagcattacaagcaaatctacacggcggccaaggaaaagctgagcaagtgcaacttcagttacatggaggagtcgaagccacttcctttggaggcgctgggcgagggaatgcagtttcacaactggcggggatacctgtacgagtgcaccagtgccaccattaaggagggtcgcgaaaagtaagttcccttaaattaggtatagatgattattatattaactctttgttacagaacccgcggctggtttagcattaattcactgaacgacagcagtgtggacattgcctacaagaaggtgggcgatggtcatccgctgagactgtggcgctgctccacggagatcgagggaccgccaaaggaggtcctcgagtttgtgatcaaacagcgagcctcctgggacacgaatttgttgcaatgtcagacggtcaagaagctggacgatcgcacagagatctaccagtacgcactggatggccaattgaccacggacttttgtgtgttgcggtacgtttaggaatattgtttaaataatttatcaatttaaatatttaatttaattattcctttactgtttcagttcctggcaaacagatttgccgcgtggtgcctgtgtcatagtggagacctcgatcgaccatgccaaggcgaagcctcttttcggggcggtaaggggcgtggtccttgcctcgcgatatctcatcgagccctgtggcagcggcagatcaagggttatgcatttggctagagtggatgtcaagtgagttacaaccttattaagctttgaatcctgggttcaaccaattatttgcatacttttaggggcaagacaccggagtggtacaacaagaactatggacacatatgctcgcactatttatcgcgcattcgtctggccttcaagcacgtggccgatggacccgaaagcaaagtttaaaagatatatacatttaaaaaaggatttaaccatctgttcgatggttgttcgtcgtattcgttgtctgtcgcaaaactgacgcatttatacgtaattatatgatagctggaggatgatagccccacttcgaacaacccaacgattatggagaaaatccaattctacccaaggaccacaaacatgagcttgcgtttcatcctgcaaaatgagatgagaagctagatcggagagaatatattcttgtaaatacacttagtaggtttcttcatttagttttcgacttagacgtaactgtttagtttactgtattatatttatacgtggtcctaacttatgcgcatacgtttactatacgacaatagcaatctaacatccaaaatactcaacacacgtaaatatcacaaagtatatatttaacgatttctcttgctaaagtttacatctacgtttacggcactccaaatctttaatgttaattagtttgtagtcttggcaatatgttaaaacgtatattcgggaaaacagaaaacagcaaaagcaaccttaaaatgtgtaaagcaaattcaactagtcaaattttataaatttaagctaaagtactaaccctaaatacactcatcaacaatcactttgccactcaatagttttgtcagcagatattgattgatttggcttcagatgttgtttgattgacgccgcattacctgaacatgtatctgttaataaaccgacactaagatgtacgattgtttccaatatgcggtgtgacatcaaaatgattatcactatcattagtttatgga

SEQ ID NO: 18422 - DNA, 2853 bp, DROSOPHILA
atgtggaaaaacgctgtgaaaattcagctgcccgatgtggcagactactatatatcgcatataccgaagcaacccgactcgtacccgtttaatgatcgctggcgccataggcatcatcagttcccgatcgatctgaacaatgtagccaaagatcacaccaatctcgagaacgatcagttgcagtccctctaccgccggctctgcgtcctcaatcgttgtgccaccatgcggctggaccaatcgcacaaaccgcaaacaccacagcaaaaggaggaatcggatgacgagaacttcgctttgagcgagcactggacattccaaccgcacattcgccgctggtcgcggattggggagatgggcctggaactgccgcctccgggacttttgagcctgaacgtggagaagacggagagttcgtcgaaggaatcgagtccggatcgcttcgaggaagatggtgctggcattacactggtgacaccgggctgcagcaaggccggtggaatacccaacgatggatcatcgttgggcgagggatccgatagcggtcgcttgaggagaagtggcagcgaaaggataaaggatcaggctaaggccttgttgagaagagtggaatccattaagtcgagacgtcgcaaacgacagaatcgcgaaaatgtggtcatcagtggaccgacagtactggacctctcgcaatttggccagaggagcagtttgcgtaaaccggatgccgtatattccaccccgccctcaccatcggccctcagtcccatgcacacattccccaaggcgccgttcttcggcaacgaccttaaagtgcccagtcacagcgataatttcctgagtcccaatcgctccagtcccaagagaacgcccactactccgcgttcgatgaggaccagtccgttgcacttcttctccagtcccatgtcgcaactgaaggagggcaagtcggatgattcgtcgtcgtactacagtgacagtcaggaatcgtccacgggtggcaagttatccctgcgaaaaccctccaaggctcgaagattccttcagcgcacgggaaaagtcgatgatataggcgcccattcagattccgagtgtcatcagggacgcaagctccttataaaggatgccaactccaataccacagaggttaaagtgaagaaactaacgcgcggaggatcactgaacttgggcaaggatcccaagaaacgggatggtttccgatcgtcatctttccgatcacgaagcacttcgcgcaaggaggccaagaatgatgaggatacggctggtgcaaccacaaatggtggatccaagcgacagcccgtggttcgttggcatagtttccagatggaggagcgccccaatatgatattccgcaagtgtttctccaagaaaatcgagcctctgcaggaagatgccggaggaatgccatttgccgccatgtcggcgggtcaactgcaaataatccgcaagctggcactggtcactctaaccggccacatggagcgatactgtccatctcatcgctcgggctggaactgggaactgcctaagttcatcaagaagataaagatgccggactacaaggacaagaaagtattcggagtgccgctgctaatgatcctccagcgaagtggacagactcttcccttggccgtgcgtgctgcattccgctggctccagctaaacgccctcgatcaggcctacgatgtggccgatatgctgaaacagtatttccgcgagctgcccgaatctctgctgaccaccaagatgtccgagaccttcgtggccatctttcaacatctcccggctgaagtgcgtctagatgcagtgcaatgtgctgtgctcctgctgcccgatgaaaatcgggaaatcctgtacgtactccttgagttcctgaccattgtggcggccaactcgcaacagaaccaaatgaccagcaacaatttgggcgtgtgcctggcccaatccattttccactcgtccatttcgacgggttccgcttccgtatccgcctcgccacgtcgcaaaggcaagggatccggaatgccggacatgaaggagctggcggaggcgaaggcctcccacgagtgcctgtccttcatgatcgagcattacaagcaaatctacacggcggccaaggaaaagctgagcaagtgcaacttcagttacatggaggagtcgaagccacttcctttggaggcgctgggcgagggaatgcagtttcacaactggcggggatacctgtacgagtgcaccagtgccaccattaaggagggtcgcgaaaaaacccgcggctggtttagcattaattcactgaacgacagcagtgtggacattgcctacaagaaggtgggcgatggtcatccgctgagactgtggcgctgctccacggagatcgagggaccgccaaaggaggtcctcgagtttgtgatcaaacagcgagcctcctgggacacgaatttgttgcaatgtcagacggtcaagaagctggacgatcgcacagagatctaccagtacgcactggatggccaattgaccacggacttttgtgtgttgcgttcctggcaaacagatttgccgcgtggtgcctgtgtcatagtggagacctcgatcgaccatgccaaggcgaagcctcttttcggggcggtaaggggcgtggtccttgcctcgcgatatctcatcgagccctgtggcagcggcagatcaagggttatgcatttggctagagtggatgtcaagggcaagacaccggagtggtacaacaagaactatggacacatatgctcgcactatttatcgcgcattcgtctggccttcaagcacgtggccgatggacccgaaagcaaagtttaa

SEQ ID NO: 18423 - protein, 950 aa, DROSOPHILA
MWKNAVKIQLPDVADYYISHIPKQPDSYPFNDRWRHRHHQFPIDLNNVAKDHTNLENDQLQSLYRRLCVLNRCATMRLDQSHKPQTPQQKEESDDENFALSEHWTFQPHIRRWSRIGEMGLELPPPGLLSLNVEKTESSSKESSPDRFEEDGAGITLVTPGCSKAGGIPNDGSSLGEGSDSGRLRRSGSERIKDQAKALLRRVESIKSRRRKRQNRENVVISGPTVLDLSQFGQRSSLRKPDAVYSTPPSPSALSPMHTFPKAPFFGNDLKVPSHSDNFLSPNRSSPKRTPTTPRSMRTSPLHFFSSPMSQLKEGKSDDSSSYYSDSQESSTGGKLSLRKPSKARRFLQRTGKVDDIGAHSDSECHQGRKLLIKDANSNTTEVKVKKLTRGGSLNLGKDPKKRDGFRSSSFRSRSTSRKEAKNDEDTAGATTNGGSKRQPVVRWHSFQMEERPNMIFRKCFSKKIEPLQEDAGGMPFAAMSAGQLQIIRKLALVTLTGHMERYCPSHRSGWNWELPKFIKKIKMPDYKDKKVFGVPLLMILQRSGQTLPLAVRAAFRWLQLNALDQAYDVADMLKQYFRELPESLLTTKMSETFVAIFQHLPAEVRLDAVQCAVLLLPDENREILYVLLEFLTIVAANSQQNQMTSNNLGVCLAQSIFHSSISTGSASVSASPRRKGKGSGMPDMKELAEAKASHECLSFMIEHYKQIYTAAKEKLSKCNFSYMEESKPLPLEALGEGMQFHNWRGYLYECTSATIKEGREKTRGWFSINSLNDSSVDIAYKKVGDGHPLRLWRCSTEIEGPPKEVLEFVIKQRASWDTNLLQCQTVKKLDDRTEIYQYALDGQLTTDFCVLRSWQTDLPRGACVIVETSIDHAKAKPLFGAVRGVVLASRYLIEPCGSGRSRVMHLARVDVKGKTPEWYNKNYGHICSHYLSRIRLAFKHVADGPESKV

SEQ ID NO: 18424 - DNA, 6746 bp, DROSOPHILA
cgaggaggcagacgccacaaatgccacggaccaaatcatgaatactttgaatgcagccaaagcaacgcttcaacaagagcaatattttaataacaataccaatcttagtaggaacttcaatcacaatcacaaccagagcatcatccacatcagtagccagaaagccaacggcaagaagtccaacgaaacaccaaaagatatttataatctgaactcaatcgagcatatcgacttgattttggaggataaaagccttaccaaagcaatacacgttaccggctctaaatgctttgtcaccatgaagaaaatccgacggctgggaaaatattttcccgtgatgaacttctcttaatagacacagttacttctttgcaaagtgcattctaaatattaaaaagaaactcggttaagcgaactacatagaaaatatgcatgtattaattaaaacgtataaacgtcaacgttatcccccgtatataggaaagagcgcgagaatatttaaatttagtggtagcgtaattgttttgtctgtcgtcgtcattacgcttaaattattctaaatatattaatttatgttaattataagtctaatcactcaatgcaatatttagtgaaaatacattaatgcccatatgacaattgactaaaaaggttatttgttttctttttaacaaattgtgacgaattaaaatggaatgaaactcgcaactcgcacaatctaaaattggcaattcaaatgtttgcgcccaactacagtgtgtacacaccacaaatgttgtagagtaggtaaaggaaataaagcaataaacatttaactacttaaagctcttaagatgtagttaagcaatgatggatgtcaccaagcaatttttttttattgtaagaaaaatatacaatatacaaaaatatattcttttattttacaaaatgatgcgtgtaaaatacattgtacctaatgcaggtaccccaaacgagtacaagccacccttttcaactctggtcacacagagcacatcccgtaaagtttttcagagatgagtttgcggcaggaaaattgaattattcacggaaataaacaaagtaaactaagtggaaactgtaatcctgaccagcaattatgttgcgcatctatcaaaatacttaccggtgagagaccacgcccgaaacgcgaaagccttacgtgcagattttctgcacgatttcgtcatcggcgaatctcatcattcaatgtgttttgcccacaggcgcaccgcgagaaaagctgttgtctactccaccaaggtcgcctgctgcaatcattccacgctctgtggcatcaccagccatccacgtcgggcgcaggatagcgggagctccagttcgaatggcaggcaccgtggccacgaggagttcctacttgccggcaatccggcgcggggctggcaaatgcctccgccgtcgcgtggttacggaatgctggtggtgcgcatactgcggggagccctcaagctgcgatacatcgtcctgggcggcgccatcggcgggggcgtgtcgctgagcaaagtgagtttcgcaagttatataacttgtatagaacttaggagacatgatttgttttccgcagaaatacgaggaatggaaggatggactgccgaattttaagtggctggaggatgccatgccgcagggcgaacggtggagccagttctcgcggaatctcattgaggtgggctcgctggtgaagaacgccatcgaagttggtgagtgtccatgtagacctaccatcgccctttcaatctctcactttaaatggtcatataccttggtcagattcgcattgaactcttcgttttgattgattgatactgatgttattggggcgtttgcttgtagatccaaagctcaagcagctgggcgaggataagttgtcggaatggcgcaactggtttgacagtcgtctggacgatgccatcgaggcggccgattatcaaggagttcagattgtcgaaagtaggttacacaaattacacagactcccaacgttgggaccatttaaagtgagagatccctatctaccgcattcgagacttattcctaacatctgttgcagccaaagatgacttaaaggccaaaacaacggtggccgctttaggcataacatccgatgagagtcgtaagaagtatggtaggttttttgcacacctgccgaaagatatactatatctaatccttctgtgattccgcagagaaactccagagccaggtggagacgctgcagacggagatcatgaacgtccagattaagtaccaaaaggagctggagaagatggagaaggagaaccgtgaactacgccagcaatacctcatcctgaaaacaaacaaaaagaccacggcaaaaaaaatcaaaaaatccctgatcgacatgtactctgaggtccttgatgagctatccggctacgatacgggctacaccatggccgatcacctaccccgtgttgtggtagtgggagatcagagcagcggcaagacctctgtcctggaatccattgctaaggctcgcatctttccccgtggcagtggagagatgatgacgcgagccccagtcaaagttactctggctgaaggaccataccatgtggctcagttccgtgactctgaccgggaatacgatctcaccaaggagtctgatctgcaggacctccgtcgggatgtggagttccgaatgaaggcgtcggtgagaggtggtaaaaccgtcagcaatgaagtcattgccatgacggtcaagggtcccggtctgcaacgcatggttctagtcgatttgccaggaataatttcggtgagcaagtcaatacaagtaaaactgcgcacatctaatgctaatatcattttagaccatgactgtcgacatggcctcagacacaaaagattccattcaccagatgaccaagcattatatgagcaatccgaacgccatcattctctgcattcaggatggatctgtggacgctgagcgcagtaatgtgacagacttggtcatgcagtgcgatcccttgggtcgacgcactatttttgtgctcacaaaggtggatctggccgaggagctcgccgatcctgatagaataaggaaaatcctttcgggcaaactcttccccatgaaggctttgggctactatgccgtcgttaccggtcgtggacgaaaggatgacagcatagatgctattcggcagtatgaggaagacttctttaagaactccaagcttttccagtaagtatagagaggatgtgattggtaaattccaaagttcacctctctccatacttagtcgtcgaggggttatcatgccccatcaggtgaccagccgcaatctgagcttggcggtgtcagatcgtttctggaagatggtgagggaaaccattgagcagcaggcggatgcatttaaggcgactagatttaatctggaaaccgaatggaaaaataacttccccaggtttgtaaaaatgttttaaaaaatataagagatctataacatttgaggtatactcttttagattgcgcgagtctggtcgagatgagctgttcgacaaggcaaagggcgagatactggacgaggtggtaacgctctcgcaaatctccgctaaaaagtgggacgacgctctgagcaccaagctatgggaaaagctctccaattatgtgtttgaaagcatctatctgcccgctgcacagtcaggttctcaaagtaatattttgtagtactaagtgtaggttgtaagcagatttcgccgacgtcatcgatgggggcacgtccatccaatcgcccgccttgtgtgctccgtcattgtgtgtgtttcttgcaagaagatatggcttggcctcgaacctcacgtgtctctgcaaaacgttgtgtcgtttaaatgttttgtttaattttgtatttatcatggcccgcattcagcgtcgaattcccgtgcaagggaatcacatgcgttaaataatttcaaaccggtttgactgatattcctgcaacatttcttgaatcacaagtgtaaatttaatgtgtactccccggcggacgatttcgaatcccattaacaccgtttgcctttgccccaaaatagtgacccgggattgtcacaggttctgcgttgcgatcatgtgccggaaagtcgcttataacgaagatttacgagcacctgtaccgaaaccagattttggtttatgttcacattataaaaacgtatgcgatattagcgatttatgaccgaaaaacccgtttaagccatcgctcagcttgtgtttatttagcattttatgacagacctgttaatttgctcaatgaattcatccaaatcaatgtctaattgaattaaattgcagttatcgagttaggaatctgaatgtttcgtcgctttgtttatcattccccccgtagttgtgtgtctagttaatttggctcaactaatttcatacgattactatgctctttatagattccttcaacacgatggtagacatcaagttgcgccagtgggccgagcaggcactgcccgctaagtcggtggaagctggctgggaagcgttgcagcaggaattcatatcgctgatggagcgttcgaagaaggcgcaggatcacgacggcatcttcgatcagttgaagtctgcggtggtggatgaggctatacgtcggcacagctgggaggacaaggccatcgacatgcttcgcgttatccagctgaatacgctggaggatcggttcgtgcacgacaagcaggagtgggattcggcggttaagttcctggagagttcggtgaatgccaagctcgtgcagacggaggagactttagcacaaatgtttggtcccggccaaatgcgacgaattacccactggcagtacctgacgcaggatcagcagaagaggcgaagcgttaagaacgaactcgacaaaatactcaaaaacgatacggtatgggtagtatacattatatagttagttattcctcatttacacgcattacattatgttggtagaaacatttgcccaccctgacccatgatgaactgactacggttcgcaagaaccttcagcgtgataacgtggatgtggacacggactacataaggcaaacgtggttcccggtctacagaaagtaagttgtaatgctaaaccatttagactgcttatcagttagcacatatgtctcttttttcagacactttctgcagcaggcgttacagagggcaaaggattgccgcaaagcatattacctctacacgcagcagggagccgagtgtgaggtaagtgttaaggttttccctcttatctgaaccaatttacttaacttattgctttctcagatatcctgcagcgacgtcgtgctcttctggcgcatccagcaggtgatcaagataacaggcaacgcactgagacagcaagtaatcaatcgggaggcgcggcggctggacaaggagatcaaagcggtgctggacgagttcagcgatgacgaggagaagaagggttacctgctcaccggcaagcgcgtgctactagccgaggagctaagtgagtgctttgcttaattgaatttggcgccaatttaattgctttcaattcaacagtcaaagtgcggcagatccaagagaagctggaggagttcatcaattcacttaatcaggaaaagtagtgtgccatgaccaaagacacaacacccgaggcgttacttatttaacttgatagtttaagaccacatttgaaatgtttgttcatagtcacgcttgagccccttagttaagcatactttgtgctccgaaagtaataaacaaatagatcgttagttcgtattattgaaatcgtctttattgtttatgaagtgtaaccttatgtcgcatgcaatgcaatgtaaactcattaatttaaatgtaatataaatcattcattctgttttaatgtaattgtagttgataaacgttaacgcgaaacgcactcatcgtgctgagtatgtagcggtccgtgtgtgtttctgaatctgtatcgtgtaatatatatatatacatatatatttaaatcggtttgcataagagcacagcacttttaccagatgcctcatcgtgcggttgattgtttgtttcgttttgtccacgatcggctaatcccgcgatgcgccggcatctgtatcggtatcgagatcggtggtgggtgcattaaccccgaccgatcgtctggccgcgtctctaattgattgattgtttgattgataaacgtatatctagctaactatgtatgtagctagctatgtaacataacaagtccgtgattgcggtgcagtaccatatctcttacaaggtaaacaaatgctcgttccctatcatgttaaataactcaacaaacgattcttaacttggcagtcgacttgtggcccagccatagccatgtgctcagctgcttaaggctatcgtaataatattaataatgtgttcggttctcctccactccgatcctccgcttagtctagctgctaaattctagtccacatatgggctcctccactaaagcttatagaaacataatttacactcgcgctccactctgctcgtatgcgtgtgatttgggatagggttggttgtgtggtattaggggtgtgtgtggtaggcactcgatatcgctgaaggcacaacattacgattagtcttatcttaattgtattaagtactcggaacacgctttcgcactcgcttccctccgaaatcgggagttccttcgacaggatgagtg

SEQ ID NO: 18425 - DNA, 2926 bp, DROSOPHILA
tcacacagagcacatcccgtaaagtttttcagagatgagtttgcggcaggaaaattgaattattcacggaaataaacaaagtaaactaagtggaaactgtaatcctgaccagcaattatgttgcgcatctatcaaaatacttaccggcgcaccgcgagaaaagctgttgtctactccaccaaggtcgcctgctgcaatcattccacgctctgtggcatcaccagccatccacgtcgggcgcaggatagcgggagctccagttcgaatggcaggcaccgtggccacgaggagttcctacttgccggcaatccggcgcggggctggcaaatgcctccgccgtcgcgtggttacggaatgctggtggtgcgcatactgcggggagccctcaagctgcgatacatcgtcctgggcggcgccatcggcgggggcgtgtcgctgagcaaaaaatacgaggaatggaaggatggactgccgaattttaagtggctggaggatgccatgccgcagggcgaacggtggagccagttctcgcggaatctcattgaggtgggctcgctggtgaagaacgccatcgaagttgatccaaagctcaagcagctgggcgaggataagttgtcggaatggcgcaactggtttgacagtcgtctggacgatgccatcgaggcggccgattatcaaggagttcagattgtcgaaaccaaagatgacttaaaggccaaaacaacggtggccgctttaggcataacatccgatgagagtcgtaagaagtatgagaaactccagagccaggtggagacgctgcagacggagatcatgaacgtccagattaagtaccaaaaggagctggagaagatggagaaggagaaccgtgaactacgccagcaatacctcatcctgaaaacaaacaaaaagaccacggcaaaaaaaatcaaaaaatccctgatcgacatgtactctgaggtccttgatgagctatccggctacgatacgggctacaccatggccgatcacctaccccgtgttgtggtagtgggagatcagagcagcggcaagacctctgtcctggaatccattgctaaggctcgcatctttccccgtggcagtggagagatgatgacgcgagccccagtcaaagttactctggctgaaggaccataccatgtggctcagttccgtgactctgaccgggaatacgatctcaccaaggagtctgatctgcaggacctccgtcgggatgtggagttccgaatgaaggcgtcggtgagaggtggtaaaaccgtcagcaatgaagtcattgccatgacggtcaagggtcccggtctgcaacgcatggttctagtcgatttgccaggaataatttcgaccatgactgtcgacatggcctcagacacaaaagattccattcaccagatgaccaagcattatatgagcaatccgaacgccatcattctctgcattcaggatggatctgtggacgctgagcgcagtaatgtgacagacttggtcatgcagtgcgatcccttgggtcgacgcactatttttgtgctcacaaaggtggatctggccgaggagctcgccgatcctgatagaataaggaaaatcctttcgggcaaactcttccccatgaaggctttgggctactatgccgtcgttaccggtcgtggacgaaaggatgacagcatagatgctattcggcagtatgaggaagacttctttaagaactccaagcttttccatcgtcgaggggttatcatgccccatcaggtgaccagccgcaatctgagcttggcggtgtcagatcgtttctggaagatggtgagggaaaccattgagcagcaggcggatgcatttaaggcgactagatttaatctggaaaccgaatggaaaaataacttccccagattgcgcgagtctggtcgagatgagctgttcgacaaggcaaagggcgagatactggacgaggtggtaacgctctcgcaaatctccgctaaaaagtgggacgacgctctgagcaccaagctatgggaaaagctctccaattatgtgtttgaaagcatctatctgcccgctgcacagtcagattccttcaacacgatggtagacatcaagttgcgccagtgggccgagcaggcactgcccgctaagtcggatcggttcgtgcacgacaagcaggagtgggattcggcggttaagttcctggagagttcggtgaatgccaagctcgtgcagacggaggagactttagcacaaatgtttggtcccggccaaatgcgacgaattacccactggcagtacctgacgcaggatcagcagaagaggcgaagcgttaagaacgaactcgacaaaatactcaaaaacgatacgaaacatttgcccaccctgacccatgatgaactgactacggttcgcaagaaccttcagcgtgataacgtggatgtggacacggactacataaggcaaacgtggttcccggtctacagaaaacactttctgcagcaggcgttacagagggcaaaggattgccgcaaagcatattacctctacacgcagcagggagccgagtgtgagatatcctgcagcgacgtcgtgctcttctggcgcatccagcaggtgatcaagataacaggcaacgcactgagacagcaagtaatcaatcgggaggcgcggcggctggacaaggagatcaaagcggtgctggacgagttcagcgatgacgaggagaagaagggttacctgctcaccggcaagcgcgtgctactagccgaggagctaatcaaagtgcggcagatccaagagaagctggaggagttcatcaattcacttaatcaggaaaagtagtgtgccatgaccaaagacacaacacccgaggcgttacttatttaacttgatagtttaagaccacatttgaaatgtttgttcatagtca

SEQ ID NO: 18426 - protein, 906 aa, DROSOPHILA
MLRIYQNTYRRTARKAVVYSTKVACCNHSTLCGITSHPRRAQDSGSSSSNGRHRGHEEFLLAGNPARGWQMPPPSRGYGMLVVRILRGALKLRYIVLGGAIGGGVSLSKKYEEWKDGLPNFKWLEDAMPQGERWSQFSRNLIEVGSLVKNAIEVDPKLKQLGEDKLSEWRNWFDSRLDDAIEAADYQGVQIVETKDDLKAKTTVAALGITSDESRKKYEKLQSQVETLQTEIMNVQIKYQKELEKMEKENRELRQQYLILKTNKKTTAKKIKKSLIDMYSEVLDELSGYDTGYTMADHLPRVVVVGDQSSGKTSVLESIAKARIFPRGSGEMMTRAPVKVTLAEGPYHVAQFRDSDREYDLTKESDLQDLRRDVEFRMKASVRGGKTVSNEVIAMTVKGPGLQRMVLVDLPGIISTMTVDMASDTKDSIHQMTKHYMSNPNAIILCIQDGSVDAERSNVTDLVMQCDPLGRRTIFVLTKVDLAEELADPDRIRKILSGKLFPMKALGYYAVVTGRGRKDDSIDAIRQYEEDFFKNSKLFHRRGVIMPHQVTSRNLSLAVSDRFWKMVRETIEQQADAFKATRFNLETEWKNNFPRLRESGRDELFDKAKGEILDEVVTLSQISAKKWDDALSTKLWEKLSNYVFESIYLPAAQSDSFNTMVDIKLRQWAEQALPAKSDRFVHDKQEWDSAVKFLESSVNAKLVQTEETLAQMFGPGQMRRITHWQYLTQDQQKRRSVKNELDKILKNDTKHLPTLTHDELTTVRKNLQRDNVDVDTDYIRQTWFPVYRKHFLQQALQRAKDCRKAYYLYTQQGAECEISCSDVVLFWRIQQVIKITGNALRQQVINREARRLDKEIKAVLDEFSDDEEKKGYLLTGKRVLLAEELIKVRQIQEKLEEFINSLNQEK

SEQ ID NO: 18427 - DNA, 2382 bp, DROSOPHILA
gacatcaatccttggcagcgaacgctggacacacatgacaaggagtatgttccacgtgcggtccgaccagacgtccctaagaataagaacaggttcaagaagacgtactacccttaaatgaataaatataaaacacttcctaaggttacacttgttaaaaatgctgaatttttaatgtgaaatactggattgcagattcggagcaacgaaacggtgtacaaagtttctttaaactttgattaactcaattttccgcaaacttttgtcagtatgttaatgatttttaatataaatattttgttaaatttcaatttaaattctatgccatacaaagtatatatatttattaactttgttatgcttgtggttaaacacttctgtaaatttataagctagtcttttttatcttaaattctttcaaatagatatgattatacaaatacctggaattttgccaattattagtgctgatgatgctaaaacttgccaatgcaatgcttcttatcattatttaattgtttatgcagcacatatttattctagattccattgtttatttcatttatcagcactgcaaacataccgaagttatctcaaaaagtgggtaaaatgcggttacactgcaccagaaccatatttttcgaacgtaaaaaaggtttataatgctatagtgtagtttaaatctttttaccaaatcatatattgtttgaacataatagtgcactaaggtttatatgatattccatataagtacacttcaaactcttacttagtctggtaatatgtatgcattaattaattacttgattattttattatcccatttattatagtagttttacatttacgataatagctttatagtccactacatcaaagttaggattgctgaaaaagttaccacttgttggttatttcggtaacgtcccagctaaccgtatggtatgttataacggccgtgcgacggtcacactggatctgaatagttaggctcgagtaaataaccagtttgagactttacggtggttcggaaactcgtatctggcgcttcggttgtccaaaaagccattgtcgtcgaagggctcattatcaacgctatcggcggccagttcatcgggcatttcatccggatttcccagtcccacaagtattgcggccaagcccaagctccacctgaaaacatcctctagttcgcgacccgctggcagcgtttcatccagttcgtggaatccgtttcggcgaacgcctagcttagctaaaatattttaagtagccatcagttttattttgtgttttatttttttgctcttaaggcaatggccatttcaagttaaaaagaatgttgtgcagtttaagttaagcaataaacttaatgattttttaaaagcccctctattatacccataatttattttattcctattgattcaatcgctcccaatcacccatcgataataatctacacggaaaatgaattgaaataaatgtttttaatgttttatcgaatttaaaatatatatttatacaatttttgacatctacatttgaattaaatcattacgatccaatgatttcgaaatttcagttttttatgctggagtcgtagggtatcgcggactttttgaaatagtttgggatccaatccacttctgttttgcgaatcctcaaattacaattataaccgaatgctaacaatttatgttaattaatcacaccaacgactattgcccaacgagtttaagaatattgttgatttaactggaggatactgctatatgattacttcgcacgctttccatacacatttgaacataggttcttcttatcggggtgatgtctttatgcgttcgcagattgctatgcatagaacagccacaatatccacacaacggccaaatacgaaaacagcttggacagggtctgttcatcctcgtattgccttgttccccgattagcagctaaatacatgggcaaatgttatttaatatcaatctcagaactattgagatggcatgtaacctaccaggtggacgtggttcgccaaagttgagcgtagatgttatgaacccgaaaggaaaagctccaataccgaaagacatgtgaaatccgtcgccgaatccgaatccagggaacccgggaacaggatctggttctgtacgttgtccagcggggcgtggtggaactttgttactgcaaaacacatataagttgggttattgaaaaatactcatgttgaaagcggttcaaacctaccgtggatcttcctggtgtgtactatttcttccgtacagcggtatgaccttatccttatcaacggcagccttacaaacgggacagagtttgcgattgggacgcgtcaggagccactgatgcaggcacggc

SEQ ID NO: 18428 - DNA, 2168 bp, DROSOPHILA
ataaccagtttgagactttacggtggttcggaaactcgtatctggcgcttcggttgtccaaaaagtccttttggatcataatcatttcggatttcggatctttgaaccatggatgaaaaggaacacgaattgtcgacgagggtggtgaaaaacgaggagaacgaggatgacgagaagctcaatgagttatccttttgttttgttcggttgaattcgtcggtggaaatctatcagagcgaaagtcacaatggaattatgcccatgataccgctgggcctgaaggaaaccaaggagatcaatttcatggaacccttctccgacttcatcctggaacactacagcgaggagccctcgatgtacatagatgccatagctgatatgacggacacgagacaggcatccaaaacaccgtcacgagatgccctgggagtggccctacttttccgctactacaacacgctgtattacgtggagcgtcgcttctttccgccggatcgtaacctgggcgtgtacttcgagtggtacgactcgctcacgggagttccctcgtgccagcggaccatcgcgttcgagaaagcctgcaccctgttcaatctgggcggcatatatacacagatcggcgctcgacacgatcgcacgacggaacggggtcttgacttggccgtggatagttttttacgggccgccggggtctttcgtcacatctacgatacgttcacgaatgcaccatcgatggacctgaagccacaggtcctggacgtgctcgtttccctgatgctttcccaggcacgagaatgcctctttgagaagcttcagctgcagatcgaggcgatgagccacgattgccaggcgtttcgggatctggctggcgaggctgctcaaatatcgcacgagtacaatgagatgcacaagaatatccaggcgaacgatacgcacacctatcttccggaatgctgggccggtctagtgccagtcaaggcggaactctacaaagcattcgcacatttctacaaggcacggagcatagatgcgacagacgagctgaaggcatcaaagtcaagtcaaaagaaccaagaatccttcatcggcaattcccaggaggtggagcgcatcaccacagccgattatggagccagcgatgaggcgtccacctccattgccaacaaactggcccacttaaaggaggcgctggccagtatcgaggaagcccagcgattgcagcggatgtgtcggttcttgaagaacaaggcatcactgactgaagtcatgaaggaggtgcactccaaatcgcaggaggagctcgagaagttcagactgcaagcttcagccaaaaatatcgaagatggcgatcttctagagcgatcggtagaagcatcttcgaagttcacgttatccctgaccggacccgacttcacatcgcacaaggttaaggatcccttcaagcgcctcggcccgattgcaatattctcggcgagacgccactggacagcgcccagatgtgtgcgtctccagaaaggttcctccctgtatcacagcgtgcccagcaatgacaacaagtgcccattggataacgatgatgacgaggagcacgatggtggatacaatctgtacaaggaggagtttgagaactttggcttccatgtgcgcggcgatgctccggtgatcattgcccacgttgagattaattctttggcagaccttggcggcatcaaggagggagacttcatagtcgagatagccggcgtggacgtgaagtggtactcccatcagcaggtggtgcagctcatacaatcctgcggctctacactcgagctgagagtgataacgcccatggatcgcaactacttgaagccattgtcgtcgaagggctcattatcaacgctatcggcggccagttcatcgggcatttcatccggatttcccagtcccacaagtattgcggccaagcccaagctccacctgaaaacatcctctagttcgcgacccgctggcagcgtttcatccagttcgtggaatccgtttcggcgaacgcctagcttagctaaaatattttaagtagccatcagttttattttgtgttttatttttttgctcttaaggcaatggccatttcaagttaaaaagaatgttgtgcagtttaagttaagcaataaacttaatgatttttt

SEQ ID NO: 18429 - protein, 648 aa, DROSOPHILA
MDEKEHELSTRVVKNEENEDDEKLNELSFCFVRLNSSVEIYQSESHNGIMPMIPLGLKETKEINFMEPFSDFILEHYSEEPSMYIDAIADMTDTRQASKTPSRDALGVALLFRYYNTLYYVERRFFPPDRNLGVYFEWYDSLTGVPSCQRTIAFEKACTLFNLGGIYTQIGARHDRTTERGLDLAVDSFLRAAGVFRHIYDTFTNAPSMDLKPQVLDVLVSLMLSQARECLFEKLQLQIEAMSHDCQAFRDLAGEAAQISHEYNEMHKNIQANDTHTYLPECWAGLVPVKAELYKAFAHFYKARSIDATDELKASKSSQKNQESFIGNSQEVERITTADYGASDEASTSIANKLAHLKEALASIEEAQRLQRMCRFLKNKASLTEVMKEVHSKSQEELEKFRLQASAKNIEDGDLLERSVEASSKFTLSLTGPDFTSHKVKDPFKRLGPIAIFSARRHWTAPRCVRLQKGSSLYHSVPSNDNKCPLDNDDDEEHDGGYNLYKEEFENFGFHVRGDAPVIIAHVEINSLADLGGIKEGDFIVEIAGVDVKWYSHQQVVQLIQSCGSTLELRVITPMDRNYLKPLSSKGSLSTLSAASSSGISSGFPSPTSIAAKPKLHLKTSSSSRPAGSVSSSSWNPFRRTPSLAKIF

SEQ ID NO: 18430 - DNA, 18060 bp, DROSOPHILA
cattttgcgtttgtagttacactgtgcatgtgaggcattaggtcaggaattcatgtggttttttctctattatatgtgacttgagtggatctgtaaattagccaaagaaacgagttcaatgaaacaacaacatttttactgataaagaaccactttaaataaattccgtattactttattttttgtgcaaatgaaatagacaaaaatatttgaaattaatgctgtatatataagttctttttaaaatattaaagataagctaaactaaatggaaagctttggagcatataataagcaaacataattccattgaaattctatagctttataatgttataaataatcaagcttattaattggcagttttgtattcaataaataagggtatcaagggtaatattagctaattcaaacgtttgatatgctccttcgccattatccttggcattctgaatggctttctttctttcattcttggactcgacagtttctgcaccattagtttaaaccgtattcgaataaatgccacattatgtgccattgaatgtcaattacaaaacctatatatggatggtccccttgcctcctagactcgactcccttaagcttgagctgcgtggccactcctctcgctactttcgcaactggaaaatgtgaaaagcggaagcggaaaattgaaactaaccccacccaattcaggatagcgtgcgactaccaactgccacgccttctcctcagctttggctggattttatttgctttcctagcagtgttaattaaaattgtgtcaaagtttatatccgtgaaatattttggggttttttagggtcagcttaattaaggactattaatctttaagccttaaagtgcaagtagcaacaggcggagttgcgggtttccttggactgaaactcaagtgcaatttgttattttcttcatctttcagctgctctgcgccgcttgtgacaacaaattgcactcgaagctgaggcttttatgaatgctactgcgttggagtcggagtctgagtccggatacgcatctggaggagaacggcgccggaggcatccatcaaaatggtcttcagctatgcgtgcatggtgctccagcgcatcgtggtgccagcggttctggtactcggttagtagttcgatttctagtacaaagaattcaattaatacataaccgaatttcttataaatttagctgccctgatgcgaccagtgggcatatcctttgtctaccttttgatgttctttgtgtcgccctttgttccgctggccacgcgacgcaacttcaaaggatctgtgactgccttcttcatcatcctgctgacgttgagcacgctggtcctcttgggtcacataacgctacagattctggcggtcagcctcacgctgcccatctacaattgctcgttcagtgagcgtctgctgcgtcacattggcttcgtgagctttattgatctacagtgggtgttttggcgatcatgtgatgccgtgccggtttattaatactatatattttgtaggccatttgccatcatcgaatggctagtgcctgaggtgttggttttcgccacctccctgggttcgtatctcacggtgaagcgagtggcctcacagcccgtcggcgccgagcagctggagaacggcgaggtggtcgatggccaggcggaaaacgcgcagacatcttctcagccatctgccgcagatgccaatggaggagatgtgcaacaggccacggtcaccacgccgctgcagcaacagcagcagcagctgaggaaacgagtgtccatgatcagccagcacatacactttgagggcttggtcaagatctgtaagtaggaactacttatactgaacccacttgaaacgtaaatttatagcggtaattaacatacagatcttgttatatatactttgtatcaagaattagtctgaaaatacttaaactttagtttgcctaccacattccccagaagtttttcaaacaacatcctcggagaattcataggctccccccaacgaatgtttttcaatcaaatttaatgaatcgctttcatcgacagctcctctgttctgcctggccacgctgttctttgcggccgtactgcgtccctcggtgcctggcggattttactttctcattttcctgctgtccggcacctactgggcaacatgccagacgctgcaacggtgcgtatcccatcaacgccatcaattccggacttcctactcacttttcctctttgtattctcgcaccttttttgttgcaggggcttcgctttgttgctgcgctgcgtgatggtcgtcctcgtgctgcactccctgtccattgtgtcataccagacgccatggatgcagagccacctcaatcataccaccctgacagctcggtaagtaagagcgtggacgttgctgtgccgggaaatcatcagactatcatctttctctgttcatcagattgattggactggaaccgcttattgaatcctactgctcgccggatatacgagtctttctgtacaataataagctatccctggactcgtacctcaatccctttgcgttgttctttgcctatttcgcactggcactgaccaccaagcatctgattaagccacgggtaagtttcaattgtggggaaattgaatgcaaaagtcttctggtttagactgctgaaacagattataagattaaacaacaggcttcatttaacaagagtgaaagcggccctaatttgaaatatttactacttcttttggctaaaatttaaaaatttaaaagattggaactatgtatatgcctcttgaaatcgctttcattcttcttaaaaatctgacaaacactggaatatagttttatctgctctcaatttctgctcttcttatgctgccatacgcatccggataaaccacttcaatttcaaatcttctaacacaaaaatctatgcacgcctaaacgaaaacatgatataaacacatctaacacacctaacaaaaaaccaattgtcactaacacacaacaccgaacacctgaacacctaaacacctgaacacctaaacaccgaaatccacgaacaccgaaataccgaactccttagctggagcccaagcccgccaccgcacttgggcagcaactagattgcaatagcagcagcatcaacaacaccaccggcaacaaggtcaaccgccagctatcgctgctcacctcgcagacatcgcggggtcgtcgggatgggtcgaatcctggcggaggtggaacgaccattaccaccaccacgaccaccacctccaccactgcaatccgcaatcagcgcttgagtgtaagcgagcgagtggattgggccagggttttctattttgatctccattcagtgtgtgaatgttgaatatttttggggatttcgggtggacaatgaataggaatggatgtactagaatggggacacaaaaaattcccaataagccggcttacctagatgacctgaaaagtataatccattacgacaacttgatggaaaacttatctcggctttaacgtttttatttgcaaacgtccttttcgaatgcacttaggggtttacttatttggttttaaacaattacagcctttaaaatgtattaataattcaaataaatattgcgggtataatgaaattagtatcaggattgaaactaggacaaacactatacacaattagtggccgcaactaaaacccaactaattgttcgtctgtgccttaatgtttaaccccaaaactgcgccgaaatttattcgatttgtgtgcgctttcgctaaagtctgaccactattttctttttttttctttgcgattttcctgccattttcctttttgtatgtatgtttgtttttcttttgatttttgtttatgctctctcttttattacttccgctttaggtttctttgcgccgagatcagcgtgcaacgttaaatgaaccgactgagacgacgcctgtacgtaaactaactccactttgcgccaatagcgtttatctttctcccaagcctaaccccaaaaatcattagactagttctagcctatctctatatctgactctgcctctgtctctctatgtatcatttggattaagctttcctaacgtctgccatttgtctatgttaaactgtactcgtctaaatctaacatctctagcgatctgtagtactaatcgccgtagtatttcccccgatatcaagggatattatctaacccataatataaactaaacattgtactaactgcgccagtgtgtctgtatgtatgtgttctgggccatagagcaccgccaaagcgatacaaaatagtttgcaactctcacccggttagttatcgatcgccatcaacacccgtagtgtcctagaactttagtactctatgtctgtacatatcttgtttagtaagctgatctctcttcttaatgtctgtcctaataaacccaaactccgagctaataaaaccatatctgaatctatagttggtgcggcaaagcacgcgaaaggcacgtacaccccaaccgctggaaagtggatcctcggtggcgccaagtgtcactcagcggggcaacgacatgcagctggaatcgatggagcagcgatcggaacaggagaacaccaccacatccatactggatcaaatatcgtatggattcgtcagcgtgggaggattcatatatcagaatagctatatattcaccaatattcttatgatggtaagttcgtgcacatatatctttgagttatggtatagttttcttttcaaatatccaatctattgataggcctggtccatagtgtatcacagttggctgacttttgtcctcttgctgtcggccaacgtactgtggatgattcccaaccagaggaaggccatgatgcggtccagtccctttatagttctgtatgctgaggcccttttgattgcccaatacatatacggcatggatctcaacaacgaagagctgcccacgagcgttcccgtaagattgcgacacttcaattacgaattaaatttaattaactgaagtatttgcagactgcgggcattaacctgcaacaaattggcttcgaacgacccatcgagaaccaaatgcggccatgtgtgccgctgatcgtgaagacagcgtttgtgctaatgttttgggtgacatcacgacagttcttcaaggagaagcgcgatcgccgacgggacagcactctggcggacttcattgccccactgcagattactgtgggatcggctggctccagctacctcatcaacgatggcaagaagacctcaaagttcctaaagaaggccggcgatgtgatcaaaaatctattggtgcgtctgtggatctggctactcgtgctggttatcttcctttgcgccatcactggcgagaacatgaccggcttccgcatctgctacatggccctgtttctattcttcttgctagtctttcaatcttcgtccaaggcgtgggttaagatcatgtacggcttctggctgtttctgatcttctatgccatgtccatacttatattgatctacacatatcaattcgacaagttcgacacgtactggagcgactatcttaatgtgtccgcgactttgtaagttggcttgttttctaaactaatatctttaagtcgaccatgtacaatgttaagttcaccgatcaaaccaaatgtttgtattttaggcaaaaggacatcggccttaagcgctatcagaccaaggatctgttcctccatttggtctcaccgacgataattgtgatcctgaccgtcatacaagtgcactacttccacaagcgctttattgcatcattgcagcagcagccgttggctggcggatcggcacagcagaaacccacggagacaactgccttggaaccggcgccatcgaagcgacgtggcagcgccggttcactgcgtaaatctcagggtccatcggcggaggctgctccaggagccaccaccgatttcgagacatctgtgcgagacttggtgcgcatatcgttccgcaagatcaagaacaagtcggagtacatcttcaagaacttcaaggatgtcttctggcgcttcctggagctgcacatcatgaaggctgtgtatatcgcagccttcgtgtgcagtgtcagcgaagtctgcgtactgcacattatctttgtgggtttctgtgtgctgggcgccacctcgcggaaggccgttcaggtggtgatcagccgcctcatctcgttcattgtcaccgtcatagttctgtccaagatgatctaccagatcgagtacttgagtcactcgcagcacaatgtggtttgtgtaagtgaatgttatgcgatgagaaatctcattatattttaatcttaatcatatttcgcagtctgacaaccggactgccaacaatgcggagtggattggtctcaccaaggctgacaaggtaactggcggactgatgagcctgttgcgcacctacatcatctacatggttattgtgaccatgcacgcagtgatcagtttgcggcagcttcaaatgcgcgtcaagatcggagcactgaatgctccacccaccaagctgctgttccccaatattattcgagctgatgctgagaaggatctggtgggactggtcaagtatctcctcaactttggcttctacaaattcggcattgagatatcgctaatcgcgctggtctctaccatcacatatcgccaggatattgttgccgtagtctatgctctgtggctagtggtgcttttgcttctacggagatcgcagtgcgccaaaatatggggcgtgtttcaggcattctttgccatctccatactgacacagtatatagtgctggtaggattgccgccgagctcatgcctgggtatgatatgaatcaatcaatataagtgcagtttaataacttttttgtatgccttgcagtgtttccctgggatgaaggtcccttcggcgagggcatacaacgctgggcgatgctgccaggagccctgcacttcaaccacgtacccaagctgatcttcgactttattgtcttggtcattctgaatcgacagaagagtatcttctgcatcgaacagcgttatgccagtaacgatgactacccgggtggcagcaatcgcagtgtgatcgcggatattgctcagctaggtcgcgttcccttcgacaatcccacccacgacttttgttcgtacatacgcaactactcggacatccttaagaacggagtgctgtgcggcttctactggtttactctggcagttgttttcttggccggcaccaatattgctgatctgctggcactgggttatctgatcggagcgtttatcttcctgtggcagggatcggatttctatctgcgtcccatacacaccatcatctttcgctggaagtggctgctggcattcaatgtggccaacatacttatcaagacgtccttccaaatggccggctgtttgttcatgacccaactgacgaaagactgctgctggctggtgcacatgctcggcatcacatgtacgagcaatgtacttacagagcaaataatgctgcccgaggaggctgaattggcgcttaagccaggcgaatgtcctaagatcacccaccaggtggtccttctgtgggacacgatttgctttgccttcatcatcttccagctgcgcatcttcaagtcgcactacttctgtcacatcataacggacaccaaagcaaataacatcctggcctcaaggtggggttttaaatctctggtcattctatcaattaattgaacaatttttatcacagaggagccgacatcattgagagcctacgacataagcagattgcacatcgacacgaccatgaaaagcaggtgctgcataagatcaagcgaaagatggagcgcatccgtgccacgcagcagaagatgctacgacccttggacaaacaaacccacttcgacggtaagtgcttgcaccatcatcacttccaggggtttttttcttcccctatctgtaattttttggagctcgaacttctggtcgcgttttttgcaatttcccccttttgtattttgatcgttggaaattgtcgcgtgtgtgtcttacattaatctttggcttcgtgaagggcgacgcacgccctcagagcacgccatgtccgatgtggcgcctttggtccacaatagcagcttcacctcttgtcaaggatctggctatctgaccccagatgagcatagctccgccacctcaggcacttcatcgccagccagggcatcgatcctctccagcagtggaggcagcgtggaaagcgtggacagcgcagacgctgccgtgattattgaaccggaaatcaatgtgatgccgtgtgatgagattacggactatgtggatgttcagtctgtcagcgaggaggagacaactgtggcaatgcctaaaaaggatcttagctgccaatcaaaggaatgtgttttcaaaagcccagagccttcgaagccaaccacgccgagtacggatgccttgtctactctcctgaccgagggatttttggaaccgaaaaggatctcgttgggattggctcctcctgagctaagtcctcctgttgggatgcagtgcctggcacctccgttggctgcttatgccacagctatggcttctagtgcagccagctctgtgctgtccaccaatctgactccaaatcttcgccgagaacatcggcgtcagtcgtcaaccaatgccgctgtttcctggaacgaaactgtatccatcaaacgatcgcccatgaaaaagcaaatggtaaaaagtggaaagtgcgggatgcaaaccgttcacattgtgttattaagtttaaagtgttgatttgattaaagaatttaattaatttagacagaataatgttataaatatttataagtggtaaggctgaaaagtgtgttcggtttgcatcccaggagaaaacaatcgctcactcatttatcccacttgccaaaacagtcggcggataaggaggaggtggttaccatgcggcacaagtcgctacaccgccgacaccagagcatgggaaacgccagttactctttggacgaagccagtcagtcgcagcgcaagcggttgtccagcaacttatccggagctcgggacgaggccgctctgcgatccgcacagagaccacatagctggggacccgtgggtacgagctcctatatggagtcgctgatgtgcgccttctacgagcctgctctgctgcatggaccatgtattggatgaatcattactctcaaattctaatgataattttgctcaattttaacgaaactctgtacagaaaaaaccatttgttcaatgtgcgtgatctttaatcttcaataaaaccgattggggtcctgtgtagcagaccccaagaaactgcctccatgagtctggcctgtaaataacactaaactagataacttagctcccaattacttccatttgggttaatggttaagtgcgcaatcagaactcctgagcgctgctacaagtgtattataaatctcttcatcgatctaaatgtgattgctagaatcagtttcttaagcttcaggggattcacttgtgttgtaaattaagatttttgatctgcatggatgaaactcttctaaatttttctaaaagctttttataatataatactttttctaaatatttattttatttacctcaaaacggatataaaatctgattatatatttccactgtctataagcatattgaatgccatgggtatcggttcagaaatatacaatttacaacatatgaagcatcggttagccgttgttagattatgttccatcttgatttcaattaaagccaaatgtctaaattctgttcgtttttcaacgttttatttttgattattttgtatttgattattttttagaacatggttatccacttcctgcaccaacagtacgcagaaggaaggaaattaaattacatccacatggtaaagtttttgtttgttgtgcctcatttgttcgctaactaagccgcccccatgccatgtatatatatatataatctctacccgattaactgcatgaaattcggtgtgctgctatgtaaattgaatgcataaagaaaaccctactactcctagcaactatttactaatatctatctaaatgttgttaaacaccataaatgcaacacttcgctggagccgtaataatgttgttttcgatgttccctactaccctagctacccgtgctggtgactactatatgttcgaggagatggacgataagtttgagctcgacttgatacacgacgagatcgacttcctcgaggaggagaacatcaccgagagcgagatgaagatgcagcgacgcaagaccctctacgatgtgagtttccacatatttctagttgggattcctctgtgtttaggccatgctgcatgcaatacttgcccgcatgactttcgaaccgtacttaaattcttgtaaattccaccccctcccaaaaaaaaaatccaaaaaccaaaaccaaaccaaccaattgccccgacttatgatcgaaggtgtggaaggatctgaatgatgccgagtatcgtcgccacttctatatgcgtgagcgttcctacgcctcagagcccggctcacgcattctcctgaagttggacgacgagaaggagaagattgggcccgatctcggcctggccagcgaccacgatgaggacgacgataccattgagtgcgaccttggcatgcgcacctcgacgctgtccgaaccgctcgactttggtcgtcgcagccagacgctgctcgaggttgtgagtctatggagcagagatacctgcatatcttgtcttaaattggcgcacctcccgttgatttcacatattttgctcacgagctcaagtttttcaactgcgcccgcaatatcaagctgccgaccagcagttgggtgcactcaccttaaaatactgtacaaaaaaaacaaaaaatcatataaaaactacaaacgatttcttgtaactgcatattgtataagcttggtttttcgttaatatcgtgtaaatgtctttcttacagctattaccagccagtggtctaactcgctatatttatttgaacccacagaagtcgaaggatgcacccacaggcgagtttccctccaccagtaagggtatttcgaaggagcgcgatgcggcaacggcttccagttcggctagtccagcgcccactagggatgtgggtgatctgcctgtgattccaccaccctccactggcctgggacgtgagcaaacctccaaggagacctccgatagcaagtccaaaatggaagtggacagcggagaggtgacggccaaggattcggatgaggacttcgataccaatcccattatcagactgctcgagggcttcttggtcacgctgaccataagactgaaccgcttttcgcgcaactatcgctttgtgaatcgcatcctggccggcgaaaagaagaccctaaaggtgggttaaatccatcctatttatgtgcagtgtgcctaaaattcctaattttgctttccattacaggagtccagttcgttgaaccgtctggggctgtccagtgccgctgccatgttccacttcctcaaatcgaatttagagaggtatttagaaagcgattctggaaaccagctccagtgtgcgccgcttgcgttaaaattttgaattaagttttgatttttggaaactgaaaacccccaaacgtcgtagagtagcgtgttctgatcgcgttacgaaccgttcaatatctttgtatttaagtttgttaatagttatgttcggtttttattcaattatttatttcgtattctttttcttctttttttatttgcatatccgttttacttttgtgtttcgtgtgtttgaaactctgtacctgcttccacaacatactactactctcgaaatcaacgacacacctgccaaaatgtttcaccatctcacctccatcatttgtgccaccatgttgttgttgatacccgatccgatcgattgatgttgctgttgctgctgttgcgatgaagcgatgaaagtgaaccgcccgcctcctcatccaccccgcggcgggtggtgatcgcaccaccgaatgccaccgagcactcagaccccaccagcaccacactgaacacgaacacgacaaccacaccgctatcaccaccagaaccactgcaaccactgcaaccactgcaaccaaatacaaccagtacaccacagcaacagcatcagcatattcgcgctgccgaagaaatcatcgaactgcctgtagataccgtggatggagtcgcccataggtaacccaaaaccacatgaaaatcgttgttttaaatgcggggattccaaaagcgtaatgatcattatgaccagttgcaaaattcgatttttcaagtaaaatgcaaatttttagcttaataatacaacttaaacacaatcaaaatgaagttagcaaatatacttaatcaatctttagtttttttctgaatccaatccgcacattttgttttacacgcacttacatgttcttttcgaaattagaaaataatgaattgtccctcatttcattggagtagagattttaattccatgtgattatgtatatgtcaaagacaaaatttccagaatgaacaaaaacagatccttactaatttatttttcttacattttacatttttctgcgcgcatttcgatcatccgaatcaatttttgttttgttagaaaacaatcaatcaattcatcgccgccagccaaggggtaagtaaatcgaatcatactaccaatctatatctaaaacgagatcagtaaaaaactcaactaacccaaccacacataaaagtgtctgctctctaagactctactaagatctccgaatacttgagcaatttactctatatctatatacatatatatttgtgaacctcatctaaactgcattgtgacgcctattttccatttcactccattctccatttctgttgcccctccatgctccatgcgctgtatcaaatatgtataactcgtatatatagcacgatgctcagtcgaaaatcggattgtggcctgcctgagatccgtattaaagcgccatctatcgagcgcggtgcacactattaccataatcaccacagcggcggtggctcaggatccttgagcaaacactggtcctacgagcaggtggacaggtactggtcccgcccactaactatgcgtatagcccacttaccccctagcctattgatgtgcctattcatgtgttggtgcctttcggtttgtgctcgtaacgctctataactctttcttcacaggcgggtcgattttacgagaacttaagcccagggtttacaagcttataaaccttttaataaaatgtaaccagttattaaacatttttgattaaagctattaaaaagtaatgttcaaaagatataagaattagaatctgctcaaactgcgataaaatataaatttaaatatacatatatgcaacattttcaaaattgaaaactaaatgataataaaaggtaaaactacaaatgaagtccaacattccagtgcagtataaatcgacccacccaactctatatcttcatatctatcttttaagctcatgcccatcctcatgatcatgatcatcgcccagacccatgactactttaaaatctatcacgactctgtctcttccctctgtatcttttggtaactgtaactgcatctatttctgtatttgtatcccatatctctgcctctccactaagttgtattcgctgctatgatttaaatctatctctatgcgttctttgctagtatgtaccgtatgtctggcttcgatttatcctagtttaatactaatttttgtgttccacccgagttccacacgatgcactcgcatgtagactgtggagcatgcagcgcacacatttcaaaatgaaaaacggcacccagcatgtgaagttgatagattccacgaatgtgcatagggattaacatccattatctaatattgttccgtcgatcttccagcgcgggtgaattcaatctggaggaggagaacttcgcccagagagatcatcacatcattgtcgaggtgttgatctcctcgtggtatgccctgttggccaacacggatctcatctgctacattgtggttttcatcaatcaggtaagatattgaattgatatgcccttgcgaatttatttgatttcacttccaattctaggtggtcaatgccagtctcatttcgctgccgctgcccattatggtctttttgtggggcacattgtctctgccgcgtcccactaaaaccttctgggtcacgctgattgcctacacccaggccatcgtgctgatcaagtgcatcttccagtttaagctgatctggtccaattaccaccaactgcccaatcagccgctaacaccggccaaaatattcggcgttgagaataaggcccattatgcgatttacgacctgatactattgctggttctattcctgcatcgctatttgcttaaatcacaaggcctgtggaaatcgggctacaaggacacggataaccagttcaccaagcccaccgctagcatgtaagttacagaatatcttttaaaaagatgactacattatgtaacctttgctattattttagtgatgaacgcgacgatagcgacaacttatcccaaccggattcccgccagctaaacgatgatgctgctcagaagctgagtctccaagtgagccaggcttccttgccaggatcgcccgagtttagcaagacaggcatcaatcagctagagtaagtgaaagaaggactgggcattaacaaattccttattaaaaataatcgtttttattttaggcgcaccaagtacacttcatcgctgtacaaattcttcttcagtttggtccacaaatcccgtctagccacagatgtttacgctctgatgttcctctgcgattttgtgaacttcttcgtgcttcttttcggcttcactgcttttggagtaagttcaatttaaataattaataaattttaagggattaaattcattcatatattctctgcctttagactcagcaaacggaaagtgatgaaggtgtgcagacatatcttgcggagaacaaagtgcccataccattcctgattatgctacttgttcagttcctgctcattgtcattgatcgagctttgtatctgcgcaaagccctggtgaacaagatcatcttccacttcttttcggttatcggaatacacatctggatgttcttcgttgtgcctgcagttacggagcgcactttcaactccctcgcacctccaataatattctacgttatcaagtgcttttacatgctgctcagctcttatcaaatcaaatccggttaccctaagcgcattctaggcaacttcttcaccaagggtttctcgatggtcaatatgattgcctttaaggtgtacatgcagattccattcctgtacgagctgcgaaccatattagattgggtgtgcattgacagcaccatgaccattttcgattggctaaagatggaggacattttctcgaatatatatcttatccgctgcacccggcagtcagagactgattttccggccatgagagctcagaagaaggcctcactttcaaagctgataatgggtggcaccatcgtcctgctgatagtgatttgcatttggggaccattgtgtttgtttgcacttggcaacgcggtgggcacctcgaatgtgccgttccatgtgtcgctatcaatacgaattggaccctatgatcccatctacacaacgaacaactacgacagtatcttcgagatcaatcctgagatgtactctcagatgactaatgcatacataaaggagaaacaggctttgacgtttattgccggctatgatgcaacggatgtagcggcggttagactagctggcaactcgccatctctgtggaacatagcaccgccggataggcagcgactactaaatgatttaagaaacagtaagatatattttcatattattgatcagctaatatttaagtatctttaataaacttttatcttatattatagatcacacgctgaaggcccggttctcttattccctcacccgaaaggctcctgccaaggggctaaaggaaaatgtgggcgacgagcatgccatatcgctggacgagtcctttgagggacgagcagcactcattcacatgctaagcgaaacccatgatgtggagcccatttacagcaatggcaccacaaatggaaccactcccgaagttgaagaagtggtggtgatacccggaatgatacccaagtttatcaaggttctcaattcgggcgacgctgcggtggtaagtgttttgagcccaaaacactacgactaccgaccgttggttatcaaaatgcatcgggacaacgagaccaatgggttgtggtgggagattcgggactattgcaacgacaccttctacaacgaaactctatcgaagtttgcatacagcaactgcacttcgggaattgtgatgtacacgttcaacgataaaaagtttccatccacgttcagtttcctcacagcgggagggtaagtgggcaaatgaatcctcaagaatacatgtacaaattgttccatttactcctgtagcatcattggtctgtacactacctttgtgttattggcctcgcgctttatgaagtccttcattggcgggcaaaacagaaagatcatgtttgaggatctgccctatgttgatagagtgctgcagctctgtctggacatttatctggtaaatcaaaccatatttgtttttagccctcgatgacctctttgcgttttccaggtacgggaggcattggaattcgctttggaagaggacctgtttgccaaattactcttcctataccgatcgcccgaaacgctaatcaagtggacgcgtcccaaggaggagtacgtggacgatgatggcgacaccgactcgattcccagtcgaatgagcgtgcgccggccggagcaactgcagccacagcaaccgcaataacataggcctaatccaatcgcttaactaaagtagagtttgtttacgtatttattacgtattgcgttatcgtaggtttcatagtcttttttaaacgtttttataaggagaaagagaacacaaatcgaaacacaaaagtacgcatcacccatttatacagtcgttcgattttttgtcaaaagtactgcccatgtgtaaaactgtgtatttagtaactaagcgaaaagtgttgatgtttgttaaatcaaacaattgcaaataatagtaaattataattgcctaatcaaggaaataatttatttaagttacttctaaataagtgtaaaaattgaagattaagtgcgaaaatactaataataatgatgaaaactcatattcagggaatttagcattttacagaaaccgtaaatataataactaacctaaagcatccgagttattaagtaaaaatagcgattaaataataaatgttttatatttatacaaaaaaaaacaatatcatgtaaaattagccattgcttcgattcgcatacatttctatgctgtttgcctaattgtgccctttacaactgattaaatatattacgtaaatgttatactgtttactactatataactaaatcgatacatattgcatatatagagcgttgactttagttttaggcatatcacttgacatatttttgtattgaatgcaaatattatttgcttaaataactcctttctaggcaaattcatatcaaaatgaaaaaattaaatgatatatagtgcgttggcttcgaatggaaatttctcccttttgcaatctcttaaaattagtaaacgccaactagctcggtatgttttttttttatataccaaaacgaaactaaaatgatgaatgtaaaaaaaaatgaatttttatactaagaatcgaacaacttaaaacgtaaatgtaatatgtatgcatctatttttttagcgattcatttccaaaattagcttattaactgcgtggaatact

SEQ ID NO: 18431 - DNA, 8316 bp, DROSOPHILA
atgctactgcgttggagtcggagtctgagtccggatacgcatctggaggagaacggcgccggaggcatccatcaaaatggtcttcagctatgcgtgcatggtgctccagcgcatcgtggtgccagcggttctgctgccctgatgcgaccagtgggcatatcctttgtctaccttttgatgttctttgtgtcgccctttgttccgctggccacgcgacgcaacttcaaaggatctgtgactgccttcttcatcatcctgctgacgttgagcacgctggtcctcttgggtcacataacgctacagattctggcggtcagcctcacgctgcccatctacaattgctcgttcagtgagcgtctgctgcgtcacattggcttcgtgagctttattgatctacagccatttgccatcatcgaatggctagtgcctgaggtgttggttttcgccacctccctgggttcgtatctcacggtgaagcgagtggcctcacagcccgtcggcgccgagcagctggagaacggcgaggtggtcgatggccaggcggaaaacgcgcagacatcttctcagccatctgccgcagatgccaatggaggagatgtgcaacaggccacggtcaccacgccgctgcagcaacagcagcagcagctgaggaaacgagtgtccatgatcagccagcacatacactttgagggcttggtcaagatctctcctctgttctgcctggccacgctgttctttgcggccgtactgcgtccctcggtgcctggcggattttactttctcattttcctgctgtccggcacctactgggcaacatgccagacgctgcaacggggcttcgctttgttgctgcgctgcgtgatggtcgtcctcgtgctgcactccctgtccattgtgtcataccagacgccatggatgcagagccacctcaatcataccaccctgacagctcgattgattggactggaaccgcttattgaatcctactgctcgccggatatacgagtctttctgtacaataataagctatccctggactcgtacctcaatccctttgcgttgttctttgcctatttcgcactggcactgaccaccaagcatctgattaagccacggctggagcccaagcccgccaccgcacttgggcagcaactagattgcaatagcagcagcatcaacaacaccaccggcaacaaggtcaaccgccagctatcgctgctcacctcgcagacatcgcggggtcgtcgggatgggtcgaatcctggcggaggtggaacgaccattaccaccaccacgaccaccacctccaccactgcaatccgcaatcagcgcttgagtttggtgcggcaaagcacgcgaaaggcacgtacaccccaaccgctggaaagtggatcctcggtggcgccaagtgtcactcagcggggcaacgacatgcagctggaatcgatggagcagcgatcggaacaggagaacaccaccacatccatactggatcaaatatcgtatggattcgtcagcgtgggaggattcatatatcagaatagctatatattcaccaatattcttatgatggcctggtccatagtgtatcacagttggctgacttttgtcctcttgctgtcggccaacgtactgtggatgattcccaaccagaggaaggccatgatgcggtccagtccctttatagttctgtatgctgaggcccttttgattgcccaatacatatacggcatggatctcaacaacgaagagctgcccacgagcgttcccactgcgggcattaacctgcaacaaattggcttcgaacgacccatcgagaaccaaatgcggccatgtgtgccgctgatcgtgaagacagcgtttgtgctaatgttttgggtgacatcacgacagttcttcaaggagaagcgcgatcgccgacgggacagcactctggcggacttcattgccccactgcagattactgtgggatcggctggctccagctacctcatcaacgatggcaagaagacctcaaagttcctaaagaaggccggcgatgtgatcaaaaatctattggtgcgtctgtggatctggctactcgtgctggttatcttcctttgcgccatcactggcgagaacatgaccggcttccgcatctgctacatggccctgtttctattcttcttgctagtctttcaatcttcgtccaaggcgtgggttaagatcatgtacggcttctggctgtttctgatcttctatgccatgcaaaaggacatcggccttaagcgctatcagaccaaggatctgttcctccatttggtctcaccgacgataattgtgatcctgaccgtcatacaagtgcactacttccacaagcgctttattgcatcattgcagcagcagccgttggctggcggatcggcacagcagaaacccacggagacaactgccttggaaccggcgccatcgaagcgacgtggcagcgccggttcactgcgtaaatctcagggtccatcggcggaggctgctccaggagccaccaccgatttcgagacatctgtgcgagacttggtgcgcatatcgttccgcaagatcaagaacaagtcggagtacatcttcaagaacttcaaggatgtcttctggcgcttcctggagctgcacatcatgaaggctgtgtatatcgcagccttcgtgtgcagtgtcagcgaagtctgcgtactgcacattatctttgtgggtttctgtgtgctgggcgccacctcgcggaaggccgttcaggtggtgatcagccgcctcatctcgttcattgtcaccgtcatagttctgtccaagatgatctaccagatcgagtacttgagtcactcgcagcacaatgtggtttgttctgacaaccggactgccaacaatgcggagtggattggtctcaccaaggctgacaaggtaactggcggactgatgagcctgttgcgcacctacatcatctacatggttattgtgaccatgcacgcagtgatcagtttgcggcagcttcaaatgcgcgtcaagatcggagcactgaatgctccacccaccaagctgctgttccccaatattattcgagctgatgctgagaaggatctggtgggactggtcaagtatctcctcaactttggcttctacaaattcggcattgagatatcgctaatcgcgctggtctctaccatcacatatcgccaggatattgttgccgtagtctatgctctgtggctagtggtgcttttgcttctacggagatcgcagtgcgccaaaatatggggcgtgtttcaggcattctttgccatctccatactgacacagtatatagtgctggtaggattgccgccgagctcatgcctggtgtttccctgggatgaaggtcccttcggcgagggcatacaacgctgggcgatgctgccaggagccctgcacttcaaccacgtacccaagctgatcttcgactttattgtcttggtcattctgaatcgacagaagagtatcttctgcatcgaacagcgttatgccagtaacgatgactacccgggtggcagcaatcgcagtgtgatcgcggatattgctcagctaggtcgcgttcccttcgacaatcccacccacgacttttgttcgtacatacgcaactactcggacatccttaagaacggagtgctgtgcggcttctactggtttactctggcagttgttttcttggccggcaccaatattgctgatctgctggcactgggttatctgatcggagcgtttatcttcctgtggcagggatcggatttctatctgcgtcccatacacaccatcatctttcgctggaagtggctgctggcattcaatgtggccaacatacttatcaagacgtccttccaaatggccggctgtttgttcatgacccaactgacgaaagactgctgctggctggtgcacatgctcggcatcacatgtacgagcaatgtacttacagagcaaataatgctgcccgaggaggctgaattggcgcttaagccaggcgaatgtcctaagatcacccaccaggtggtccttctgtgggacacgatttgctttgccttcatcatcttccagctgcgcatcttcaagtcgcactacttctgtcacatcataacggacaccaaagcaaataacatcctggcctcaagaggagccgacatcattgagagcctacgacataagcagattgcacatcgacacgaccatgaaaagcaggtgctgcataagatcaagcgaaagatggagcgcatccgtgccacgcagcagaagatgctacgacccttggacaaacaaacccacttcgacgaacatggttatccacttcctgcaccaacagtacgcagaaggaaggaaattaaattacatccacatgctacccgtgctggtgactactatatgttcgaggagatggacgataagtttgagctcgacttgatacacgacgagatcgacttcctcgaggaggagaacatcaccgagagcgagatgaagatgcagcgacgcaagaccctctacgatgtgtggaaggatctgaatgatgccgagtatcgtcgccacttctatatgcgtgagcgttcctacgcctcagagcccggctcacgcattctcctgaagttggacgacgagaaggagaagattgggcccgatctcggcctggccagcgaccacgatgaggacgacgataccattgagtgcgaccttggcatgcgcacctcgacgctgtccgaaccgctcgactttggtcgtcgcagccagacgctgctcgaggttctattaccagccagtggtctaactcgctatatttatttgaacccacagaagtcgaaggatgcacccacaggcgagtttccctccaccagtaagggtatttcgaaggagcgcgatgcggcaacggcttccagttcggctagtccagcgcccactagggatgtgggtgatctgcctgtgattccaccaccctccactggcctgggacgtgagcaaacctccaaggagacctccgatagcaagtccaaaatggaagtggacagcggagaggtgacggccaaggattcggatgaggacttcgataccaatcccattatcagactgctcgagggcttcttggtcacgctgaccataagactgaaccgcttttcgcgcaactatcgctttgtgaatcgcatcctggccggcgaaaagaagaccctaaaggagtccagttcgttgaaccgtctggggctgtccagtgccgctgccatgttccacttcctcaaatcgaatttagagagcgatgaaagtgaaccgcccgcctcctcatccaccccgcggcgggtggtgatcgcaccaccgaatgccaccgagcactcagaccccaccagcaccacactgaacacgaacacgacaaccacaccgctatcaccaccagaaccactgcaaccactgcaaccactgcaaccaaatacaaccagtacaccacagcaacagcatcagcatattcgcgctgccgaagaaatcatcgaactgcctgtagataccgtggatggagtcgcccatagaaaacaatcaatcaattcatcgccgccagccaagggcacgatgctcagtcgaaaatcggattgtggcctgcctgagatccgtattaaagcgccatctatcgagcgcggtgcacactattaccataatcaccacagcggcggtggctcaggatccttgagcaaacactggtcctacgagcaggtggacagcgcgggtgaattcaatctggaggaggagaacttcgcccagagagatcatcacatcattgtcgaggtgttgatctcctcgtggtatgccctgttggccaacacggatctcatctgctacattgtggttttcatcaatcaggtggtcaatgccagtctcatttcgctgccgctgcccattatggtctttttgtggggcacattgtctctgccgcgtcccactaaaaccttctgggtcacgctgattgcctacacccaggccatcgtgctgatcaagtgcatcttccagtttaagctgatctggtccaattaccaccaactgcccaatcagccgctaacaccggccaaaatattcggcgttgagaataaggcccattatgcgatttacgacctgatactattgctggttctattcctgcatcgctatttgcttaaatcacaaggcctgtggaaatcgggctacaaggacacggataaccagttcaccaagcccaccgctagcattgatgaacgcgacgatagcgacaacttatcccaaccggattcccgccagctaaacgatgatgctgctcagaagctgagtctccaagtgagccaggcttccttgccaggatcgcccgagtttagcaagacaggcatcaatcagctagagcgcaccaagtacacttcatcgctgtacaaattcttcttcagtttggtccacaaatcccgtctagccacagatgtttacgctctgatgttcctctgcgattttgtgaacttcttcgtgcttcttttcggcttcactgcttttggaactcagcaaacggaaagtgatgaaggtgtgcagacatatcttgcggagaacaaagtgcccataccattcctgattatgctacttgttcagttcctgctcattgtcattgatcgagctttgtatctgcgcaaagccctggtgaacaagatcatcttccacttcttttcggttatcggaatacacatctggatgttcttcgttgtgcctgcagttacggagcgcactttcaactccctcgcacctccaataatattctacgttatcaagtgcttttacatgctgctcagctcttatcaaatcaaatccggttaccctaagcgcattctaggcaacttcttcaccaagggtttctcgatggtcaatatgattgcctttaaggtgtacatgcagattccattcctgtacgagctgcgaaccatattagattgggtgtgcattgacagcaccatgaccattttcgattggctaaagatggaggacattttctcgaatatatatcttatccgctgcacccggcagtcagagactgattttccggccatgagagctcagaagaaggcctcactttcaaagctgataatgggtggcaccatcgtcctgctgatagtgatttgcatttggggaccattgtgtttgtttgcacttggcaacgcggtgggcacctcgaatgtgccgttccatgtgtcgctatcaatacgaattggaccctatgatcccatctacacaacgaacaactacgacagtatcttcgagatcaatcctgagatgtactctcagatgactaatgcatacataaaggagaaacaggctttgacgtttattgccggctatgatgcaacggatgtagcggcggttagactagctggcaactcgccatctctgtggaacatagcaccgccggataggcagcgactactaaatgatttaagaaacaatcacacgctgaaggcccggttctcttattccctcacccgaaaggctcctgccaaggggctaaaggaaaatgtgggcgacgagcatgccatatcgctggacgagtcctttgagggacgagcagcactcattcacatgctaagcgaaacccatgatgtggagcccatttacagcaatggcaccacaaatggaaccactcccgaagttgaagaagtggtggtgatacccggaatgatacccaagtttatcaaggttctcaattcgggcgacgctgcggtggtaagtgttttgagcccaaaacactacgactaccgaccgttggttatcaaaatgcatcgggacaacgagaccaatgggttgtggtgggagattcgggactattgcaacgacaccttctacaacgaaactctatcgaagtttgcatacagcaactgcacttcgggaattgtgatgtacacgttcaacgataaaaagtttccatccacgttcagtttcctcacagcgggaggcatcattggtctgtacactacctttgtgttattggcctcgcgctttatgaagtccttcattggcgggcaaaacagaaagatcatgtttgaggatctgccctatgttgatagagtgctgcagctctgtctggacatttatctggtacgggaggcattggaattcgctttggaagaggacctgtttgccaaattactcttcctataccgatcgcccgaaacgctaatcaagtggacgcgtcccaaggaggagtacgtggacgatgatggcgacaccgactcgattcccagtcgaatgagcgtgcgccggccggagcaactgcagccacagcaaccgcaataa

SEQ ID NO: 18432 - protein, 2771 aa, DROSOPHILA
MLLRWSRSLSPDTHLEENGAGGIHQNGLQLCVHGAPAHRGASGSAALMRPVGISFVYLLMFFVSPFVPLATRRNFKGSVTAFFIILLTLSTLVLLGHITLQILAVSLTLPIYNCSFSERLLRHIGFVSFIDLQPFAIIEWLVPEVLVFATSLGSYLTVKRVASQPVGAEQLENGEVVDGQAENAQTSSQPSAADANGGDVQQATVTTPLQQQQQQLRKRVSMISQHIHFEGLVKISPLFCLATLFFAAVLRPSVPGGFYFLIFLLSGTYWATCQTLQRGFALLLRCVMVVLVLHSLSIVSYQTPWMQSHLNHTTLTARLIGLEPLIESYCSPDIRVFLYNNKLSLDSYLNPFALFFAYFALALTTKHLIKPRLEPKPATALGQQLDCNSSSINNTTGNKVNRQLSLLTSQTSRGRRDGSNPGGGGTTITTTTTTTSTTAIRNQRLSLVRQSTRKARTPQPLESGSSVAPSVTQRGNDMQLESMEQRSEQENTTTSILDQISYGFVSVGGFIYQNSYIFTNILMMAWSIVYHSWLTFVLLLSANVLWMIPNQRKAMMRSSPFIVLYAEALLIAQYIYGMDLNNEELPTSVPTAGINLQQIGFERPIENQMRPCVPLIVKTAFVLMFWVTSRQFFKEKRDRRRDSTLADFIAPLQITVGSAGSSYLINDGKKTSKFLKKAGDVIKNLLVRLWIWLLVLVIFLCAITGENMTGFRICYMALFLFFLLVFQSSSKAWVKIMYGFWLFLIFYAMQKDIGLKRYQTKDLFLHLVSPTIIVILTVIQVHYFHKRFIASLQQQPLAGGSAQQKPTETTALEPAPSKRRGSAGSLRKSQGPSAEAAPGATTDFETSVRDLVRISFRKIKNKSEYIFKNFKDVFWRFLELHIMKAVYIAAFVCSVSEVCVLHIIFVGFCVLGATSRKAVQVVISRLISFIVTVIVLSKMIYQIEYLSHSQHNVVCSDNRTANNAEWIGLTKADKVTGGLMSLLRTYIIYMVIVTMHAVISLRQLQMRVKIGALNAPPTKLLFPNIIRADAEKDLVGLVKYLLNFGFYKFGIEISLIALVSTITYRQDIVAVVYALWLVVLLLLRRSQCAKIWGVFQAFFAISILTQYIVLVGLPPSSCLVFPWDEGPFGEGIQRWAMLPGALHFNHVPKLIFDFIVLVILNRQKSIFCIEQRYASNDDYPGGSNRSVIADIAQLGRVPFDNPTHDFCSYIRNYSDILKNGVLCGFYWFTLAVVFLAGTNIADLLALGYLIGAFIFLWQGSDFYLRPIHTIIFRWKWLLAFNVANILIKTSFQMAGCLFMTQLTKDCCWLVHMLGITCTSNVLTEQIMLPEEAELALKPGECPKITHQVVLLWDTICFAFIIFQLRIFKSHYFCHIITDTKANNILASRGADIIESLRHKQIAHRHDHEKQVLHKIKRKMERIRATQQKMLRPLDKQTHFDEHGYPLPAPTVRRRKEIKLHPHATRAGDYYMFEEMDDKFELDLIHDEIDFLEEENITESEMKMQRRKTLYDVWKDLNDAEYRRHFYMRERSYASEPGSRILLKLDDEKEKIGPDLGLASDHDEDDDTIECDLGMRTSTLSEPLDFGRRSQTLLEVLLPASGLTRYIYLNPQKSKDAPTGEFPSTSKGISKERDAATASSSASPAPTRDVGDLPVIPPPSTGLGREQTSKETSDSKSKMEVDSGEVTAKDSDEDFDTNPIIRLLEGFLVTLTIRLNRFSRNYRFVNRILAGEKKTLKESSSLNRLGLSSAAAMFHFLKSNLESDESEPPASSSTPRRVVIAPPNATEHSDPTSTTLNTNTTTTPLSPPEPLQPLQPLQPNTTSTPQQQHQHIRAAEEIIELPVDTVDGVAHRKQSINSSPPAKGTMLSRKSDCGLPEIRIKAPSIERGAHYYHNHHSGGGSGSLSKHWSYEQVDSAGEFNLEEENFAQRDHHIIVEVLISSWYALLANTDLICYIVVFINQVVNASLISLPLPIMVFLWGTLSLPRPTKTFWVTLIAYTQAIVLIKCIFQFKLIWSNYHQLPNQPLTPAKIFGVENKAHYAIYDLILLLVLFLHRYLLKSQGLWKSGYKDTDNQFTKPTASIDERDDSDNLSQPDSRQLNDDAAQKLSLQVSQASLPGSPEFSKTGINQLERTKYTSSLYKFFFSLVHKSRLATDVYALMFLCDFVNFFVLLFGFTAFGTQQTESDEGVQTYLAENKVPIPFLIMLLVQFLLIVIDRALYLRKALVNKIIFHFFSVIGIHIWMFFVVPAVTERTFNSLAPPIIFYVIKCFYMLLSSYQIKSGYPKRILGNFFTKGFSMVNMIAFKVYMQIPFLYELRTILDWVCIDSTMTIFDWLKMEDIFSNIYLIRCTRQSETDFPAMRAQKKASLSKLIMGGTIVLLIVICIWGPLCLFALGNAVGTSNVPFHVSLSIRIGPYDPIYTTNNYDSIFEINPEMYSQMTNAYIKEKQALTFIAGYDATDVAAVRLAGNSPSLWNIAPPDRQRLLNDLRNNHTLKARFSYSLTRKAPAKGLKENVGDEHAISLDESFEGRAALIHMLSETHDVEPIYSNGTTNGTTPEVEEVVVIPGMIPKFIKVLNSGDAAVVSVLSPKHYDYRPLVIKMHRDNETNGLWWEIRDYCNDTFYNETLSKFAYSNCTSGIVMYTFNDKKFPSTFSFLTAGGIIGLYTTFVLLASRFMKSFIGGQNRKIMFEDLPYVDRVLQLCLDIYLVREALEFALEEDLFAKLLFLYRSPETLIKWTRPKEEYVDDDGDTDSIPSRMSVRRPEQLQPQQPQ

SEQ ID NO: 18433 - DNA, 4172 bp, DROSOPHILA
tcctcgaaggcggattgcaggttcaccacggtgttgagctgaaaacatagcgattaagcacacgcatcggttttccaccaggtgctacttacaatgcgggaattgatgacgttggcaagatctggcgccttgtagacggtgccaccaatgatgtagtaatcggcaatcggcgtggcttccgagggattatgacggtgctgcttgcggattacatacaggatgggctccgccacgtgcagcagtatgtattccagaccgatcatgttgctaaatgatggaggcgattaaactgaatcagaataaaaggcagaggacacctactgcagatgctcgggaccaaggcgctgcatccgaacagtctcgttgttgcacatgtgatcatagaagggattcgacttgcggcagaagtagtccatgacggtctgcgggctgagggtggccatcatctgggtgtcgtgccaggaaaggcgcaggtggtcattggtcatctgtcggctggccattgtggatgtggatgcacgtgcgccttgttgggatgtggcggtgggaagcggctgcaatgttttctcgcttggcaatgaccacgactaatttgtgggtcaatggcgttgagagagcttctttttccttttcctattcctagcgatcgctttgtttacaagctattttcggccgcacgctgtcgattggaaactgtcgctggcagttttttgatttatttgttgtgtaataattaatttagcaggccgtggtgcacgctgctctcgctgctccaccttcacgttaatactgtaagtgttttgctgattaactgtcctttgtagcgagcttttattgtgttttctactcgtgatttgccttgcgctcgctaaaaaaccgatttgtttgttattttcgcttggtcgactgaccgcagttcgcaacactgcacccagtcggctggcccgtgttggacagtgtacgttcttcgcgaggtggcagcgctttgtttggtgcagagaagaagaagcagcaggggagcgtctgcgaaaaagtttaaaaataaacaaattccgttttaaatcaaactgatattcaattttccgggcgcgcagtaaaatcgtagcagtccacacacatacaccaaagagagtccgtttctgaggcgaaatttgtgctctcacacggaacttggcccatttcttcgggacgcaatatcataattgggaatcatatcagttcgttctgttcacttcgtcgtggcgcacgggaatcagacgcccagcagcgcagagctctcgtaatggtaaccacccagtagttatctcaccgcaacaactagcaaatcaatagcaactccagaatgtacattgattcacccgcacagcgccaccacccactcatccgtgtacatatatactcttgagcattgcatatacatatgtaagcgccagtcaaggtcgtacgattcttggccaggcgcaaatacatgtatgtgtgtacgaaaatgttctttttttacgcctcaccttgattttcaactatgcgatcgtgcgtgtgtctgtgctgtttccatggctgccaactttgtttattccacctgagatgtgtatattgcaaagtcccgtgtaaataaccggctaagtgttttgtgtgccaggatcagtgttgggaaggctacgagcgttgtgtacctagcttaggtacaacgtagtttcgaaaatatagtacaaaattccagtaagacaatattttaaattaaaccgactttttgtgtgcatcatgtaaatataaaaagtacttattgtttagttaaatggataggccaatagaagttaggttgaagtattgccccaacactggtcagaatgaactgcgttccgaaacgactcaattctgttctcttctagattgtcgcacactttataggcggatcccttccagatctgaggcacagtctgtttcagcaatatgcgatacataaagtcggagccgtactatgaagtaatcgagcagcaaaatcaatctcttacagcatctaacacaaaaacaccaaaatcaaacaaactaaccgtctataatttacaggggcttcctccattcaatgtcagcggcagcccgttcaatgtggttcccattcacaactacccggagcttatgaaagacacttgcgccctaatcaacgcagagtggccacgatcggaaacggcgcgcatgcgctccctggaggcctcctgtgacagcctaccctgcagcctggtgctgaccaccgagggaatgtgccgcgtgatcgctcacctcaagctcagcccgatcaattccaagaagaaggcctgcttcgtcgagtccgtggtggtggacaagcggcaccgtggccagggattcggcaagctgatcatgaagttcgccgaggactattgccgcgtcgtgctggacctcaagaccatatatctgtccaccatcgaccaggatggattctacgaacgcattggctacgagtactgcgctcccattacaatgtatgggccgcgccactgtgagctgcccagcttgcaaaatgccaaaaagaaatacatgaagaaggtcttatagacgtcaacgccagtagtagtgggcttggctaaattgggccatacccagcccgatcagagagtggcagtgaactagtcaaattggcaaatgcttgaaattctttacgggttttacctgccagcagctgcttcgagccataacctgtggatgccaggcagtctgccaagtgcatgtgtgattgcctcgttgctctggcaatttgcaaagcaaagctaaagcttttgattccattacaccgataagcaaccattcattcaccaagcgcttgtgttgatttttaaatattactttccgcatgtattttttaaactttttggttctttttgtatgacaaaagtgatccgggctgttcggtacatctataaggctaatgttaacctaatcctaactgtttagcaattatgatttgttatagttttgctcaagtgtgtgcataattgctcctagacaaaaatctacctgcaatctacctgcaatggtgatgattatgataataagaagctcaagtatcttccaacgaaacatagcaaatagacatatcgagccttagcattaagcactcaacgaagggcaataacttcaaataaaacgtgtagaaactaaagattccatcgcttgttcctgggcggaagtggcgacgacggaaacgcctgtcttgcagcatgagcgatgcagtgcatccatgtggccgcacatgacaagttcaagttcacggcggacgacgtctataaattgatgttattttttttgcgcagccaaatttgacgggggctcggtgcccaaatggttggttaatgcccgcccagcaaacgtaatgctttgttacagaaataacccgcagtgatgtaaggcacacagagatctctctcggctgccaaaaatcgctctctcaatgggaatgggactatgacttgggtgtgacgatcgcctctccgacagcggaagctgttgatcgctgttggtttgcccgggggcacggtgatctcttatggttacacattttttaaatacctgcccggcgtttggtgcgacaggtgctaatgtggcgacattccgattggtcgcgccaatgcgattccgcacgtaatggctattaaattcggatcttctaaaatggaaagtttattgtgcgctcacagtacgtagatacggatgcgggtgtgcaaacatttggcgaactatagaggactacaataggaatatcaaattaaatttgtacgtcttcaatgatcagctgcaattggtcacaatcccattgggtgatagatagttctaggcacttttggggcttttgccaatgccgcaaaccttgcggtagtgctccggttgctccaggctgtcgataatgaactttcccaagtcgtatttggataccagacgaccgggggcctcgtcgtgcaagacggtataggcggtggccggctcatcggctatgtgcggcggcagaatggcgatccagtctagatcgcaggccttggtcaggtccagcatgcgctggtgctcctcgtttaggcggtggaacacagtgggcacttcgttgagcgggcgcaggagaaacgaggacatgacaatagagaatttggtcagtttggcctctttca

SEQ ID NO: 18434 - DNA, 1390 bp, DROSOPHILA
aagaagaagcagcaggggagcgtctgcgaaaaagtttaaaaataaacaaattccgttttaaatcaaactgatattcaattttccgggcgcgcagtaaaatcgtagcagtccacacacatacaccaaagagagtccgtttctgaggcgaaatttgtgctctcacacggaacttggcccatttcttcgggacgcaatatcataattgggaatcatatcagttcgttctgttcacttcgtcgtggcgcacgggaatcagacgcccagcagcgcagagctctcgtaatggggcttcctccattcaatgtcagcggcagcccgttcaatgtggttcccattcacaactacccggagcttatgaaagacacttgcgccctaatcaacgcagagtggccacgatcggaaacggcgcgcatgcgctccctggaggcctcctgtgacagcctaccctgcagcctggtgctgaccaccgagggaatgtgccgcgtgatcgctcacctcaagctcagcccgatcaattccaagaagaaggcctgcttcgtcgagtccgtggtggtggacaagcggcaccgtggccagggattcggcaagctgatcatgaagttcgccgaggactattgccgcgtcgtgctggacctcaagaccatatatctgtccaccatcgaccaggatggattctacgaacgcattggctacgagtactgcgctcccattacaatgtatgggccgcgccactgtgagctgcccagcttgcaaaatgccaaaaagaaatacatgaagaaggtcttatagacgtcaacgccagtagtagtgggcttggctaaattgggccatacccagcccgatcagagagtggcagtgaactagtcaaattggcaaatgcttgaaattctttacgggttttacctgccagcagctgcttcgagccataacctgtggatgccaggcagtctgccaagtgcatgtgtgattgcctcgttgctctggcaatttgcaaagcaaagctaaagcttttgattccattacaccgataagcaaccattcattcaccaagcgcttgtgttgatttttaaatattactttccgcatgtattttttaaactttttggttctttttgtatgacaaaagtgatccgggctgttcggtacatctataaggctaatgttaacctaatcctaactgtttagcaattatgatttgttatagttttgctcaagtgtgtgcataattgctcctagacaaaaatctacctgcaatctacctgcaatggtgatgattatgataataagaagctcaagtatcttccaacgaaacatagcaaatagacatatcgagccttagcattaagcactcaacgaagggcaataacttcaaataaaacgtgtagaaact

SEQ ID NO: 18435 - protein, 168 aa, DROSOPHILA
MGLPPFNVSGSPFNVVPIHNYPELMKDTCALINAEWPRSETARMRSLEASCDSLPCSLVLTTEGMCRVIAHLKLSPINSKKKACFVESVVVDKRHRGQGFGKLIMKFAEDYCRVVLDLKTIYLSTIDQDGFYERIGYEYCAPITMYGPRHCELPSLQNAKKKYMKKVL

SEQ ID NO: 18436 - DNA, 5579 bp, DROSOPHILA
gaataccacgcggggcaataaactctgtaaaatctcaaactttagtaggttttccgattaagagagggtgaaaggctgaacctttgggatcatcgacatcctgccagatttcctgcatcaagcgacgataactcttggccagcccgccgggcttgcagcgacgtgcgctctgctctgctatgtactccacaaggtcgctgcagttgataaagtagtgtgtcatcggcggcaaattactcagtgcctgtagtgccgagttcatatagcaggtattcgcaatgttctgcaggcccacgagtcccgtgcccgagccctttgctgtgtctgtgccctcactgtcactggcgttcgagtcctcgcgccgtgcaagcgattttagcgatccgctgaagagtttgtcgtgacatcggctgctccttggatcacccatggcatacccgttcgccagctgaccgagaaaaaatcgaaagtcatgtaatcgagcattaaacaatgcctacaaatgcgacagttcgcctggagcggaattctcccccacaccttaccgtgtggccctggctgctgtgtatggtgcggttgcggtgctctacatatggattgtgcggatttgggttggaactcaaactcattatagttccctagctgccagtattttgttttttttttatattttaattgagaattttgattggaaacgaccgcagaaaaggcgtttgcgatttcggatggtgtttttggtattgtccgtcagtgtgaccgaagcaaaaaaccgggagtcaagcggatattattcgtctaatatttagatgatttagaacgcgtatgagtatcgacttagaataaattttaaaatttagaccaaaccaattaaaatttataagtataaataatttaaacatacatcataattttttccaatacgatacttctggttaagagcatcgctggcgtgccatccccactgtaagaccttcggccacacttatttgaaactcgggaaaaaaaaacgcagaaaatagtcgaaaatgtgtatacaaaaagtgtaactaagcgttttcatgagtgataagggccaagagtttactgctagacgttcgagcggccagtgacaggcctggtttagtcgtacccaaaccggaatgggtgatgcctcatagttttttctgcatctgctggcggagattcgactaccccctccgctgtacaaggtaaaacggccctgcctttccgcattcccttgtgtaacagccctgcttttgcgatgctcctgttgggaatcgaatgtaaaaaggactcattcaaatgaatcattaattgggagcaggcgatgagtgtgcaagtgcccctgtgggatgggctactgctcagcgtcattcaggccgctagctattacatcaataagttcatgaagcagtattttgccagcgaaacatcccgtgtacgaaataatagaactctataattatagttttagctaatcgcggatagttgtgcctggccaacacgcaggccgttggaagagtgccaaggagccatcatgacgctggagacgcagcccgttggcggggtgagcgacggcaagatcgctggtctttatgatctggaggagacactgggatccggacactttgccgtcgtgaagttggcccggcatgtgttcaccggtgccaaggtggcggtcaaggtagtggacaaaaccaagttggacgatgtgtccaaggcgcatctgttccaggaagtgcggtgagtagctataacaatcaatccacaatttttttttcaataatcccgctgcacttataaactccagatgcatgaaactggtgcagcacccaaatgttgtgcgactgtacgaggttattgatacccagaccaagctgtatttggttttggagcttggcgatggtggcgatctatacgattacataatgaagcacgactctgggctcagcgaggaactggcccgaaagtatttccgccaaatcctacgtgctatcacgtactgtcatcagcttcacgtggttcacaggtgagagcgcgctctaactgatagtacggcgtattgtgccgatcactgatttacgtaacattcaattctcctacaaagggatctaaagccggagaacgtggtgtttttcgaaaagctgggccttgtcaagctcaccgacttcgggtttagcaacaagttcttgccgggccaaaagctagaaaccttctgcggcagcttggcctactcggccccagagatcctgctgggcgactcctatgatgcgcctgcagttggtatgtagacaactaatatgtcccataaccctttgttaatcattttatctgatttgtttagacatttggtccctgggagtaattctgtatatgctggtctgcggtcaggcgcctttcgagaaggccaacgactcggaaactctgaccatgatcatggattgtaagtacacggtaccctcgcacgtgtccactgattgtcgggacctgattgcctcaatgctggtgcgggatccaaagaaacgggccactgtggaagagattgcttcatcggcttggctaaagcccatcgatgagcccgattcgacgacctccacctcagagcactttctgcctttggtcagtcgcgaacagctgggcgaagaggatcacgcctttatcatacaaaaaatgataaacggaaacattgcgtccaaggaagagatattgcagtgagtacaatagcacaaataataaatcaattttgtcttgctaacaccaagtgacgtcattacagagctcttgacaaaaataagtacaatcatataacagccacatattttttgttggcggaattacgtctgcgacggcgacgagaagagctggctcaaaaacagaggctgctcaacgatgccagcatgaagtgagtttaaaataacaaccaccttggattcttaatcttttatatgcatattcagagtgggagatgcgagtcgcaagctagtgcctgagaaaccaagtccaaccgaagcccaaaaaggaggagtacccatcagcattaacgtgactccagcagctcagtttgccaatgacggtggcaagccggtaagttaattagcaattagcaatcgattttaagtgcagtaaatctaataaatgcaagtgcttttatcaggacaagcgcagtcgcaagtgcagcattgtgcgtgaggaggacgaagaggagtctgccacagaatgcacggcggtaggcaatgagttgaaggtaacgtcgtcgtcgcggcgcgaggccttctcagattccccctttagtaggtcaatacatgagcgttccagctctgagcccggaaatcaaacgaaaggcgaacagatagctaatagcggagtgccaagccattcacgtacaaagattgtcgtctcggtggatgcaacgctggcccataagctcaagcagatggagaagagtgccaagatcgatgaggacacgctgagtggtctgaaggagctggagatcggcaagctcaagccgcttcctagcagcagcaagaatccggtgcttacccaccgtcgcacaaagctgaacaagattcggacgccttcatgcagcagctcggaggcctcagacgacgacaccaagacacgcaacaagaaaaagattaacaaatttgtcggtgacacgccagtgcggtttcgcatgcatcgtcgcgactcgcatgacgactccagcgactcgcaagatcagctatatccgccgcccggctcggccagcaatgcgggtaattttatctccaaaagcggctcagtaagcggcaaaaaagagggacaatcgcagtataaagaggtacgattattattgtataattatcagtgagacagctactaaacttatattctttgcttacagccaaataacaaatccgatgaaaatcgcaaatctcacagccaaaaaaatcggaaacagcacaacaaggatcatgttgataagcattcccacgctgagaggcagctggcggatagcagcacagctacaacaggaaattccacgaatagaaggcggcgcattcgcgagagccagtcgctggaccgcatcacagaggctcaggaatacgagatgcggcatcgatgctacgcggagagcgaggcagcatcctcgtcgtcctcgtccacccaacatatcgatcagagatattctttactcagcctaaacactagcacattctccgttgccgaaaccaaggaggagtacgacgaggaggcagacgccacaaatgccacggaccaaatcatgaatactttgaatgcagccaaagcaacgcttcaacaagagcaatattttaataacaataccaatcttagtaggaacttcaatcacaatcacaaccagagcatcatccacatcagtagccagaaagccaacggcaagaagtccaacgaaacaccaaaagatatttataatctgaactcaatcgagcatatcgacttgattttggaggataaaagccttaccaaagcaatacacgttaccggctctaaatgctttgtcaccatgaagaaaatccgacggctgggaaaatattttcccgtgatgaacttctcttaatagacacagttacttctttgcaaagtgcattctaaatattaaaaagaaactcggttaagcgaactacatagaaaatatgcatgtattaattaaaacgtataaacgtcaacgttatcccccgtatataggaaagagcgcgagaatatttaaatttagtggtagcgtaattgttttgtctgtcgtcgtcattacgcttaaattattctaaatatattaatttatgttaattataagtctaatcactcaatgcaatatttagtgaaaatacattaatgcccatatgacaattgactaaaaaggttatttgttttctttttaacaaattgtgacgaattaaaatggaatgaaactcgcaactcgcacaatctaaaattggcaattcaaatgtttgcgcccaactacagtgtgtacacaccacaaatgttgtagagtaggtaaaggaaataaagcaataaacatttaactacttaaagctcttaagatgtagttaagcaatgatggatgtcaccaagcaatttttttttattgtaagaaaaatatacaatatacaaaaatatattcttttattttacaaaatgatgcgtgtaaaatacattgtacctaatgcaggtaccccaaacgagtacaagccacccttttcaactctggtcacacagagcacatcccgtaaagtttttcagagatgagtttgcggcaggaaaattgaattattcacggaaataaacaaagtaaactaagtggaaactgtaatcctgaccagcaattatgttgcgcatctatcaaaatacttaccggtgagagaccacgcccgaaacgcgaaagccttacgtgcagattttctgcacgatttcgtcatcggcgaatctcatcattcaatgtgttttgcccacaggcgcaccgcgagaaaagctgttgtctactccaccaaggtcgcctgctgcaatcattccacgctctgtggcatcaccagccatccacgtcgggcgcaggatagcgggag

SEQ ID NO: 18437 - DNA, 2860 bp, DROSOPHILA
aaaaaaacgcagaaaatagtcgaaaatgtgtatacaaaaagtgtaactaagcgttttcatgagtgataagggccaagagtttactgctagacgttcgagcggccagtgacaggcctggtttagtcgtacccaaaccggaatgggtgatgcctcatagttttttctgcatctgctggcggagattcgactaccccctccgctgtacaagttttagctaatcgcggatagttgtgcctggccaacacgcaggccgttggaagagtgccaaggagccatcatgacgctggagacgcagcccgttggcggggtgagcgacggcaagatcgctggtctttatgatctggaggagacactgggatccggacactttgccgtcgtgaagttggcccggcatgtgttcaccggtgccaaggtggcggtcaaggtagtggacaaaaccaagttggacgatgtgtccaaggcgcatctgttccaggaagtgcgatgcatgaaactggtgcagcacccaaatgttgtgcgactgtacgaggttattgatacccagaccaagctgtatttggttttggagcttggcgatggtggcgatctatacgattacataatgaagcacgactctgggctcagcgaggaactggcccgaaagtatttccgccaaatcctacgtgctatcacgtactgtcatcagcttcacgtggttcacagggatctaaagccggagaacgtggtgtttttcgaaaagctgggccttgtcaagctcaccgacttcgggtttagcaacaagttcttgccgggccaaaagctagaaaccttctgcggcagcttggcctactcggccccagagatcctgctgggcgactcctatgatgcgcctgcagttgacatttggtccctgggagtaattctgtatatgctggtctgcggtcaggcgcctttcgagaaggccaacgactcggaaactctgaccatgatcatggattgtaagtacacggtaccctcgcacgtgtccactgattgtcgggacctgattgcctcaatgctggtgcgggatccaaagaaacgggccactgtggaagagattgcttcatcggcttggctaaagcccatcgatgagcccgattcgacgacctccacctcagagcactttctgcctttggtcagtcgcgaacagctgggcgaagaggatcacgcctttatcatacaaaaaatgataaacggaaacattgcgtccaaggaagagatattgcaagctcttgacaaaaataagtacaatcatataacagccacatattttttgttggcggaattacgtctgcgacggcgacgagaagagctggctcaaaaacagaggctgctcaacgatgccagcatgaaagtgggagatgcgagtcgcaagctagtgcctgagaaaccaagtccaaccgaagcccaaaaaggaggagtacccatcagcattaacgtgactccagcagctcagtttgccaatgacggtggcaagccggacaagcgcagtcgcaagtgcagcattgtgcgtgaggaggacgaagaggagtctgccacagaatgcacggcggtaggcaatgagttgaaggtaacgtcgtcgtcgcggcgcgaggccttctcagattccccctttagtaggtcaatacatgagcgttccagctctgagcccggaaatcaaacgaaaggcgaacagatagctaatagcggagtgccaagccattcacgtacaaagattgtcgtctcggtggatgcaacgctggcccataagctcaagcagatggagaagagtgccaagatcgatgaggacacgctgagtggtctgaaggagctggagatcggcaagctcaagccgcttcctagcagcagcaagaatccggtgcttacccaccgtcgcacaaagctgaacaagattcggacgccttcatgcagcagctcggaggcctcagacgacgacaccaagacacgcaacaagaaaaagattaacaaatttgtcggtgacacgccagtgcggtttcgcatgcatcgtcgcgactcgcatgacgactccagcgactcgcaagatcagctatatccgccgcccggctcggccagcaatgcgggtaattttatctccaaaagcggctcagtaagcggcaaaaaagagggacaatcgcagtataaagagccaaataacaaatccgatgaaaatcgcaaatctcacagccaaaaaaatcggaaacagcacaacaaggatcatgttgataagcattcccacgctgagaggcagctggcggatagcagcacagctacaacaggaaattccacgaatagaaggcggcgcattcgcgagagccagtcgctggaccgcatcacagaggctcaggaatacgagatgcggcatcgatgctacgcggagagcgaggcagcatcctcgtcgtcctcgtccacccaacatatcgatcagagatattctttactcagcctaaacactagcacattctccgttgccgaaaccaaggaggagtacgacgaggaggcagacgccacaaatgccacggaccaaatcatgaatactttgaatgcagccaaagcaacgcttcaacaagagcaatattttaataacaataccaatcttagtaggaacttcaatcacaatcacaaccagagcatcatccacatcagtagccagaaagccaacggcaagaagtccaacgaaacaccaaaagatatttataatctgaactcaatcgagcatatcgacttgattttggaggataaaagccttaccaaagcaatacacgttaccggctctaaatgctttgtcaccatgaagaaaatccgacggctgggaaaatattttcccgtgatgaacttctcttaa

SEQ ID NO: 18438 - protein, 860 aa, DROSOPHILA
MTLETQPVGGVSDGKIAGLYDLEETLGSGHFAVVKLARHVFTGAKVAVKVVDKTKLDDVSKAHLFQEVRCMKLVQHPNVVRLYEVIDTQTKLYLVLELGDGGDLYDYIMKHDSGLSEELARKYFRQILRAITYCHQLHVVHRDLKPENVVFFEKLGLVKLTDFGFSNKFLPGQKLETFCGSLAYSAPEILLGDSYDAPAVDIWSLGVILYMLVCGQAPFEKANDSETLTMIMDCKYTVPSHVSTDCRDLIASMLVRDPKKRATVEEIASSAWLKPIDEPDSTTSTSEHFLPLVSREQLGEEDHAFIIQKMINGNIASKEEILQALDKNKYNHITATYFLLAELRLRRRREELAQKQRLLNDASMKVGDASRKLVPEKPSPTEAQKGGVPISINVTPAAQFANDGGKPDKRSRKCSIVREEDEEESATECTAVGNELKVTSSSRREAFSDSPFSRSIHERSSSEPGNQTKGEQIANSGVPSHSRTKIVVSVDATLAHKLKQMEKSAKIDEDTLSGLKELEIGKLKPLPSSSKNPVLTHRRTKLNKIRTPSCSSSEASDDDTKTRNKKKINKFVGDTPVRFRMHRRDSHDDSSDSQDQLYPPPGSASNAGNFISKSGSVSGKKEGQSQYKEPNNKSDENRKSHSQKNRKQHNKDHVDKHSHAERQLADSSTATTGNSTNRRRRIRESQSLDRITEAQEYEMRHRCYAESEAASSSSSSTQHIDQRYSLLSLNTSTFSVAETKEEYDEEADATNATDQIMNTLNAAKATLQQEQYFNNNTNLSRNFNHNHNQSIIHISSQKANGKKSNETPKDIYNLNSIEHIDLILEDKSLTKAIHVTGSKCFVTMKKIRRLGKYFPVMNFS

SEQ ID NO: 18439 - DNA, 9149 bp, DROSOPHILA
tgcaaaggtatactctgaagaaagctaaggatgaatactagaatttttatgatattttgaagtattcgtaggatagatatgttacttaagagacataaatatatttctacacgcatgtatcttaagttttagtgataactcgaattagtgtttcattgaaaatgttgtcaaatttgtataattttacgcatgtgttaaaaattgttggtaatgtaatggtagcttaaaccagtaagtagctcgaaaagtgagaggcattcggcacgcccagtgaaaggcagggctatttctaattaaccaataaagaaaagaaagaaaagaaaacttgttttcttttaaaataaaattacttttgatatacggtcggtgtccaaaattctaaaagaagtgataaataaaatcagtaatattgttattatctatgatacttgtagaaacttcggacattgaagattgaagtcaaaactgatttgtttcaaaaaagtaatttggcagcagtcaaacatcacccgatgtagccgtgatcgtctagtggttaggaccccacgttgtggccgtggtaacccaggttcgaatcctggtcacggcaatgctgcaatatgcattgtcacggagtcggggtttttttttattttttaaacctttcaacaatttaagattaatttcaaaagtgcagttttttatttaaacaatattttctaacttctgactttattttacaactcgcatgaaaggatctagttgatactaagactttagttaatcaatgatgaccattaggtagcgagctgggatttgggaagctccacccaacaacccgacgtagccgtgatcgtctagtggttaggaccccacgttgtggccgtggtaacccaggttcgaatcctggtcacggcaatgctgcaatatgcattgtcacggagttgggtgaacagtcgccaattacatttttttgccccaaaaaggctttgagaacttttcaatgtataaaacaccagcgtttgatttgttttatagacttttaattttgattatttacagtttgcctctttgcataacatacagaagatataattatttaattaatattaattaaactatttgcattactaaagcttatagggggttcagccgaacttcgcatctgtgatttaggtttgtttttctggatagcttaataaacacacgccatggcggaatgtagttctactttagttggggggaggcataaataacaaaaacaaattgacacaattttatacggggtacaaattaagacggtcaggtggtttgattgaaattgaaatgaactttcaatgctcctcttcactgctggccgtagagcagttccgatccgggcggtatgctactggggtccacattcacattaaagtagttggctggcgtggcaacggcgggaaatgcgttggccattcctgtagcctgctgttgttgctgctgctgctgctgatggagctgctgttggggatgctgttgcaacgtaaggttgtacggattttgcacatactcctgatagatgtccgctgctgctgtcccagctccactcgtcgccgcctggctttcgtaaacgggcgcaaagctgtgcacaatggatgcctgcggcattttggggagcgaggggtacgcatttccggccagcagatgactaattggcacattgatggcagggtcgctggctggagccggcaactgttgctgctgggcctgatactgttgatagtactgttggtaaagcagttgctgctgctgctgcccaaactgttccgcagttgtctccggcgccatgggcacctcaatggcgtagctattgtacgtattgttggtggttacgatgttggtctgctgcactattgaagccggctgctccgcctcctgcgggctgtgcgtcggggacgtggtcgtggcttgcacggcagcagcagttgcctcattcaccaaatccggcaataatgtacttggtggtattgggtccgtaactgcaggcggctggggtggcacaataatgggctgtccacatgcatgaaaaatatttgtttaattaatagaaaactatattttattcttgtaaaacctacctgagcaaatacaaagctgggcggctgttgcagtacatcggccatgggtggctgcagtattatgctccgcctcggcgactcgacgggagagcccagcaaaggtgtggctgccggcggagtaggcgcgctcaccactaactcgttggaaacctgggtttgcctgggcaaaatggtcaccgctggtaactgttgctgtggagcggcagccacagctgcctgtggagctgggttcgttaaggtctgagctcgcttgcctgcaatcaatatggagcacatttattgtttagtttgtataaaaatataaagacataaacgggggagtggaaagataaaaggaaatataaaactattcaattctttttgccaactttcttgagcaactttagcttggatcttagcttggcccatggtttcttgcgctgcgtagccggaagggtatcacatttgcttgcggatattgaggaaatctttggactatagccatataacggcagggacaaggaataatcggttgtgcccgtagaatgggcgaatctaatttgcgtatagtcaagcgaaaccgctggagtaattgaatctgctggtaggataaaagattagacccattctacaacaccgcgttactcaccttcgtcgtggaaaagctcctccttcaggttgggcaaaaattcgccgatgcgtcgccaggttagctcccaaagagcctgctgtaaactaccatcctgattgtggaacactcgcactgaatgcatcaccagcagcatgttcttcagtatctcctgcatctgctcggacaatgtgtccgatcccaccttcataaagcgctcaatgtagtccaatatatccagccacagctcgttaaaagcatttcccagctcgatgagcgtggtcaggtgttgcaggaacaccttagacataatggtggccgttcgtatacgcgactcttcgaggagagcggcatccagttggccggctgcattactctcgggcagcagttcgtttaggagggggaacagcacctggtggaagcaagagcaccactccgttcccgacaacgtttgcaggtcatggactagcaatgcccgctgctgcaggcacgatatggcatgggtgcgcacctctcgccgtcgatccattgccagcctggcgattccctgaagcaatggacaccagcccggtgaccacaaagctgccgactgcggcactgtgcatccttcttccgcccaccatcggaagatttgggcagttcgcgtgtacaacgtatacatcaggtccagcagttgaatggacaactgttcgtagcgctgggccaggtcctcctgctctgccgcatttccgtttatctggttgtcggacgggtcgcccgtcagaagagtaagattactactcgaggcggaggaagccatgcccggtttgcgttcgctgcgcttcttggaacttttctgcttagccgccgattccagctttcgccgctggcgtatacctccatcccgacaagcctccacaaagatgcggatgcagcgaacgcaggcttcaaaattgtaaggcgtgatgtgtgccacactgcgcacgataaacgccagcgaatcccagcacttgaaaagagcaaacggagcgtggtctagtagctggcaattgtacacaagcgtatttactggaggagcactcaggctaggcggagattgtggtctgcaaaagcaactttgttgtattagatatgaaaggttaatgagtgaagaatctcacctagaggccgtagtcaattcactgtccttgttattgaccagaatccagttctcagcacttggactggagactgcaggtgctgcagatgctttcgtgatctccgaatccgaagtgtaaccacgctctggcacggcagttgcgtcctcttcgccacttatagcgccatcagactttgcacttccgttgggcggcaatggcagctgggcatcatcataattgggcggcacagcaccggctcccacgcattcaagtagattgaaaataatctgccagtcctgctcggaatgaatattttgggccgacgtcttgagcagctcatagataccaatggaaatctgtttagaaatgcgcagcaacaaggctggcttaagcattaaaagcatcttgagcgattgcaatacgatcggacacagttcttcgtttcgcatcagatagatagctagttttaggaccgctacaatgcatcggttgagtaggtagtcgtatccacaggaggcactgcccataagcagtaggtacatttggtctcgaactgctggccacagcggtatcatgcgatcccggttatgaacaactatcttgaccaaaaattccatccagaaaacagtttgatcttcggcgtacggcaggccaatggatttgtgcccctgaggagccttcagtagcgctagaacgcatttaagcaactcctgcagcgactctagttgcacaaactttgattcctgcagcatttgatccagctggcactccttaatgcacttccgtcccagtttgatgaagtcctgctcctcgtacgttggttctcgctgaccctccgagctgataaatgagtacaggctggaaaatagtcccgattcctgcttctcgcggggcttttccaggattaacatggcctttccgttcgcctcacaaaagtcttccacttcgatcaatgattttggcagcaactttagacggaaaagctgcagatataggtccaaaatgtgtttccagctctctcttaagcaatcgccgtagtcgtgaaccaatagaaacaccgttcgcatggcagcctgagcctttccgttcaatccaaagttcacagcttgctgggtttcattgttcgccggagcgggctcatgctgttctacgctgctcagcagcgttgtgaatttgcagagagttaaaacgagggcatcgaagtccgaatgcagattatagtgcgccgatatggcagcggatttgctgaaacctgaaatgtaatcgtaatgtgagatgtgaatggtaattattagatgtttatgtacgtacctgctagagttctttggtagcccgtttcagtgcttttatcaaacataaagcttagggcgctcagagaagcaccccacacaatattgaagatctccacgtcgtatgatgcgtcatgcacatagtgaaaatgtccatcgtgcgtgtctcctcgtcgaagcagtactttccattgataattttcacgcaccagacccgtttgctctgctggcataacgatctcttcgttccttaaataattaataatcggaaatataagcaaatgagagtgacgctatatgtactaaagcttacttgattgcattaaagacttgagccagcatttcttgatcgaaatcttcgccaccgtttagaccacgcaaattcttagtgaagtcctcgagcgtcattggaacatttaaacgcttcgcgttcgagttgtgctgatccatgttcagcatgatgatggcataggccaagcgaaaagcagcgtctacgttggcaaacggatcttggttttgtttctatattggtgggatacatacatgattaatatcagagactgcaagtattttagtagatgtgtatactcacatgccaatgatcagaaaagtgttccagcaccaaaaagatcaatggagcctctccgggcaatctgaaggtctccagataaagacgcaatgcttgatccactcgaagaccagtgaaatcaaacgagtccacaaaattaattagaatcttagagtcgacgtttttctttttcgagatatattcgccaatcatttttttatcgagcccgggattttctcgaaggaacagggccacctgcatgggatcaagctcggcatttaggatgccgtgttcttgcagatactggattcctttctctggacgctgattaaatcgctctgtgccttgggatagcagacgcttcttctgtttgaccttggccagctgttcactggttattcccactccctctccgccagattgtagtcgtagtcgatgtgagctcgcatttataaagcttgcgatgttctccactttctcttctgcagctacactattgccagaatcaattacgattccctccaatccgctgttgtggcgagaatggcggctgccacctgttgctggggcagcttctggcaaggactctctgttgttgctgctattcttgctcgcggcacaatttcgctcgatactgtctatcacacttaacagggtgtccattgagataatgtgggtgctataaactgcattcgttgctgacagcgtatacttgctcagtaggtttgtcaaactttcaaacatatccgtgcagtacaagtcacaatcgtagttgatatacaattccgtgacgaagccgggaatgcgccacaactgcagtagattgtccagagcgagttctcgcatttcgtagggcgtcttgggattatcgctagcaataatctcgctcaattttctaaggtaggcttccagctgaaacttgagatgtccgcggagagactcgaaaagcaaaaaacagagctgcaaatcggcggcaaagatgctaagccgctctgagctgagaagctgtagggaaaggaaagagttaggtcagaaataactaacgaagcaattaagagtcccttaccgatattaagtttctgcataagtcgtccttaaccagctccagcaagccctcatactttccaatattatcggctgcgacttcaaaagctacagtaagtagactaagacccgtgtgcatcatgctatccgagttctgcttatccagaggattgcagaggattatgaggaatcggaacaactcctggatgaagggcaggccataaggggatagtgatgttacatcgtgatcggtggactgctgtgtaaaacggacgcccaccgagttgatgtactcgctactatttgcctcggccagggtgctggttgcttcacccgtttcgccgtccagcaagggctccgattcagtcgactccacttgaataacaggagtctccgggacagtggtttcatcttcccccgtgctcgccgttgttgttggtgtctgcgtaatcttgccctgcatgtccaatatgtttcccgctggactggcgggtgtggtggccaatatgggtgccttcaagtgccctggcaccgtcaggttggcagactgcggtgtttgaggcggttcctccactgctgacgatttcctgggtgctgtctgggcttgggcaaccgtcttacgctttagtttttcttgggtagctccgctggcagcatcgccgatagtaaatcgcttctggagcatggtgtcacttcgctcttcggcgaactggggaaggcgcatgaagaagagcagcaccatgtccttgagcgatttttccgccgagcgacgaagcagttcactcagcctcggctcgaaggagatcttgaagcagctgagcatcacctcgcacatggacacattgctgacggcggctccttcgggactgcggataagcgtgtgcagcacctcaatcactcgcataaaggtgacaccatccgaggactgatcggtgcccataaagcgggcatgtgtcacagcatcggcaatgcgctccacaatgtcagccagatttggagacgtgggatctgtggataggtacagaatgagcaaatgcagagggtaagcactaaatcataatacctattagcccgtaagacaataatttgttaaccgaggccaaggctagactagtcaacggacccgtggcgtccgccgtgcgaatcacctcaagaaacggagccaggaagacctgaggctcgatctgacgcaggtcctcgatccgatttagctcatgcttgaggtcaatgaacagcttcagcagcgagtcattctcgtcgtcctgtggatgtgcaaaagggccatatactttctattcgcagtgagcattaggggcactatttaccacgtaggcggtggcattccaacgcgttccacgtcgcatcgccgtcatcagggtggccatttcgccccgcaccacgtagatgccgttgcctggaagcgccatggtgtccgcgtgtcctccgttgcggtgtctctacgactgcagctagttggcttccagttccagggctagcgctgaaaattgcagttttcgtggggcagggcagctcctcctcccttcccgacgaccttcgcatatgttttggcactcgccacttgcccactcgcacactcacgctgcctggacgaatctgggcgtgctgcctagttgggcatctctcactaatcctaactaatcgaactggtaagctgctaatttttggtgacgtttacgtgtcgtttatgttcttgtgtgcagtccgaatattttgcacaagcgtcttccaacaccggcgcggcagttcgtcgcttcgcagcactggcacagctgtagatgccaactcgatgcggaaatttcaatagattaaattgaaatacagctgcaagcgtatataaaaaaaatataaccttgtttttaaaataaaatatgttgccaagctgtcgatcaaattgatttaatcaaattgatatttgaatatgagggccaaaacaggtgagcataatcagtcacgcacgcatcttcagtcgtgagcgttacacccaccactaagttacactggcatttggtgcgtaggcgaatttctaattggaatcgttcgatttttgaaaaagaatcgcattaaatgcaaagcattcctgttccagactactgcgcacacttgcactgaggcgatcgagcacggggcaggtggatttacaggactcagcgataccaaagcagcccacaggccgaacaatatgggaaacacggactccaagttgaactttcgcaaggcgattgtgcagctgacgcagaagaaccagaagatcgaccccagcgacgagcagttctgggagcagttctggcagggccaccagacgacgctggaggatgtgttcgcgctggtcacctcgagcgagattcgccagatacggaacgagaatccagccaacctggccaccttatgctacaaggcggtggaaaa

SEQ ID NO: 18440 - DNA, 6449 bp, DROSOPHILA
atggcgcttccaggcaacggcatctacgtggtgcggggcgaaatggccaccctgatgacggcgatgcgacgtggaacgcgttggaatgccaccgcctacgtggacgacgagaatgactcgctgctgaagctgttcattgacctcaagcatgagctaaatcggatcgaggacctgcgtcagatcgagcctcaggtcttcctggctccgtttcttgaggtgattcgcacggcggacgccacgggtccgttgactagtctagccttggcctcggttaacaaattattgtcttacgggctaatagatcccacgtctccaaatctggctgacattgtggagcgcattgccgatgctgtgacacatgcccgctttatgggcaccgatcagtcctcggatggtgtcacctttatgcgagtgattgaggtgctgcacacgcttatccgcagtcccgaaggagccgccgtcagcaatgtgtccatgtgcgaggtgatgctcagctgcttcaagatctccttcgagccgaggctgagtgaactgcttcgtcgctcggcggaaaaatcgctcaaggacatggtgctgctcttcttcatgcgccttccccagttcgccgaagagcgaagtgacaccatgctccagaagcgatttactatcggcgatgctgccagcggagctacccaagaaaaactaaagcgtaagacggttgcccaagcccagacagcacccaggaaatcgtcagcagtggaggaaccgcctcaaacaccgcagtctgccaacctgacggtgccagggcacttgaaggcacccatattggccaccacacccgccagtccagcgggaaacatattggacatgcagggcaagattacgcagacaccaacaacaacggcgagcacgggggaagatgaaaccactgtcccggagactcctgttattcaagtggagtcgactgaatcggagcccttgctggacggcgaaacgggtgaagcaaccagcaccctggccgaggcaaatagtagcgagtacatcaactcggtgggcgtccgttttacacagcagtccaccgatcacgatgtaacatcactatccccttatggcctgcccttcatccaggagttgttccgattcctcataatcctctgcaatcctctggataagcagaactcggatagcatgatgcacacgggtcttagtctacttactgtagcttttgaagtcgcagccgataatattggaaagtatgagggcttgctggagctggttaaggacgacttatgcagaaacttaatatcgcttctcagctcagagcggcttagcatctttgccgccgatttgcagctctgttttttgcttttcgagtctctccgcggacatctcaagtttcagctggaagcctaccttagaaaattgagcgagattattgctagcgataatcccaagacgccctacgaaatgcgagaactcgctctggacaatctactgcagttgtggcgcattcccggcttcgtcacggaattgtatatcaactacgattgtgacttgtactgcacggatatgtttgaaagtttgacaaacctactgagcaagtatacgctgtcagcaacgaatgcagtttatagcacccacattatctcaatggacaccctgttaagtgtgatagacagtatcgagcgaaattgtgccgcgagcaagaatagcagcaacaacagagagtccttgccagaagctgccccagcaacaggtggcagccgccattctcgccacaacagcggattggagggaatcgtaattgattctggcaatagtgtagctgcagaagagaaagtggagaacatcgcaagctttataaatgcgagctcacatcgactacgactacaatctggcggagagggagtgggaataaccagtgaacagctggccaaggtcaaacagaagaagcgtctgctatcccaaggcacagagcgatttaatcagcgtccagagaaaggaatccagtatctgcaagaacacggcatcctaaatgccgagcttgatcccatgcaggtggccctgttccttcgagaaaatcccgggctcgataaaaaaatgattggcgaatatatctcgaaaaagaaaaacgtcgactctaagattctaattaattttgtggactcgtttgatttcactggtcttcgagtggatcaagcattgcgtctttatctggagaccttcagattgcccggagaggctccattgatctttttggtgctggaacacttttctgatcattggcataaacaaaaccaagatccgtttgccaacgtagacgctgcttttcgcttggcctatgccatcatcatgctgaacatggatcagcacaactcgaacgcgaagcgtttaaatgttccaatgacgctcgaggacttcactaagaatttgcgtggtctaaacggtggcgaagatttcgatcaagaaatgctggctcaagtctttaatgcaatcaagaacgaagagatcgttatgccagcagagcaaacgggtctggtgcgtgaaaattatcaatggaaagtactgcttcgacgaggagacacgcacgatggacattttcactatgtgcatgacgcatcatacgacgtggagatcttcaatattgtgtggggtgcttctctgagcgccctaagctttatgtttgataaaagcactgaaacgggctaccaaagaactctagcaggtttcagcaaatccgctgccatatcggcgcactataatctgcattcggacttcgatgccctcgttttaactctctgcaaattcacaacgctgctgagcagcgtagaacagcatgagcccgctccggcgaacaatgaaacccagcaagctgtgaactttggattgaacggaaaggctcaggctgccatgcgaacggtgtttctattggttcacgactacggcgattgcttaagagagagctggaaacacattttggacctatatctgcagcttttccgtctaaagttgctgccaaaatcattgatcgaagtggaagacttttgtgaggcgaacggaaaggccatgttaatcctggaaaagccccgcgagaagcaggaatcgggactattttccagcctgtactcatttatcagctcggagggtcagcgagaaccaacgtacgaggagcaggacttcatcaaactgggacggaagtgcattaaggagtgccagctggatcaaatgctgcaggaatcaaagtttgtgcaactagagtcgctgcaggagttgcttaaatgcgttctagcgctactgaaggctcctcaggggcacaaatccattggcctgccgtacgccgaagatcaaactgttttctggatggaatttttggtcaagatagttgttcataaccgggatcgcatgataccgctgtggccagcagttcgagaccaaatgtacctactgcttatgggcagtgcctcctgtggatacgactacctactcaaccgatgcattgtagcggtcctaaaactagctatctatctgatgcgaaacgaagaactgtgtccgatcgtattgcaatcgctcaagatgcttttaatgcttaagccagccttgttgctgcgcatttctaaacagatttccattggtatctatgagctgctcaagacgtcggcccaaaatattcattccgagcaggactggcagattattttcaatctacttgaatgcgtgggagccggtgctgtgccgcccaattatgatgatgcccagctgccattgccgcccaacggaagtgcaaagtctgatggcgctataagtggcgaagaggacgcaactgccgtgccagagcgtggttacacttcggattcggagatcacgaaagcatctgcagcacctgcagtctccagtccaagtgctgagaactggattctggtcaataacaaggacagtgaattgactacggcctctagaccacaatctccgcctagcctgagtgctcctccagtaaatacgcttgtgtacaattgccagctactagaccacgctccgtttgctcttttcaagtgctgggattcgctggcgtttatcgtgcgcagtgtggcacacatcacgccttacaattttgaagcctgcgttcgctgcatccgcatctttgtggaggcttgtcgggatggaggtatacgccagcggcgaaagctggaatcggcggctaagcagaaaagttccaagaagcgcagcgaacgcaaaccgggcatggcttcctccgcctcgagtagtaatcttactcttctgacgggcgacccgtccgacaaccagataaacggaaatgcggcagagcaggaggacctggcccagcgctacgaacagttgtccattcaactgctggacctgatgtatacgttgtacacgcgaactgcccaaatcttccgatggtgggcggaagaaggatgcacagtgccgcagtcggcagctttgtggtcaccgggctggtgtccattgcttcagggaatcgccaggctggcaatggatcgacggcgagaggtgcgcacccatgccatatcgtgcctgcagcagcgggcattgctagtccatgacctgcaaacgttgtcgggaacggagtggtgctcttgcttccaccaggtgctgttccccctcctaaacgaactgctgcccgagagtaatgcagccggccaactggatgccgctctcctcgaagagtcgcgtatacgaacggccaccattatgtctaaggtgttcctgcaacacctgaccacgctcatcgagctgggaaatgcttttaacgagctgtggctggatatattggactacattgagcgctttatgaaggtgggatcggacacattgtccgagcagatgcaggagatactgaagaacatgctgctggtgatgcattcagtgcgagtgttccacaatcaggatggtagtttacagcaggctctttgggagctaacctggcgacgcatcggcgaatttttgcccaacctgaaggaggagcttttccacgacgaagattcaattactccagcggtttcgcttgactatacgcaaattagattcgcccattctacgggcacaaccgattattccttgtccctgccgttatatggctatagtccaaagatttcctcaatatccgcaagcaaatgtgatacccttccggctacgcagcgcaagaaaccatgggccaagctaagatccaagctaaagttgctcaagaaagcagctgtggctgccgctccacagcaacagttaccagcggtgaccattttgcccaggcaaacccaggtttccaacgagttagtggtgagcgcgcctactccgccggcagccacacctttgctgggctctcccgtcgagtcgccgaggcggagcataatactgcagccacccatggccgatgtactgcaacagccgcccagctttgtatttgctcagcccattattgtgccaccccagccgcctgcagttacggacccaataccaccaagtacattattgccggatttggtgaatgaggcaactgctgctgccgtgcaagccacgaccacgtccccgacgcacagcccgcaggaggcggagcagccggcttcaatagtgcagcagaccaacatcgtaaccaccaacaatacgtacaatagctacgccattgaggtgcccatggcgccggagacaactgcggaacagtttgggcagcagcagcagcaactgctttaccaacagtactatcaacagtatcaggcccagcagcaacagttgccggctccagccagcgaccctgccatcaatgtgccaattagtcatctgctggccggaaatgcgtacccctcgctccccaaaatgccgcaggcatccattgtgcacagctttgcgcccgtttacgaaagccaggcggcgacgagtggagctgggacagcagcagcggacatctatcaggagtatgtgcaaaatccgtacaaccttacgttgcaacagcatccccaacagcagctccatcagcagcagcagcagcaacaacagcaggctacaggaatggccaacgcatttcccgccgttgccacgccagccaactactttaatgtgaatgtggaccccagtagcataccgcccggatcggaactgctctacggccagcagtgaagaggagcattgaaagttcatttcaatttcaatcaaaccacctgaccgtcttaatttgtaccccgtataaaattgtgtcaatttgtttttgttatttatgcctccccccaactaaagtagaactacattccgccatggcgtgtgtttattaagctatccagaaaaacaaacctaaatcacagatgcgaagttcggctgaaccccctataagctttagtaatgcaaatagtttaattaatattaattaaataattatatcttctgtatgttatgcaaagaggcaaactgtaaataatcaaaattaaaagtctataaaacaaatcaaa

SEQ ID NO: 18441 - protein, 2040 aa, DROSOPHILA
MALPGNGIYVVRGEMATLMTAMRRGTRWNATAYVDDENDSLLKLFIDLKHELNRIEDLRQIEPQVFLAPFLEVIRTADATGPLTSLALASVNKLLSYGLIDPTSPNLADIVERIADAVTHARFMGTDQSSDGVTFMRVIEVLHTLIRSPEGAAVSNVSMCEVMLSCFKISFEPRLSELLRRSAEKSLKDMVLLFFMRLPQFAEERSDTMLQKRFTIGDAASGATQEKLKRKTVAQAQTAPRKSSAVEEPPQTPQSANLTVPGHLKAPILATTPASPAGNILDMQGKITQTPTTTASTGEDETTVPETPVIQVESTESEPLLDGETGEATSTLAEANSSEYINSVGVRFTQQSTDHDVTSLSPYGLPFIQELFRFLIILCNPLDKQNSDSMMHTGLSLLTVAFEVAADNIGKYEGLLELVKDDLCRNLISLLSSERLSIFAADLQLCFLLFESLRGHLKFQLEAYLRKLSEIIASDNPKTPYEMRELALDNLLQLWRIPGFVTELYINYDCDLYCTDMFESLTNLLSKYTLSATNAVYSTHIISMDTLLSVIDSIERNCAASKNSSNNRESLPEAAPATGGSRHSRHNSGLEGIVIDSGNSVAAEEKVENIASFINASSHRLRLQSGGEGVGITSEQLAKVKQKKRLLSQGTERFNQRPEKGIQYLQEHGILNAELDPMQVALFLRENPGLDKKMIGEYISKKKNVDSKILINFVDSFDFTGLRVDQALRLYLETFRLPGEAPLIFLVLEHFSDHWHKQNQDPFANVDAAFRLAYAIIMLNMDQHNSNAKRLNVPMTLEDFTKNLRGLNGGEDFDQEMLAQVFNAIKNEEIVMPAEQTGLVRENYQWKVLLRRGDTHDGHFHYVHDASYDVEIFNIVWGASLSALSFMFDKSTETGYQRTLAGFSKSAAISAHYNLHSDFDALVLTLCKFTTLLSSVEQHEPAPANNETQQAVNFGLNGKAQAAMRTVFLLVHDYGDCLRESWKHILDLYLQLFRLKLLPKSLIEVEDFCEANGKAMLILEKPREKQESGLFSSLYSFISSEGQREPTYEEQDFIKLGRKCIKECQLDQMLQESKFVQLESLQELLKCVLALLKAPQGHKSIGLPYAEDQTVFWMEFLVKIVVHNRDRMIPLWPAVRDQMYLLLMGSASCGYDYLLNRCIVAVLKLAIYLMRNEELCPIVLQSLKMLLMLKPALLLRISKQISIGIYELLKTSAQNIHSEQDWQIIFNLLECVGAGAVPPNYDDAQLPLPPNGSAKSDGAISGEEDATAVPERGYTSDSEITKASAAPAVSSPSAENWILVNNKDSELTTASRPQSPPSLSAPPVNTLVYNCQLLDHAPFALFKCWDSLAFIVRSVAHITPYNFEACVRCIRIFVEACRDGGIRQRRKLESAAKQKSSKKRSERKPGMASSASSSNLTLLTGDPSDNQINGNAAEQEDLAQRYEQLSIQLLDLMYTLYTRTAQIFRWWAEEGCTVPQSAALWSPGWCPLLQGIARLAMDRRREVRTHAISCLQQRALLVHDLQTLSGTEWCSCFHQVLFPLLNELLPESNAAGQLDAALLEESRIRTATIMSKVFLQHLTTLIELGNAFNELWLDILDYIERFMKVGSDTLSEQMQEILKNMLLVMHSVRVFHNQDGSLQQALWELTWRRIGEFLPNLKEELFHDEDSITPAVSLDYTQIRFAHSTGTTDYSLSLPLYGYSPKISSISASKCDTLPATQRKKPWAKLRSKLKLLKKAAVAAAPQQQLPAVTILPRQTQVSNELVVSAPTPPAATPLLGSPVESPRRSIILQPPMADVLQQPPSFVFAQPIIVPPQPPAVTDPIPPSTLLPDLVNEATAAAVQATTTSPTHSPQEAEQPASIVQQTNIVTTNNTYNSYAIEVPMAPETTAEQFGQQQQQLLYQQYYQQYQAQQQQLPAPASDPAINVPISHLLAGNAYPSLPKMPQASIVHSFAPVYESQAATSGAGTAAADIYQEYVQNPYNLTLQQHPQQQLHQQQQQQQQQATGMANAFPAVATPANYFNVNVDPSSIPPGSELLYGQQ

SEQ ID NO: 18442 - DNA, 4616 bp, DROSOPHILA
cagcggcgatgagcaaggatcaattaccgtgcgcacctggaaacgctgtttgcagggattctgcaaatgctgaaccggatcagctcggctcgggtcggctggtgtgtttgaatggcacggagaaccttgtgggactgattaacaacgtcggtgtgccatgttaggcactgcgtttactcatttcgcgaggcgtcttatctgtaaccgaagtgctgaatgcagataactggcggccagtaatcacctgggccaactacgacgactccgactctgacagcctgagccaaaggaaaacataaacaaatggcgttaactacactttgcggtctacgatatgcgccttggctgtcagaagtctgcaaaatgttgggtaagtccaaaatttaaaaattagctaatgactaatgtgttgtagaagcggaaacggctttataaatcattttatttttaaagatgaatgcatatgcagggacttaaaaacacagtttcaaaatgtataactacgaacccattggtttgagtttctcattattgagatgtactttaaatcttatgtgatattagaaattaaaattcaaagcaatttaaagactacatttatattatacatatatattttacgatatacgtatttataatattcagttgattctcaggtcatttaagttataaacatatcggtaagttgtcagatgttttactttagcaaacattttagtattgccgtctttgttagaaaccctttagagttgtccaatgccttggagccaactgtcagttgagccaattttccagcgacggagaaagcaaatctcatatccctacttatcagcagtacaaacgtttcgttaaaatttccgaacaaattattcctgcgatagaaactgtacaaatttgaacttttttcgaattcggccaactgccattgagttttaaaaactttgaatcgcttttgagagagagcaattttctgcgaaagatacgcgatcggactagcgccatgaaagtcaaagtttcgggtgaatatacgctggccgagatcgaagtcgagttggaccagcagttgacgccagacgacctgcaacccggagccacagtgctggccaccaacgagagtactggcggcttagagcggattgtcagccatgaggagctgtccagattcttcgccgtggggccagcgggcgccttaccaatgcccacggatgttgtagtggagcgaacattggcggatccggctttcaagcaaatcctgcaggaggccgacggaaagaaaggcttcgatccccaggcggagcaaatgaagattcgcgactttttggccggcgtcaccagcagcaagatgaccactgagcaatcggtctttcatggtatacgaatagattcacttgcatggataagtttttatagtattgcctacattatttaggatctcgttccaattcctctgcgtccactgtcaaccgtataaagtgtccaacatgtttggtccagttcgatgccgtggcctttcaaaatcattcctgtgaagcgaagccgatcgaggtggcggtgcctcagcaggagaagccacatcttgtgcctactgtatctgctcctccggctccgctaagcaaaccggctagcgagcgggtaattcgggagaaccaagtgcgtctgcgccgttacatcaaagatgagatgaagtacgatctggccacaggcatcgaaagctcgcgcaaaaacgcggccaagggtcccaacgagtgcaccatgtgcgaccgcaaatttgtccacgcctctgggctggtgcgccacatggagaagcatgccctggacttgatcccttcgcaaaccagcgagcaaccacatacgattccggctgccggactgcatgtggtggttaagtgcaactcgtgtggccgcatcttctatgatccgcaggtggcttttagacacggccttattcacgattcggagcattcaacgatgcgtcaaagtccaatgacccaagtaccctccaatagagcagatttcaatgagctgctgctggatggcgagatgctgatagacaacgatcccgcatttgcaacgagcaatcaaaacacaaacccaccgaagaaggaaatgtttagcagcctgatcttgggaagtgttttgcagtgcgagttttgcgagtacattttcgctgacatagccgagctgcttgtccattccgcttcccatgtggcggagcggcgctttgagtgcaccgcctgcgacattcagatgaacacggccaaggaagccagcatccacttccagacggactgcattttcatgcgcgaagcaatcaggtccctaaatgtcacgcttagtcgctactttgtgtgtaatgtgtgcgagctgaagtttgccaacacggacctgctccaggagcatcggtaagctattggttagccattgaaagtatgattacttcgattctctattctctgtactaggtgtacctcctttcactactttcctcgcctcaacgagaatggcaagaagctcctgctgccctgtgacttttgcgacgtcaactttgagttcgcccacgattttctggcgcacagcgaggagaagcatctcaacaaaaagaagcgcgaaaaggaaacgcgcaacacgggcgccggccgaatacgtcaatatctctgcgatatctgcggcaaatcgtacacccagtcaagccatctgtggcagcatctacgctttcaccagggtaagtgatacagtgtctatatgaggataagatgatgatagttcctttttaggtgtgaagcccttcgtttgccaggaggaaaactgtgatcggaagttcaccattcgcccagatctgaacgaccacattcgcaagtgccacacgggcgagcgtccatatctttgtctggtgtgtggaaagcgctttctcaccggatccgtcttctatcagcaccgtctgatccatcgcggcgagcggcgctatgagtgcgaggagtgtggtaaacgtttctatcgcgcggacgcgctcaagaatcaccaacgcatccacaccggagagaagccgtacagctgcctcttctgcacgaagacttttcgccagcgcggcgaccgtgacaagcacatccgagctcgacactctcacctggatgccaactcgcgtctcatgatgcagatgcagaagttccaactggagacggccgctgcgcagaaggctcaaagtcataatcccgagcagcaggataatgatgttgctggtggtgccagcacctcagatgtgccctcgggctcgggattcatgtcgactgagccaagcgtcgcggagatgcagtactctattacgccggagcagcaggaggaaatggtgtgtgtgcccattgacgaggtcaataacagtttctttatgtcgcactacatgcaagctgtccccatggaggaggatggttcggggcagcatatcattgtcttcgagcagccaggccagaatatggacatgatgtccatttacgatcagcaacaggttggggaaccaatgcatgagagcggcgtgcccaagcggccggctgaggaaaatgctagggtggtggttgtcaaaaacaatccaactaagccgatattttcggatacctatttgtaaaaatcatattcaaattcgaatttaaataaagcggcaagatagcgaagatgccacacactgttcctttagcgagtgggtctatgaaacagcgttgccatttagttcctcaaacagcggtgctagacgttctataatcgctgcgatcaatcgtggaaaatatcgatactgccacccccaggtccgggtgccatcgctagttccttttcttttcgaatttctcgtggaaaacgccaacatgggtttcgctactctctggtactcgcatccccgcaaatatggccaaggctcccgatgctggtaagaattgtgttgcccgttgtttttcgcacgttttggtgtacaatttgtttaaatgcttgtcccgtaaccccgtattttgcacgatttttgcttgtttgtagaaagtggggttatacccgacccgctttttttttaacgcatggcgtctaccaatttgtatttgcttgtattgtcaattgtttcaatgttccaaaggcttttgcccccggttgagtacggaaatacgtgtttagcatctagaacagtttccttaattaagggtggccaaagtaagagctgcgcgaggcaaaacgagccatttccgaatggatttggttcagccaagtgcagcgacagctttgcttttaatgaaactgttccatgctacggagattctttgatggaaccgatctaactatgatataccatctcattttcagccgtgcctgctctaaccgccacggtctgatccgcaagtatggccttaacatctgccgccagtgcttcagggagtacgccaacgacattggcttcaagaaggtgagtcctccatatgaaatcctcaacgaactgataactaatatcattcgttttttagctggactaaatgtgtcctcttcgcattttaacgcggtaatcgcgtatattaatgcatattaatgtatggagtcgtcggatgtcggggactcggtaaattagtatgccggcagcaacagcaaca

SEQ ID NO: 18443 - DNA, 2445 bp, DROSOPHILA
atgaaagtcaaagtttcgggtgaatatacgctggccgagatcgaagtcgagttggaccagcagttgacgccagacgacctgcaacccggagccacagtgctggccaccaacgagagtactggcggcttagagcggattgtcagccatgaggagctgtccagattcttcgccgtggggccagcgggcgccttaccaatgcccacggatgttgtagtggagcgaacattggcggatccggctttcaagcaaatcctgcaggaggccgacggaaagaaaggcttcgatccccaggcggagcaaatgaagattcgcgactttttggccggcgtcaccagcagcaagatgaccactgagcaatcggtctttcatggatctcgttccaattcctctgcgtccactgtcaaccgtataaagtgtccaacatgtttggtccagttcgatgccgtggcctttcaaaatcattcctgtgaagcgaagccgatcgaggtggcggtgcctcagcaggagaagccacatcttgtgcctactgtatctgctcctccggctccgctaagcaaaccggctagcgagcgggtaattcgggagaaccaagtgcgtctgcgccgttacatcaaagatgagatgaagtacgatctggccacaggcatcgaaagctcgcgcaaaaacgcggccaagggtcccaacgagtgcaccatgtgcgaccgcaaatttgtccacgcctctgggctggtgcgccacatggagaagcatgccctggacttgatcccttcgcaaaccagcgagcaaccacatacgattccggctgccggactgcatgtggtggttaagtgcaactcgtgtggccgcatcttctatgatccgcaggtggcttttagacacggccttattcacgattcggagcattcaacgatgcgtcaaagtccaatgacccaagtaccctccaatagagcagatttcaatgagctgctgctggatggcgagatgctgatagacaacgatcccgcatttgcaacgagcaatcaaaacacaaacccaccgaagaaggaaatgtttagcagcctgatcttgggaagtgttttgcagtgcgagttttgcgagtacattttcgctgacatagccgagctgcttgtccattccgcttcccatgtggcggagcggcgctttgagtgcaccgcctgcgacattcagatgaacacggccaaggaagccagcatccacttccagacggactgcattttcatgcgcgaagcaatcaggtccctaaatgtcacgcttagtcgctactttgtgtgtaatgtgtgcgagctgaagtttgccaacacggacctgctccaggagcatcggtgtacctcctttcactactttcctcgcctcaacgagaatggcaagaagctcctgctgccctgtgacttttgcgacgtcaactttgagttcgcccacgattttctggcgcacagcgaggagaagcatctcaacaaaaagaagcgcgaaaaggaaacgcgcaacacgggcgccggccgaatacgtcaatatctctgcgatatctgcggcaaatcgtacacccagtcaagccatctgtggcagcatctacgctttcaccagggtgtgaagcccttcgtttgccaggaggaaaactgtgatcggaagttcaccattcgcccagatctgaacgaccacattcgcaagtgccacacgggcgagcgtccatatctttgtctggtgtgtggaaagcgctttctcaccggatccgtcttctatcagcaccgtctgatccatcgcggcgagcggcgctatgagtgcgaggagtgtggtaaacgtttctatcgcgcggacgcgctcaagaatcaccaacgcatccacaccggagagaagccgtacagctgcctcttctgcacgaagacttttcgccagcgcggcgaccgtgacaagcacatccgagctcgacactctcacctggatgccaactcgcgtctcatgatgcagatgcagaagttccaactggagacggccgctgcgcagaaggctcaaagtcataatcccgagcagcaggataatgatgttgctggtggtgccagcacctcagatgtgccctcgggctcgggattcatgtcgactgagccaagcgtcgcggagatgcagtactctattacgccggagcagcaggaggaaatggtgtgtgtgcccattgacgaggtcaataacagtttctttatgtcgcactacatgcaagctgtccccatggaggaggatggttcggggcagcatatcattgtcttcgagcagccaggccagaatatggacatgatgtccatttacgatcagcaacaggttggggaaccaatgcatgagagcggcgtgcccaagcggccggctgaggaaaatgctagggtggtggttgtcaaaaacaatccaactaagccgatattttcggatacctatttgtaa

SEQ ID NO: 18444 - protein, 814 aa, DROSOPHILA
MKVKVSGEYTLAEIEVELDQQLTPDDLQPGATVLATNESTGGLERIVSHEELSRFFAVGPAGALPMPTDVVVERTLADPAFKQILQEADGKKGFDPQAEQMKIRDFLAGVTSSKMTTEQSVFHGSRSNSSASTVNRIKCPTCLVQFDAVAFQNHSCEAKPIEVAVPQQEKPHLVPTVSAPPAPLSKPASERVIRENQVRLRRYIKDEMKYDLATGIESSRKNAAKGPNECTMCDRKFVHASGLVRHMEKHALDLIPSQTSEQPHTIPAAGLHVVVKCNSCGRIFYDPQVAFRHGLIHDSEHSTMRQSPMTQVPSNRADFNELLLDGEMLIDNDPAFATSNQNTNPPKKEMFSSLILGSVLQCEFCEYIFADIAELLVHSASHVAERRFECTACDIQMNTAKEASIHFQTDCIFMREAIRSLNVTLSRYFVCNVCELKFANTDLLQEHRCTSFHYFPRLNENGKKLLLPCDFCDVNFEFAHDFLAHSEEKHLNKKKREKETRNTGAGRIRQYLCDICGKSYTQSSHLWQHLRFHQGVKPFVCQEENCDRKFTIRPDLNDHIRKCHTGERPYLCLVCGKRFLTGSVFYQHRLIHRGERRYECEECGKRFYRADALKNHQRIHTGEKPYSCLFCTKTFRQRGDRDKHIRARHSHLDANSRLMMQMQKFQLETAAAQKAQSHNPEQQDNDVAGGASTSDVPSGSGFMSTEPSVAEMQYSITPEQQEEMVCVPIDEVNNSFFMSHYMQAVPMEEDGSGQHIIVFEQPGQNMDMMSIYDQQQVGEPMHESGVPKRPAEENARVVVVKNNPTKPIFSDTYL

SEQ ID NO: 18445 - DNA, 2614 bp, DROSOPHILA
gtttaccttcggtatattcccccccaccaccaccccttcctcatccctgcggcatttcagccgcctgccgcccacaatttataagccttttggctacattttgtggctttgattgcaattatcttttgcattttgtatttatttgctacactttgggcaattgtccgcattcggcctttgtctctggttctccactgttcatctgttcattgtggccattgtcagtggccgtagtccacatatgtgtgttgttgttgttgggaggggagcctatataaatccttttgtttttgccacaagaatgccgagggagagatgagagggcagaggcggagtgatgggatccatggcgtatgtggggcttccaatttgaagtttattaattgtcaatttcatgaatttttcggtagccttcaggccaatcggcctccgccggcaagcaaatcaaaatcaaaaactttgatttgtatgtacgttatgtaggtgctgcaagagggagtagtctctatttgaacaataaatgcgttattaatctgatacctgtaagtgaagttcgatttgaaaatattgaataaagtgtgatagtcactgtatagacaatttaatttagataaatcattcggtttttattaacatatatgtggtacttatatattatgtggtttgttaacaattgtagaataaatttggaaaacaataagttgaaaaccaaatatgaaaatataagtttgctaaatcgtgttgtttattgaacaagattgaaccgcaaacatttttcaactgtaagtcagtaaagtaacgtctttttttccttttttgagcttggtggagcggtagataactatggtgtaacgtatttttgttttgagcaagtttttagaggaaagataactaatgggatgcatatcggctggttggatatatggacgtgtacatgtatgtgtagtatgggatcccaatgagcttgctcgatcttccgaggtccaagagaggttcttctaatttacaatctatgggagaactatggcgaatcagaactgaccccaatgctgtggcagacccataccattcgggtagttctgactggtcatattctcgacgaggtaatttgcaaagtactcgcctcgctgatcctcgcgaacgtgacgcattgccctcgtgacactggccattaggaggcacatctccggctcctgactttggcatggcggagtgggtttggtcatagtgtagaaacttcgtttcttccgccgacgtggtggtccatttggccctccttgcgccggaaaaacgcccaacggtggctcttgaggagcgtccaggagtatgtccatctgacgattgactcccaggcgctgctgctgctgtccatcctccaatgtgtccaagtcatcgccagcatcttcattcaccgcgtcgccgactcgatcgattagctgctcatcgtacagatcgtgtccgtgtagtacgtccattccaacttacaggcacatacaaaaaaaaaaaaacaaccaacaaaaattgaacaataaatacggcagtgtaggttgtgcttctgctattcaatacgatgtttttttctctgtagtatcagttgtgtcgttttgtagttgtagtgtctgagtttgatttagaactgaatttaatatcatggcattgtgattatgagaaatggaaacctgacataaaaatcaaaggaatatttgctaataaatgataggaggaagatgttttttgttttgtcatttctatattatttagagagtctagaagccaagagcatcagcaaagaaaacttgccacataccaagtcccatttggtcgaaagtttttcgcctgttttccagcctcctaaactgggggcgattagatagaattgtgtgtatccattagatgtagtcatatccatatcgaacggccagtgacaaatgggaaatcgctgtctgacatttgctcgccttgttccaaatcgggttcagaccccaatagccagcccccaagtgattggacacatttagccctatttacccaccccaacccttacgaactcacaaccccccaccgacgccccatcgacgtcgtcattacaagccatttaactcgactcgaatgcctggcatcaagtgctccggattcagaatcgagaaatcgaaatcggcagctgtttgtgtgcctgtaatgggagcacattacaatctgtaaatgagctcattacggccagctcaattaataacttttcgtattgcgtttaagcaatcgcatttcggaaattgtttgccagacaaatcgctgtgagagcgaaaagtttttcccgccggaggaaattatgaagtggaagtgtaagcggagtggaatgaagtggagtggagcagctgcatccaacaagttagccattaccatcatgttgccaaggatgtatcagcaacatttcgattagcgcatgcgcagatgctccccctcgctctcactgcgttctttcctctctctctctctcactttctctctctctctctctcttgagatctgacctctcgcttgtggaacaatttattatggctttgggtctatgactgtgtgtaatcacattgttgccattttcacttcattattttgc

SEQ ID NO: 18446 - DNA, 614 bp, DROSOPHILA
acaactacaaaacgacacaactgatactacagagaaaaaaacatcgtattgaatagcagaagcacaacctacactgccgtatttattgttcaatttttgttggttgtttttttttttttgtatgtgcctgtaagttggaatggacgtactacacggacacgatctgtacgatgagcagctaatcgatcgagtcggcgacgcggtgaatgaagatgctggcgatgacttggacacattggaggatggacagcagcagcagcgcctgggagtcaatcgtcagatggacatactcctggacgctcctcaagagccaccgttgggcgtttttccggcgcaaggagggccaaatggaccaccacgtcggcggaagaaacgaagtttctacactatgaccaaacccactccgccatgccaaagtcaggagccggagatgtgcctcctaatggccagtgtcacgagggcaatgcgtcacgttcgcgaggatcagcgaggcgagtactttgcaaattacctcgtcgagaatatgaccagtcagaactacccgaatggtatgggtctgccacagcattggggtcagttctgattcgccatagttctcccatagattgtaaatt

SEQ ID NO: 18447 - protein, 147 aa, DROSOPHILA
MDVLHGHDLYDEQLIDRVGDAVNEDAGDDLDTLEDGQQQQRLGVNRQMDILLDAPQEPPLGVFPAQGGPNGPPRRRKKRSFYTMTKPTPPCQSQEPEMCLLMASVTRAMRHVREDQRGEYFANYLVENMTSQNYPNGMGLPQHWGQF

SEQ ID NO: 18448 - DNA, 22948 bp, DROSOPHILA
cttttccatttttgctgccagttgcgagttgccagttgctcgcagacgtgtcaagaagtttgcgagaaacacaacaggaagcgccggcctacacaagcacctacacacccatacacatgcccatatatgcacaacaatgccgggagcagcatcaacaaagcgctgagcaatgagcagcccccgacccacgccacagcctacgcaagctcattgctttttcgttgggcgccatttatcaattcttgtatcttacttgtgttgtgtgcgtctgtggagaagatgctagattgtgtgtatgggtgtgcccataatgttaattaactttatctcgctcaagctttaagtcttgaagcggcactcatttcccggccctcgccacaattcgcattcttccccttcaggtgcttatctcttccgttacgcacataacacatacgttggccgagtgagtcgttacgttgcgtatacgtactgcactggcagaaaggtttttctcagtcttgaggaagtccccattgagtgctgactgctatctttgtttcacggaaccaaatccgtacatttgttcctcttttcgattgtcttgtattaattcacagtatagtagtagtagtgaaataaaaaggcttggtatttgaaaaaaattggcagaatgaagagaaattataatcgtatgtgttcaaaggacaccttttttttattttaaggtcatcaatctgaagattttttctgagtgtgagccgcgtgccttggttcgggtgctttgagctgtaggggattagcgcgctgccaattaacgttacatgacacgacgcagagcaattgcgggcagaggcgatttaatttactctcattccccctacttgcataagcttaaatctttccacttacatcaatctctttctctcgtttagaaaacatacgcatcgcatcgcaaaatgtaaagcaataatcagcacaacaaagccaaagctcacaatagaagtagacgaccaggctgagcaactgagctgggacgatgccaaatgccattattggaaacggtcgtagtcataagatttgcatagtatagcaatagcagcagacatcatgaaagccccaagcgtgataagcacagcaacaatagcaacagcaatagtagatactaggcacaacatggttaacaaagggaacggtgacaatataatcggtaaactgagcgatcgactcgcttgaatagtgagatagacatatgcccagtgttcgaaaatcgagtgagaagcctggcaaaagagagcgcgaccaaggcatgcagctgccctaaggacctcgcccaggacgacgacgacgacggagtcgaaggaccaagaagcaaccgcaaccagaggcagcacccaacaaaacgacgacaatcagtcaagatgagtgatgatcaagcgacgttcaacgatgagaaaggtgagtcccctaaccgctaagccctcctgatactgctattgatagttttctaagccacccggcctcataaatattattcccgatgtgaccaggggggagttgggtaaccgggaggccatcaaatctgtatgcgggagtatgcatggtcagggggcaggtgtcacagggcaggacttctgctccttctccttcctcaatcaggtcctccgacatcctgacagcgacacctgcacgccaaccaaaagaaagacgtgcacagtggttctgcacacacagaagtcttttgactggagttgcacgacttctttccatagagagcaagtttgttttattttttacaattttattaatttctcggcctatttaagttcacttctgcatatttttatccctgaaaccaacaattggcttaagaataaactagcaggtcaagttatgagctcaaagattgacattcttcaacagccacccacagtgccatataaaaggcagttggggtggggggaccaaaggcatttcctttttgtgcgtgttgagcgttttcctgccacttcccgaactcctgtcctgctgtccggtcctgctcatcaacataattaaatagcattgctcattgtgtgccggttgtgccttggatacggggcatgtgcttgggtctggggcacttgggtcctgtgtcctgggtcttggccaataaaacgaaaatggaatcgaaccagcttaatggcggggcagagtgaccctaaggccgtttaaataaatgataaacaaatcgaaaatgggaagcgcttttgtcggaccgaaaagtttcggctgatgactggccataagttacgcaatcgtttttgcaggcgccgatagagagcgccatttgtccttacagcaggagtgagtgggtgggccttgggttgataagtgggcgcagggcgccattgtcagcggagtatattcactggggaggtgaacaatgcacaaaggccagcaggcgctgccatctgcggattacgaatatgaacggaaacggaaactaattaaatatgtagagcaattgttgctgcatctcgctttatcctaccgattcactttttcacttttgtttgtcccgcatcactgcagccagtgtttcggtttctccttcggctcggcttgggctggggcttggaccgaccaccttcctttccgccttgccagtctcgaattggatttggtttttggccagggccaggaagcagtcgagagcaagcgccccaactgcgaggggcgtaattgccctaccccctaagcctccgctccgagtccaaatcccaatcccatttcaatttccattcccattcccgtcaccattgaacttgctcaaaggtctgcgcagctgcaactgcaacagaggcagcaatgccagttgcaactgcaacaatggctgcactttaaacaacaaactttgaaagttaaaccaggaaatccgaagcaaagcatgcagtacataaggagtatcaagagagcaccataatatagcagaaaatcgaattgactttttcaagactttccccacaattctaaaactgttgcccacaatctcgtgaatcacttgtagcacacctttttctctctgtgtgtggatgcaactggttttttgggaaaaccacgacattgcacgtcgctagttgcttttagtttctgtatcggtgtgcaatttcctttttgtttttgggcgctttgagaatgactttgcttccgcgtgaagatgcgacggcaggtctggagtttcgagtcgcgagcccgggtcgattatgcaatatggggaagatgtgcgtcttcgttgcatctgatgttaatgtgcgaccgccaaccggttgcccatcgtcattgccgtcatcgccggggcagcagaagcagcttcatcatcgtgagcgtggccctctctagctgaagatgtaatccccattgaaagatgctctgatggcactggagtgcagcccatttgctccagctcagcggcttccagttcgaacttcattcggcacagcatcgtgattatgaccggcgatgtggctttattggcaacagattattgcgtcggtgtcccgcttgctgctcccagctagttccttatgtaagcccgctttgtttacaatccgaaacagtttaaatgtatattaattattcggcagtgatggaatctgccgagcgagcagtcagctgcctagctccgtagctgccagatgagaaatgataatcagcgacgtaatcgaaatggccggatggccccgattcgctggctcggcccaagtcactcactgctaatgaaaacagtggctaatcaacggcgaaagcatggcggcgggggttgttggggcgtccagattggtgggtgggtgagttggaggtgttgggtggccagtggccatgacctctctccgctgccagtcggacatcttgctgatgtaagcgcgaacaaaacccacggcgcgttgccttttgcccatgttgcagcgcgggggcatgacaagatatttttgatgttgctgcaggcgaggcttaacccaatagcgctcgagagcctctcgccaaacggcgacctgacctggcccaatccaaagaacagtaactggctccttccctgcctcacagccgcggcaccactgcttcgcgttggtaaacaaaattatattgataatttccggcactggtacggccatcaatgggttaatgactagcgacagtgagcagccagcgggcagcagccaacccggccaacccttggccaatcgttatgcaagtctggaccaacaataaggaattgccaataggaagttcgtcgtatctacataaaaatccataaacatgaacgtcaacaaaatacctaacggttaacaaccagcatcggcgatgtgataaagtagcaatagcaacgagctctgggccaaaactggaactggtcaagttgcatattaccacagtttgagtttcggttttagctattttcggccgccagcccacgaagcttagggccactcagattttctctcgaaagaaagtagagcacagaagcgaatgctcctcgagagagtgtgttagtgcactgggagaatccgtgtattacaattacaaaataaaagtcttagatttagaaaaacatttttatgcagtatccaagctgctttcgtaaaatatgattttcttacgtaaatatagcaaaaggaatttaagatatcttttagcgatcttaaattggtctacgaaaccggttttgtttatcatgtaaaatattgaaaatggaaaaccaaagatgattgatacacttaagttggcatcacaccatgggatttaaaataattttgagtcacagacccttttttacgttatccgtgtggtattgcaattgggcacatgctggggatgatgatgtgaaaggtcaacactctcgcgatcttcagaaagggagagtgaagactggatggccgagaagaagacgaagacgaagacgcggccagttggccttcaatgggtcgcggtcgtgaagtctccagtggtctggctccacttcattcagctcgtcgtcggcgaaagagattatctctgcacttgctcagcggcaagcgatcgcttatataaccgcatggctcccgagtggagaagagggctataaaacggcgtgtgcccatgtttgccgaatcatttccagtcggtccagaggcgagcaatcattcgagagtccttcgtaacgaatccagagaaatggcagcccgtttcatagtgagtttggcacgacaccacgtcagttcaggtggatcctaacacagattccctcctcccactcccagatcagtgcgcttctgctggctagcccagcggtatggggaaagcccaccttcggacgagagcatgtccacatccgtattcacctgccagagagcggtggggatcacggcggccacggaggcggtgattttggcggccacggaggcggtgattttggcggccatggaggtggaggctatgagattcactcccacgatggcggatacagcggcggtggaggaggcggtggtcatgtgaacacctatgctgttatcaccgagaaccacggatacagttccgggggtggcggaggcggtggaggtggccacggatacagctccggcggatatagttccggtcatgatgatgccaagattgctgccatcgctgctgctgctggctcgtcctccgatcacggacatggcggacatggaggcagcggcggacacggcggaggttatggtggccatgccatcgccaacattgcagccatcgccgccagctcagactcctctgatcatggtggcagcggaggatacggcggctacagcggtggcggtcacagcggaggaggtcatgacacccaggtgattgtggctgctgctgcggctggagattcacatggctcttccggcggatacggcggcggatcctccggtggatacagtggtggctcctccgggggctacgatggtggatattctggtggatcctcttacagcggagcctcctcctacagcagcggctcgtcctacagctctggaggatacagcagtggacatggcggtggctatagcagtggcggcggatccagctatgatacacaagtggtggctgcagccgctgcttcaggcagcggtggctcctacggcgggtcttccggcggcggtggcgacggatacagctactcagcgccggcctcaggcggctgggcaggatccagttcaaactggaagtagacggcaatgtccgtcgttggccatctggtcgtctagtctactgttcacgtttaacttatatttgacatgttcgctcatccatattccacacattctcccaagatactggtgtacaaaataaaccatgttagtgtaataatttaagccagccgcccagtatgtgatttacctaatgcttgcccagtttttgccgatttttctccgcctctttcatcggagctatatagtggcgcttaaacatgtcatagatggagaagtacacggcactcatcagtcctgccttgagtagagtaggcaacattcccttatagaagcctccgattccttcctcccgaaacgtggtggtgatgcagcccaggatcgtagggcactcggggttgcgaccaaaggtcttacgttcctgtttgaaggccatcagctggatgcgctttttaagcaggtccgccgggtacacgatcatcttggccaacacccctgacagcgccccattgagaaacagaaatgcgccgtggatttcctggcgctggtcgggaggcttggccatcaagacagccgcgttgaggtacttgtagaagagaaagtttgcccctaccagcggaaacacctgcacaagcgtgaagggtagtcctcgggaaagtcccatccacccctccatcttatagacctttcgaagtccggtaaaagtgttcatctgactgcggcgcgaggaggggtctgcggccaccatctgtgttcttaccacgtcgaacggctgggcggccacggctcccagacatccggctatgccgccgcagatgaaaaacatgagaaagggtcgctccctccagtagtcaaactggtgggccatggagcgaagctgttcgtaggaccagaactgtaccagagcgtacgaaatgctcagaacctggccggagttgtgaccacggaacataccgcgcattccctcctcggcgtacaccgacttgaaagcgtggatgactccacggtatttggaccccttatggtttgtcaccggctccacttgcatctggaatcggatcttcagaacgtccagcggctgggttatggtccgcgtcgcagctccggcgattccgccgccgacggcctgcattaactggactaccaccgagttttcgggcatcggatgtggcgacgagcagtggacggattcactcacggcaggagttattcactgtacagatgaggacgaagtggtgtgttgtcattccgcaagctaaatttcctgctactgtataagaaagtggctaggcttttattaagctctggccaattacacagtattttccaatttaatatttagtcgaaattttaaaatacacaataatttctctgacaagaatgtaaaagcttaaaatttttaaggtgtctacgtactttagttggggtctgcatgtgaatgtacatacatttctatgcttgtgttggttgtcgcattattaatcccttcgatctctttcagctgtcgccaagcaccaggttgtcgcgtacacgcagaggtcgcaggttaagcacgagaaccggcacatccagctggtgcgggagtacggcttccacccgcgcactaaggcctccgtggaggacggcgacgtgctgccccgcaaattcgagccctttccggagcacatgtacggaaagccgctggaggagattgacaccttcatttacgaggaggtgagtactgccgcgttcaacattccctcattatccgcggcctcgcctcacttggccgcccattggctctaattaaaaagtcacaggcaggcgaccagaccccagatccgtgttctcatggtagggcaatcctcgtggtggcaggtgcaggcggcggaaatggaacgcggcgcgcggctgttgttgcttttgttttcataccgccgtctcgctgcacttgccccattgtaggcacaagtggaagtgcactttggctcagggaaactggggttaatggaaacgcctagaacggccctcgaaaaccgaaaaggaaatcagggtaaatgccgttcgttcgttaaatttcaaagccgggaataaattttggaactgtgtacatcaaacaaaggacacacagttgcaaacacgtctgcccaagtgttagtgcaggcatgaactcggtgctggaaatatgggtcatgtcatgcacagggctccgggcagcaaagttgacagccgtatttacgtgactcaaacaaactggccggagccgctgccgcagcagccgcagaggacaaattataggcgaacatgcaagtgtactcaagacttggcggctttcgcgccacgtgtcgtggcgaaataattccgaaaagcggcctagccggacgaactggactgggactgggctgaataaacatgcaagtggccagcccacggggctgcactataatgggagttacggtgagcgataagatgagcgtacctgtgacgccgagtgatgtgttttatcgatctacctgacatcccactaagtccaagacaaacaaagtccggcaatctataattaaatcttattggcgacacgcttgcagtccgggaacatccccttgcgaatctcgacgctctttctgggtcactcctgcgatgggtgctgcaatgttgtcccacattctataattaattcctgattggttagaacagaatatctccggttgcccaatctgttgaccgcagggctttgtttaatccatttcacagaatcagccaactcgcacagcacctacattgcagggtacctccgagtaattctggcgtcatcgaaacttagtattgtgaccagtgattgtttagaaacaatacagttggtctcataagctttttgattttcaattcaatatgctctgaaaataatgcagggtattaaataattaaaactttcgactatttcattttaataatagccaaggcagtgctactaggcgcgctcagtgactattgttcatctctgatagtgtcctgggaactaggcaaaccaaacattcttagaccattgctttgagtaactaacccagtggctcccatccgaagcccttactgctagtctccgatgaaaatgggttgcatggcttttaaacagccactgcaggtgcagaatcaaagtgcattgcattgcattttaaaggccatctgctggcaaacaacgcccgcctgctcgtctccggcgacacgataagacacagacgccgcatgtttgcaggaatctgtacaagcttctacacagcttttcatttctggcacttaaaaatacacacgcttatccctaagctgcttgccgtaaccaccaacagcatttcgggcaggaaactggaaaggcatgcaaatttacaggcatgcccacgaaatggtaaatggcaaaatgccacccaatcgaaaattctgcttgtttcattaaaatttctgcttacttggctgagcgacgtttatgtgtgtattacagtgacaaacgaccttcagacgagtggtctggaggggggtcggacgctagtgggccagccgaaacatcatcctcggcaggcacatctgcatatataattgaagaaatcagggcgctaatgaacaactcagtgtggcctgggcggctgccttaaggtttacttttcgttgctcccctttggaggcaagccaatcgattttccgaacatggccaagggacaggagcggaacggcatgacgggcgcaggacacgcgctcccctgtcggaggcagttcctccaaccgactgcgccttgaataatcgtattagccgatttgtaggcaatttattgccctgccttgagctgatcaatgtttaatgtggccttccgatgggcaccaagtggatccaatccgccgggtggccgataagcatccatcgccatggaatccatgggtaacgtggctaaaatctgtaatcttaacagcaacacttttggcaaaacgtgctctcgcgctcacgcacatatagacacatgattcgcgaatgtggttatgtcgaaagagcacgcttgcccttttctcaccgctctctttctttcactcttattaacaacgcatgatttagttgtggaaccttggcgaaaatctagtaatttattagaatcaatttttacgtgaatttaaaatgcacatgtacgtttgtgtgaaaactggtttgcaaaattactttagggccaccattttagggctacccagtcggcgtttttcgtttcggtgttagcatcaatcaagagttcctgaaattaaaaggggatttggattaaaacctcgcgtaaggcaaatggtgaaatggattgggttgggaaagggtgctcccagaggctgcggccagcggataaactcaccatttagtgggcaatgctgctgcgcttacttggaccttgcacgcatctttctgcgcttacgcttcaacctacgcatacgcttcttacgccactgcaaacgataaaaatcactgttagttgttgttcactcgcgtttaactcactatgtttgaaagggaaaatttaattgtcacaataatttaccttagctctcattttccttctggtctggacgacggtttgagaacgaaagaacgaatataaaacggaagtcggcgtgctaggctcgcgtggctatttgacagttcgccgaagggttgctttggtgcgatagctgcgtatcgatagtggcgctgccagctaggactgccacctggcagcaatgccacatactttgcgctctggtgctgccatatccgatttaattttaatgtgattttacaagaaagtcttgcctaattggaggtagtgcagcgccaaacaagtgggaaggaaatggggagtaaggaacgcttgagaccacattggcgggtgctccaactggagcacagcaatcctctcccaaacagcaccctgtactaagcgcgcttttttcaaattccagaccttctgtgtagtatctaagcggttccggaagaactacatccatcgcttcacgggcaccaagagcctcttcctcttctacccatggagcccagcaaggcgcgtttgcgtctacatcgccaccaaccagttcttcgactactgcgtcatggccaccattctgttcaactgcatcttcctggctatgacggagaccgtggaagaggcggagtacatctttctggccatttactctatcgaaatggtcataaagattattgccaagggctttctgctcaacaagtacacgtatctgcgaaacccgtggaattggctggacttcgtggtcattactagtggctacgccaccatcggcatggaggtgggcaacctggcggggctgcgcacttttcgcgtgctgcgcgccctcaagacggtgtccatcatgcccggattgaagacgatcatcaacgcgttgctgcactccttccgccagctggcggaggtcatgacgctgaccatcttctgtctgatggtcttcgcgctctttgccctccaggtctacatgggcgagctgcgcaataagtgcgtgcgccaggttcccaccgactggacgaacgtctctcacacggactggcagatgtgagttgtgcaagaagtctgactttataatcagaagtgcgatctaatcgatgtttttcttcgttttagctgggtcaacgacaccgacaactggctatatgacgaggatgaactgcccgtgctgtgtggtaacttaactggagcccgccactgtcctttcgagtacgtgtgcctctgcgtaggcgagaatcccaatcacggctacaccaactttgacaactttatgtggtccatgctgacgacattccagctaatcacgctcgactactgggagaatgtatataacatggttggtttctgaggttccttatgatgcgggggtctaattcagggacaattcttcaaggtgctggcaacatgtggtcctatgagcgtctccttctttacggtggtggttttctttggatcgttttatctaatcaatctgatgttggctgtagtggcgttaagctacgaggaggaagcggagataacgaacgaggtgagtccgtcaaatctttatctggtgcaatactaaaattttaatggctctgcaggaacgtaagaaggatctcttggaccaccgggatgactctacttttagctttgatccctcggtgctcaacgtaaaaaaactaaataagaacaacaaaaaaaagatcgactcacggaaaggagtcctcttggcatcgtacagcaagaaaaaaactaggcgaaaaaaaaccaaaggggggaaggaaggtggcaccaacggcaatgggaacggcagcaacggggacgacaacaaatcccattcggccacccccagtccaggaccaagtccccgccatagcgcaactgaacgcccctcggcacttactatgcaagctcaaaaacagtaccagcagatggagcagcagcataagctggccaaatcaggtagtggcggtagcaacaatccaatggcccccacgcccaagggccgcatcagcttccaggactccggtatgggcgtaaagaaccctaatatgctttacccctcggattacaaaggccagctcatcgccaacagcggtcagccgagctccaactccagcggcgtgaaccgcgagtcctcgcaggacgactctggggtagtggacgatcacgaggaacaagatacgacgaacgatatggggcacgtgtccaccgttgagcttgctctctccccacgcgaagtacgccttattaaatgtaatggaaacattgcccgcatcaagaaccacaatgtgtacgccctgcaccaggaattctcttcggaggtggtggtgatcggtaagaaataagtttggttggatggacactttattctcaaatatcaccatttcagatgacctacccgaccgaaactgtgatcgttgcgttcattggtgcaccgactatgaaagctggctacagtttcaaaactgtctatacaaagtagtgagggatccccttttcgagctggccatcacactttgcatcgtgttaaacacagcctttttggccatggaacaccacgggatgagtgaaagcttccgcaacgccctggatgtgggaaacaaagtgagtgtaacattcccgaccaccagaataaacctaattttttcttgccctcaaaggtctttacgtcaattttcacgtttgagtgcattgtcaagttaatggctctttctaaagatttttttctttgcggatggaacattttcgaccttcttatcgttactgcgagcttgctggatataatatttgagttggttgatggcttgagtgtcttgcgtggcttgcgattggtgagaggacattacctagttttcaatttcggattttcatatttcaattttccagctaagggtattaaaattggctcaatcgtggactacaatgaaagtgctgcttagcattataatctcgacgatcggcgctcttggcaacctcacgctcattttggtcatagttatctacatattcgctgtcatcggcatgcaattgttctccaaagactatacgcccgagaaatttgatccagatccagtgccaaggcaagaccaaaagcaaatctgagaaagattttatattaattatatgcatacctttgaacagatggaatttcaatgacttctttcactcatttatgatgatctttcgcattctgtgcggtgaatggatcgagcctctttgggattgcatgcgagccgaagaagaggtatggccctacggctaataactaataactgaaaattacttaaatttgatattattttccagcaaggagcctccacctgctttgccatatttctgccgaccctagtgatgggaaactttatggtgcttaacttgttcttggccttgttgctcaacagttttaactccgaggagctcaagtcgaaaaaagaggcaagtcaaatgttccgaatgcttatattttgatcccagtttcttagcgttcgtgaatgtatatgtctatatgtctatgtgtgtaccggaaatggtacttaaacaacctaataactaaatccgaatgtctcgaaaacccgatgggggagggatcatctctcccgtgtcataaaacaatccattaaaatggttaagatgatcgattgtttggtcgaactattaatgtatgatttgaatttgtcttgcactttatgtggttttcggtatttgtgtgtctctgagtgtaagatcttagctttattatgatcgcgcgatgtcacccccaattgaatttccagttgaattatacaccatacgatttatggcactcctctgtttccgcaagcaaaaccgattattattttcatgtttttaaaaatcctactaaatttaatcgctgtctgtattgtgttactaactgtgctaaatgttcatactcttatttaagcaaaactataataaccccactcagcacaggagtcaaagagaattttacctacaccctttgctgggttcttcagttcggccccctccgaacactgtttccacgatgtttgttctgacaaaatcagcaatcacttaagtcgcattcagctcagactcagaacagacctcgcttaagtctttttgtaggtctacatgtaaaacaaatttttaaaatgcactaaagcgtattccaattaaccgaatttctgtcgtcaactctgcacaatgcgttttaaatcctaacttgcgacacaaaaacacctaacactaaacacaatcttaaacccaatcaaaacgaaatttaaacaatttaaatacactgaaaacgttaaacagattttcaagaagaaggtaattcttttaactaaacttcttactttctttaaacttgcttgcctcgtttgcgttaaccaatccatatctaaatccagacatactgtatgtgtaaatacttacgtatagagtagtaaaaagtcgatcaggctatatatgtacgttgtattttttatgttgcctgcccttagtataagtcgtattcagttttgtatgcattggatccccaattgtataatatcaatattgatgtctattcaaaaataaatatgtagcgaactctttagttgagtttcacctttgggcctcgctgtgttctaatgttatgccatctctgacgcaaataggaagtgggcgaggagtccaagttggcaaggagtattgaacgagtgcgcgacctgattcgtaagaagagacaagagcgcaaggatcgcaaggagagaaagtttgcggaaaagttccagcagatcgtacttgacgcccagcaggcgcatgctcagactctctcccatcaggctgcagttggtctggagagaggtgacaagcccggtgtgctggccgaaaccaagtttcatagattaagctatcaggtaaagtcttacatatgacatttgaacaatgtaattagcctatgtctttctcaggaatctatgaatcgcccagtttctggatccgattttggctttcagatccccctgcacgacgggctgcatacgatagtcgatggccttgagtatgatgatacgggagacttgccagagcagatccagctacaggcgcatccactgccacccacttcggactcgatgccacctacctatgaaagtgctatgatggccaccactggaggctcattttcctctgtcaatggaaacggtacctgtcaaaacctaactccgttcgtccaagcagagcgccggctgcagcaccaaatctcttcgggagtgagtacccaacagtacgattcacgcgaggaggctacctacacagaatcaatcgagctgctgggccaatacaactcaaccgatacagacccgtacgctaacgatcaacggagcggctgcggttccttcaaccgaggggactcactgcaggacaactcatcacggcgctatggaagcgaagagcacgacgaggcctttcttaagtaccagaagtccctgctgacgcgatcgccaagctaccgaaagtcactggatcgcttgtcccaatctagtgggcagtctcagcgatcattgctcaagtcagaagaggctgagatgcggcgacattcaagcggccagtccctgaactccatgtctattgaacaggatgaactgctgtctcagcagggcaatttgcgagaggaactgctcaactgcgaccaaaaggaactatttcagttcttgcaggaggaagaggaactgcaaaaggggaccaaactgcgacgtatctcaaatgtcatgagatcccgccgaccctctagtcagatgggacagcctgagaacgaaactatggtggagcactcagagtttgacaacattattcagagttttgagaaagaactagaagagatcaaacgatccaccacatcgttagagcgcaaactttccaacctttcagagccctctccggcggccgatgaagccactaaagccattatggagcatattgctatcattacaggagcctccgagcgctcggccgccgatgaggtagtgctccccttaaacccgtacgacagttatgacctgtcaagcgtaccacgacgttctcaatccgtcagcgcagccgctcagcgtcagtccgtaaaactgaagcgtcgcagcttagaaaaacaacgcaagatcgatgaggactttagcatctcaaatgagatacgcaaaatctgtgatcaaatccacgcccccttcgtggccatggaagccatggcagtcgcagccaccagcgccagccaggcgcaacctaatcaatcaccctttctcaggcggaaggtcgatccgttcactgtgcagtttgatcgcttcaagcgtctttcccttattgagcgcgtggaggaagtacccgaggaggagaagcctatctcgacgctacgcattgagtcggagaagatgccgcgcaagtttctgcatggtcccgaccagctgcgtctggacagcctctctctaaagagcacgaactcgtacgaaaacctcctgatccagaagcaaaagctgggcatggccacgccacccgccgttcctgctactccgcctacctccttaaaatcgagcatcgagccaccgacactggcgcaaatttcatcgctaaaaaccaccccgccgctggctgctcttaccgagcaccagcagcactttcatgccacaagcattcaagcagcacccactcccgcccacactcatgcccactctcaggcgcatgctcactcaatggctgggcagcggcgacgcatggagcatccacaatcgacgctagacaaagccgcatccttccagtcagcgcgcaccgagtcgcacagctcgggagcggcagacgcaagctcagccctggctctggccatggcccaaaagactgagcagtcgcagtcgacggcgccagatgccacccagaagccgtctgcatttacgcgactgaccgaaaaaccatggcattgtttggtttcctacgtagacgatctcactgtcggtgggagacgtaactcgcagggagcttacaatgatcccatgacttttccgagctacggggccacaaaggccgccaaggtgcctgacgactgttttcctcagaagtgctacgaccagtaagtatttcttagcgttccctcatgcgctttctaattctgacttttttcagtttctactttcgctgcccctggttcatgagctgcatggacacgcagagcgccaagcactggactcgcgtgaggacggctgtcttaacggttgtcgatactccggcctttgagtggtttgtgttggtgctgatctttgcgtcaagtatcacgctctgcttcgaggacattaacctggacaagaacaagacgctaaaaagagttctatactggattaacttctccttctgtctgatattcgtcgttgaaatgatcctcaagtggctggccctcggattttccaagtactttaccagcttctggaccatacttgatttcatcatagtgtttgtaagtgtcattaataataatgttttggtcggacacttctaaccaacttgttctcgtccaggtatcagtattctcgctgcttattgaagagaatgaaaaccttaaggtcctaagatcgctgcgcacattacgagctttgcgcccgctgagagccatctctcggtaagttgaccaattattggtctcccgataggctgcaccacaaccttctcagacatacgtgcatccgatgaagaaagctatctgcgtaggaacttccgtcactacttctcgttcattctctatcactactgatctattttatctttttggggaggagttggtcagaccgagcgatgcgatccaagccgtgtgcagtgtttaatacaatctcgtcttctttatgaatttcgaatagaaatacgtactcgtagaacacgcattgcatcgtcctcgcctccgtccttgtcctcgtccctttagtctgtagttgaagtatagacctttcctttgcatctgtagttttcgtttattgtagaaatagaaaagaaaaacatgtatatatgttggaaataagctagctaaatagttgactaagcagataagttccactccaccatctatacaccatttgaccacgaccacttggcactttcccggcatagttgagacgacatgtgtccatcacgttattgctgctggcatttcatcgatcatttctattccaggtggcaaggaatgcggattgtagtaaacgctctcatgtatgcaataccatcaattttcaatgttcttttggtttgtttggttttttggttgatcttctcaataatgggtgttcagttctttggtggtaaattttttaagtgcgttaatgagatgggcgagctactgccgattactgtaagtattctggtggatgttcagatgcagcttcacatcaatcaacacctgagatattattaatcatttcatattccaggaggttaacgacaagtgggactgcatcgaacagaactacacgtggattaactctaagatcactttcgaccacgtggggatgggctatttggcccttctgcaagtggcgaccttcgagggctggatggaggtaatggccgacgcagttgatgctcgtggagtggacctgcaaccgcagcgggaagccaacctatatgcgtatatttattttgttatatttattgtgtgcggatcgttcttcacactgaatctattcattggagttattattgataactttaacatgcttaagaagaaggtaagcccattggcctatgctcctgcccggtcagcttctttgcaaccacacttaaatcacctgtgcaaacgctaaccatctatgatccatctttgatttgaattgctgtattccgttcgaatcgccgtcataatgtgtaaatttaaccgtgttattgtgttgctatgttgtgacgagttgttcattaaatatcttttgcatactgcttagtgtgttacataactgtggattgtatatatataattaaatgttcattttattctcatcacttttatagtatgaaggaggagtgttggaaatgtttctcaccgaatctcaaaaacactattacacggctatgaaaaaattgggacgaaagaaaccacagaaagttattaagcgacctataaatcattttttagctatgttttatgatttatccaattcgagaaggtaaacaaacccgtcaatcaaccattgatccaaccaatctcaatctaagaacagcaaattacgtatatatacttatagtttgtacttactgttagtctgactctgtcctctatgaactctttttgtacttttgtaccaacttgtatgctaaagcttagttgcttaggttaggcccacaacacatctatagaatgtttctgatttggtgataaaattcatttaaacacttgaaagtcccgacatttttggtcagaaccggtgcttgtctcaagcaagcaccgccaaaaatgtctcttctgtatttttaatctgtgtatactatattcaaatgcataccccttgaagttttgtagagcacattttgctatgatacttaacgactgaaatagattctattcgaaatatcagaccctccacactctaggcatgctctatctatcggacgagtagcagtcctttggcctcaagatccgaccctttaatagctcgcctttctatgtacaaccagcatgaaaaacatagttagcattagaactaattaactatatgaatctacttataatggtgctcctcaaaatgcctgtacataatccccgtctttctgaatttttttaagcaccgcgagttcggctagaccgatgtttaattgtgtcaaacaaaaatgtaattaattatccacttttgtgatgtgcaggttcgagatcgcgatctttgtactgatttttctaaatatgcttacaatgggcatcgagcactacgatcagcctcatgcagtcttcttcattctggaagtgagcaacgcctttttcaccacagtatttggtctaggtaagtcgctgaaataatttgctgcttatatattgaagtgtttaaatgatctcctttccgcagaagccattgtgaaaattgtcggtctgcgctaccactacttcacagtgccatggaacgtgttcgacttccttctggtgctggcctctatcttcgggattctgatggaagacatcatgatagacctgcccattagtccgacgttacttcgggtggtccgcgtcttccgcattgggcgtatattgcggttgatcaaggccgccaaggggatcagaaagttgctattcgctctcgtagtgtccctgcccgccctatttaacatcggagctctgctaggactgatcacctttatctacgcaattctgggcatgtcgctgttcggaaatgtcaagctccaaggtgctctcgatgacatggtgaacttccagaccttcgggcgcagcatgcagttactgttccggttgatgacctcagccgggtggaatgacgtacttgagtccctgatgatacagccgcccgactgcgacccatttatccatgggcacacgaacggaaactgcggtcacccgcttctagccattacctactttacgagctttatcatcatcagctatatgattgtgatcaacatgtacattgccattatcctggaaaacttcaatcaggcgcaccaggaagaggagatcggcatcgtcgaggacgatctggaaatgttttatattcgctggtcaaagtatgtgttttcttctgacagtaggcctagccgtaggatctcgccaaaagctgccaggcaaacaattcaaagaacactgctgactattccatctgatttacttgcagatacgatccacatgccacccaatttatacacttctcgcaactgtccgattttattgcctctctcgatccaccattgggcatctcgaagcccaataatgtcgctttagtgtcatttaatctacccatttctaagggtaataaaatacactgtctcgacattttgcacgcgctcgttaagcacgtgctaggtcatgtcgaggagaccgataacttcaaacagttgcaggaacaaatggatgtcaagttcaagaaacagtttccaacgcgcaaagaattggaaattgtttcgtcgacgcggatctggaagcgccaggaaaaggcggccaagaccattcaaacgggctggaaggaatatttgcggtactacatttaccacaacagccccattatctcactctagcattctccggcgaactttctatctgatatttgggagttactaatcctattgtgtctcttcacaggcgcaagcgggaaaaggaacgctccaattctggggacagcgccactcaaacctccagccctggtggatggcaatcaaaactttctgccctaaatttcttccaccttcaggtgagtacatagatatagtgtagaccttatgaatatgctcaaatttgattttccgcaggtgagtcgtcgaggcactgcctgctccagtcgagcctcgtctcgaaaatcgtcgcgtgcctcggatgcatccgatcttagcgaactagctgggccttggttgaacctgcctctgatgctcgtctcaggtgccgacgaagtagtcaaggatataaaacagcaaaacgacgagctgggcaaacggtagttatccagcagcacccattcctcttactcaaaacaaccacaccgactcattacacacactccaataacacacatactgacacgtagccattccatgtatgtttatgtttcatggctgcgatgaatttgaaatgcaatttttagacgaaaacgaaaggctttccatgctcatgccacatgcaacaagaacataaccgtcgatctgcatcgataaattaacgttttgtgtgtctacagtgtatatgaacttaagccctatttctagcaaatcctcttgtatctccctaaactatgagtccctgctcgcagacatggtcactgccgttctcagaagtggctcgcagcctagtggcttgaattatctaggtaaaggcaatctcccagtcatcagctgcttagcttagctggcattctataacctactacttacgtacaatcttaaatcttacaacagacaacttcaatagcagtattaaaacaaaagcaacaagcaatcttaccaactacgttttaagttctcgactataactcatccacaatccttgtatattcagatagattaagtatatgtattaacagtaccaactatccagtactcgaatcattcgtcctttatacctactctatttagtatatccatccaaactcgacc

SEQ ID NO: 18449 - DNA, 6847 bp, DROSOPHILA
agcaactgagctgggacgatgccaaatgccattattggaaacggtcgtagtcataagatttgcatagtatagcaatagcagcagacatcatgaaagccccaagcgtgataagcacagcaacaatagcaacagcaatagtagatactaggcacaacatggttaacaaagggaacggtgacaatataatcggtaaactgagcgatcgactcgcttgaatagtgagatagacatatgcccagtgttcgaaaatcgagtgagaagcctggcaaaagagagcgcgaccaaggcatgcagctgccctaaggacctcgcccaggacgacgacgacgacggagtcgaaggaccaagaagcaaccgcaaccagaggcagcacccaacaaaacgacgacaatcagtcaagatgagtgatgatcaagcgacgttcaacgatgagaaagctgtcgccaagcaccaggttgtcgcgtacacgcagaggtcgcaggttaagcacgagaaccggcacatccagctggtgcgggagtacggcttccacccgcgcactaaggcctccgtggaggacggcgacgtgctgccccgcaaattcgagccctttccggagcacatgtacggaaagccgctggaggagattgacaccttcatttacgaggagctgggtcaacgacaccgacaactggctatatgacgaggatgaactgcccgtgctgtgtggtaacttaactggagcccgccactgtcctttcgagtacgtgtgcctctgcgtaggcgagaatcccaatcacggctacaccaactttgacaactttatgtggtccatgctgacgacattccagctaatcacgctcgactactgggagaatgtatataacatgggacaattcttcaaggtgctggcaacatgtggtcctatgagcgtctccttctttacggtggtggttttctttggatcgttttatctaatcaatctgatgttggctgtagtggcgttaagctacgaggaggaagcggagataacgaacgaggaacgtaagaaggatctcttggaccaccgggatgactctacttttagctttgatccctcggtgctcaacgtaaaaaaactaaataagaacaacaaaaaaaagatcgactcacggaaaggagtcctcttggcatcgtacagcaagaaaaaaactaggcgaaaaaaaaccaaaggggggaaggaaggtggcaccaacggcaatgggaacggcagcaacggggacgacaacaaatcccattcggccacccccagtccaggaccaagtccccgccatagcgcaactgaacgcccctcggcacttactatgcaagctcaaaaacagtaccagcagatggagcagcagcataagctggccaaatcaggtagtggcggtagcaacaatccaatggcccccacgcccaagggccgcatcagcttccaggactccggtatgggcgtaaagaaccctaatatgctttacccctcggattacaaaggccagctcatcgccaacagcggtcagccgagctccaactccagcggcgtgaaccgcgagtcctcgcaggacgactctggggtagtggacgatcacgaggaacaagatacgacgaacgatatggggcacgtgtccaccgttgagcttgctctctccccacgcgaagtacgccttattaaatgtaatggaaacattgcccgcatcaagaaccacaatgtgtacgccctgcaccaggaattctcttcggaggtggtggtgatcgatgacctacccgaccgaaactgtgatcgttgcgttcattggtgcaccgactatgaaagctggctacagtttcaaaactgtctatacaaagtagtgagggatccccttttcgagctggccatcacactttgcatcgtgttaaacacagcctttttggccatggaacaccacgggatgagtgaaagcttccgcaacgccctggatgtgggaaacaaagtctttacgtcaattttcacgtttgagtgcattgtcaagttaatggctctttctaaagatttttttctttgcggatggaacattttcgaccttcttatcgttactgcgagcttgctggatataatatttgagttggttgatggcttgagtgtcttgcgtggcttgcgattggaagtgggcgaggagtccaagttggcaaggagtattgaacgagtgcgcgacctgattcgtaagaagagacaagagcgcaaggatcgcaaggagagaaagtttgcggaaaagttccagcagatcgtacttgacgcccagcaggcgcatgctcagactctctcccatcaggctgcagttggtctggagagaggtgacaagcccggtgtgctggccgaaaccaagtttcatagattaagctatcaggaatctatgaatcgcccagtttctggatccgattttggctttcagatccccctgcacgacgggctgcatacgatagtcgatggccttgagtatgatgatacgggagacttgccagagcagatccagctacaggcgcatccactgccacccacttcggactcgatgccacctacctatgaaagtgctatgatggccaccactggaggctcattttcctctgtcaatggaaacggtacctgtcaaaacctaactccgttcgtccaagcagagcgccggctgcagcaccaaatctcttcgggagtgagtacccaacagtacgattcacgcgaggaggctacctacacagaatcaatcgagctgctgggccaatacaactcaaccgatacagacccgtacgctaacgatcaacggagcggctgcggttccttcaaccgaggggactcactgcaggacaactcatcacggcgctatggaagcgaagagcacgacgaggcctttcttaagtaccagaagtccctgctgacgcgatcgccaagctaccgaaagtcactggatcgcttgtcccaatctagtgggcagtctcagcgatcattgctcaagtcagaagaggctgagatgcggcgacattcaagcggccagtccctgaactccatgtctattgaacaggatgaactgctgtctcagcagggcaatttgcgagaggaactgctcaactgcgaccaaaaggaactatttcagttcttgcaggaggaagaggaactgcaaaaggggaccaaactgcgacgtatctcaaatgtcatgagatcccgccgaccctctagtcagatgggacagcctgagaacgaaactatggtggagcactcagagtttgacaacattattcagagttttgagaaagaactagaagagatcaaacgatccaccacatcgttagagcgcaaactttccaacctttcagagccctctccggcggccgatgaagccactaaagccattatggagcatattgctatcattacaggagcctccgagcgctcggccgccgatgaggtagtgctccccttaaacccgtacgacagttatgacctgtcaagcgtaccacgacgttctcaatccgtcagcgcagccgctcagcgtcagtccgtaaaactgaagcgtcgcagcttagaaaaacaacgcaagatcgatgaggactttagcatctcaaatgagatacgcaaaatctgtgatcaaatccacgcccccttcgtggccatggaagccatggcagtcgcagccaccagcgccagccaggcgcaacctaatcaatcaccctttctcaggcggaaggtcgatccgttcactgtgcagtttgatcgcttcaagcgtctttcccttattgagcgcgtggaggaagtacccgaggaggagaagcctatctcgacgctacgcattgagtcggagaagatgccgcgcaagtttctgcatggtcccgaccagctgcgtctggacagcctctctctaaagagcacgaactcgtacgaaaacctcctgatccagaagcaaaagctgggcatggccacgccacccgccgttcctgctactccgcctacctccttaaaatcgagcatcgagccaccgacactggcgcaaatttcatcgctaaaaaccaccccgccgctggctgctcttaccgagcaccagcagcactttcatgccacaagcattcaagcagcacccactcccgcccacactcatgcccactctcaggcgcatgctcactcaatggctgggcagcggcgacgcatggagcatccacaatcgacgctagacaaagccgcatccttccagtcagcgcgcaccgagtcgcacagctcgggagcggcagacgcaagctcagccctggctctggccatggcccaaaagactgagcagtcgcagtcgacggcgccagatgccacccagaagccgtctgcatttacgcgactgaccgaaaaaccatggcattgtttggtttcctacgtagacgatctcactgtcggtgggagacgtaactcgcagggagcttacaatgatcccatgacttttccgagctacggggccacaaaggccgccaaggtgcctgacgactgttttcctcagaagtgctacgaccatttctactttcgctgcccctggttcatgagctgcatggacacgcagagcgccaagcactggactcgcgtgaggacggctgtcttaacggttgtcgatactccggcctttgagtggtttgtgttggtgctgatctttgcgtcaagtatcacgctctgcttcgaggacattaacctggacaagaacaagacgctaaaaagagttctatactggattaacttctccttctgtctgatattcgtcgttgaaatgatcctcaagtggctggccctcggattttccaagtactttaccagcttctggaccatacttgatttcatcatagtgtttgtatcagtattctcgctgcttattgaagagaatgaaaaccttaaggtcctaagatcgctgcgcacattacgagctttgcgcccgctgagagccatctctcggtggcaaggaatgcggattgtagtaaacgctctcatgtatgcaataccatcaattttcaatgttcttttggtttgtttggttttttggttgatcttctcaataatgggtgttcagttctttggtggtaaattttttaagtgcgttaatgagatgggcgagctactgccgattactgaggttaacgacaagtgggactgcatcgaacagaactacacgtggattaactctaagatcactttcgaccacgtggggatgggctatttggcccttctgcaagtggcgaccttcgagggctggatggaggtaatggccgacgcagttgatgctcgtggagtggacctgcaaccgcagcgggaagccaacctatatgcgtatatttattttgttatatttattgtgtgcggatcgttcttcacactgaatctattcattggagttattattgataactttaacatgcttaagaagaagtatgaaggaggagtgttggaaatgtttctcaccgaatctcaaaaacactattacacggctatgaaaaaattgggacgaaagaaaccacagaaagttattaagcgacctataaatcattttttagctatgttttatgatttatccaattcgagaaggttcgagatcgcgatctttgtactgatttttctaaatatgcttacaatgggcatcgagcactacgatcagcctcatgcagtcttcttcattctggaagtgagcaacgcctttttcaccacagtatttggtctagaagccattgtgaaaattgtcggtctgcgctaccactacttcacagtgccatggaacgtgttcgacttccttctggtgctggcctctatcttcgggattctgatggaagacatcatgatagacctgcccattagtccgacgttacttcgggtggtccgcgtcttccgcattgggcgtatattgcggttgatcaaggccgccaaggggatcagaaagttgctattcgctctcgtagtgtccctgcccgccctatttaacatcggagctctgctaggactgatcacctttatctacgcaattctgggcatgtcgctgttcggaaatgtcaagctccaaggtgctctcgatgacatggtgaacttccagaccttcgggcgcagcatgcagttactgttccggttgatgacctcagccgggtggaatgacgtacttgagtccctgatgatacagccgcccgactgcgacccatttatccatgggcacacgaacggaaactgcggtcacccgcttctagccattacctactttacgagctttatcatcatcagctatatgattgtgatcaacatgtacattgccattatcctggaaaacttcaatcaggcgcaccaggaagaggagatcggcatcgtcgaggacgatctggaaatgttttatattcgctggtcaaaatacgatccacatgccacccaatttatacacttctcgcaactgtccgattttattgcctctctcgatccaccattgggcatctcgaagcccaataatgtcgctttagtgtcatttaatctacccatttctaagggtaataaaatacactgtctcgacattttgcacgcgctcgttaagcacgtgctaggtcatgtcgaggagaccgataacttcaaacagttgcaggaacaaatggatgtcaagttcaagaaacagtttccaacgcgcaaagaattggaaattgtttcgtcgacgcggatctggaagcgccaggaaaaggcggccaagaccattcaaacgggctggaaggaatatttgcggtactacatttaccacaacagccccattatctcactctagcattctccggcgaactttctatctgatatttgggagttactaatcctattgtgtctcttcacaggcgc

SEQ ID NO: 18450 - protein, 26 aa, DROSOPHILA
MYGKPLEEIDTFIYEELGQRHRQLAI

SEQ ID NO: 18451 - DNA, 2695 bp, DROSOPHILA
gtccttgcgcatatttcgggaaatatttccaatagtttcataaaattttgatacgttttcgttaatgtttttagcatgactagtattttccgtgttttcggtttcctcagcgcttgatgttttcgtgacatccatattcactttgccagaaaaatgtatattttcaaattttaattattttgaagtatttcgttcattggtgcttgtggacttaaaactcaacgagttttcgataaccaacattttgtacaaaatagccaattccaagcttaaaaataaaaaataacccaactccgtgacaatgtttatttgaacattgccgtgaccaggattcgaacctgggtgtggtaacccacaacgtggggtcctaaccactagacgatcacggctacattggattgcgcccagcaattccaagatcccaccacgtcacctaataaaaaaaaattgcagatgtaattagtaaacactaccccaaatcaaatagaaaatcaaataataagattagcaaaaacatgttttatcatttatttatatatcatttcaatttgtttaataattattttcattttcatcaaaataattagagtgtaaaaaaatacccaactccgtgacaatgtttgtttcaacattgccgtgaccaggattcgaacctgggttaccacggccacaacgtggggtcctaaccactagacgatcacggctacatcgggtgatgcgaggtctatgccaaatgactaattttagcaaagtgcgcagaaaatcatagcaagtaagcaagcaagtcgtaaataaatctgtttaagcaaaacgaattttaaattgtcttgaataatattgaagaggaatgttttttaatatgttgcttcttacaaattgtgtatgtatgtatatatatagatatgtatatttggttgaacctgagtgtgtcgggctaccaaagcagctccgaaatcttttattttatttaatgtttatttactcctaaaacataataattctacgggttttttgccttttcaactcccttggtggggaatttctggcggttactggctggggataaagccgaggaggctaaattggcatttcctcggtcgcgacgctgcttgaggcgctcccggaactgattgcgtagcgtatccatggacgtgttgaggctgaagttcatgtcgggcagctgataggtggccagcaggaagttgcagcgaacccgctcgttggcgatgcgcttgatgagctcctgcatctcatcgctctgaaccaaacttctgatggccacgctcaccttgtcctgggcgaccgtggctttctgctccatcttgcgtttcttaggtgccttggatccaccggctcccagctcgtctgcagcaaccgactcgaactgaaggtcagcacttatgcgtctggcgccatgctggctcttcctggacctgtggcgtccactcttactggatccatcagcagcagcgccagtcgatgtgtttgcttggcccgaggtgcatggatatgctaaatcagggtcaattttttcgaacttggcggttttggcaccgagctcgttgaatgtaatacattttccaccgacacttcccttcgcttttgtctctcctctttcgctcgaatcggattccattctgatggccttaaagctgctcacctcccaatggttgtcttcaagctaatgaaactattatgactttagtcaaccatttaactgacgagtgtttcagttacaaacttaccttaattcaacattaccaggctgtttgcttgggcttattattcatatcgatagaccgattaaacgatagcaaccaaatagtgctgcacaacgaaatagttggctggcgtcatctggtgctcgatgttcgagacgtatgtttcatatacttattataatgcaattattgtattatgagcgaaattttataagctttcgtttttatcaactgattgctttcagtaattaatattaattacttttgtgtgtcgttctgcaacactgtgccttagatttggattctggctgcccgtgcccaacaccctgttgtagccgtgatcgtctagtggttaggaccccacgttgtggccgtggtaacccaggttcgaatcctggtcacggcaatgttgaaataaacattgtcacggagatggggtttctttttaattttttaaaaggggtttctttttaattttttaaaaatgtctatatattttctatagttataaaaacttctcttattcaacgatatagatttaaatttaacgctgcttatttatacataatatatttttatgcaaaggtatactctgaagaaagctaaggatgaatactagaatttttatgatattttgaagtattcgtaggatagatatgttacttaagagacataaatatatttctacacgcatgtatcttaagttttagtgataactcgaattagtgtttcattgaaaatgttgtcaaatttgtataattttacgcatgtgttaaaaattgttggtaatgtaatggtagcttaaaccagtaagtagctcgaaaagtgagaggcattcggcacgcccagtgaaaggcagggctatttctaattaaccaataaagaaaagaaagaaaagaaaacttgttttcttttaaaataaaattacttttgatatacggtcggtgtccaaaattctaaaagaagtgataaat

SEQ ID NO: 18452 - DNA, 695 bp, DROSOPHILA
aatagtttcattagcttgaagacaaccattgggaggtgagcagctttaaggccatcagaatggaatccgattcgagcgaaagaggagagacaaaagcgaagggaagtgtcggtggaaaatgtattacattcaacgagctcggtgccaaaaccgccaagttcgaaaaaattgaccctgatttagcatatccatgcacctcgggccaagcaaacacatcgactggcgctgctgctgatggatccagtaagagtggacgccacaggtccaggaagagccagcatggcgccagacgcataagtgctgaccttcagttcgagtcggttgctgcagacgagctgggagccggtggatccaaggcacctaagaaacgcaagatggagcagaaagccacggtcgcccaggacaaggtgagcgtggccatcagaagtttggttcagagcgatgagatgcaggagctcatcaagcgcatcgccaacgagcgggttcgctgcaacttcctgctggccacctatcagctgcccgacatgaacttcagcctcaacacgtccatggatacgctacgcaatcagttccgggagcgcctcaagcagcgtcgcgaccgaggaaatgccaatttagcctcctcggctttatccccagccagtaaccgccagaaattccccaccaagggagttgaaaaggcaaaaaacccgtag

SEQ ID NO: 18453 - protein, 211 aa, DROSOPHILA
MESDSSERGETKAKGSVGGKCITFNELGAKTAKFEKIDPDLAYPCTSGQANTSTGAAADGSSKSGRHRSRKSQHGARRISADLQFESVAADELGAGGSKAPKKRKMEQKATVAQDKVSVAIRSLVQSDEMQELIKRIANERVRCNFLLATYQLPDMNFSLNTSMDTLRNQFRERLKQRRDRGNANLASSALSPASNRQKFPTKGVEKAKNP

SEQ ID NO: 18454 - DNA, 3459 bp, DROSOPHILA
acgaccacattcgcaagtgccacacgggcgagcgtccatatctttgtctggtgtgtggaaagcgctttctcaccggatccgtcttctatcagcaccgtctgatccatcgcggcgagcggcgctatgagtgcgaggagtgtggtaaacgtttctatcgcgcggacgcgctcaagaatcaccaacgcatccacaccggagagaagccgtacagctgcctcttctgcacgaagacttttcgccagcgcggcgaccgtgacaagcacatccgagctcgacactctcacctggatgccaactcgcgtctcatgatgcagatgcagaagttccaactggagacggccgctgcgcagaaggctcaaagtcataatcccgagcagcaggataatgatgttgctggtggtgccagcacctcagatgtgccctcgggctcgggattcatgtcgactgagccaagcgtcgcggagatgcagtactctattacgccggagcagcaggaggaaatggtgtgtgtgcccattgacgaggtcaataacagtttctttatgtcgcactacatgcaagctgtccccatggaggaggatggttcggggcagcatatcattgtcttcgagcagccaggccagaatatggacatgatgtccatttacgatcagcaacaggttggggaaccaatgcatgagagcggcgtgcccaagcggccggctgaggaaaatgctagggtggtggttgtcaaaaacaatccaactaagccgatattttcggatacctatttgtaaaaatcatattcaaattcgaatttaaataaagcggcaagatagcgaagatgccacacactgttcctttagcgagtgggtctatgaaacagcgttgccatttagttcctcaaacagcggtgctagacgttctataatcgctgcgatcaatcgtggaaaatatcgatactgccacccccaggtccgggtgccatcgctagttccttttcttttcgaatttctcgtggaaaacgccaacatgggtttcgctactctctggtactcgcatccccgcaaatatggccaaggctcccgatgctggtaagaattgtgttgcccgttgtttttcgcacgttttggtgtacaatttgtttaaatgcttgtcccgtaaccccgtattttgcacgatttttgcttgtttgtagaaagtggggttatacccgacccgctttttttttaacgcatggcgtctaccaatttgtatttgcttgtattgtcaattgtttcaatgttccaaaggcttttgcccccggttgagtacggaaatacgtgtttagcatctagaacagtttccttaattaagggtggccaaagtaagagctgcgcgaggcaaaacgagccatttccgaatggatttggttcagccaagtgcagcgacagctttgcttttaatgaaactgttccatgctacggagattctttgatggaaccgatctaactatgatataccatctcattttcagccgtgcctgctctaaccgccacggtctgatccgcaagtatggccttaacatctgccgccagtgcttcagggagtacgccaacgacattggcttcaagaaggtgagtcctccatatgaaatcctcaacgaactgataactaatatcattcgttttttagctggactaaatgtgtcctcttcgcattttaacgcggtaatcgcgtatattaatgcatattaatgtatggagtcgtcggatgtcggggactcggtaaattagtatgccggcagcaacagcaacaacaataatcatttggggatttaagcaaggacaaagcgcatcgaagcattgattcaatatagccagaatggccaacagcaacaccacaaaatgccaacagttaccaccttccgcgaaggatctttgttaaagcactagttttgtttaaatctccgcctgattaaacccataacaagaaacgtatttaattgtgtcataatttgagcctgtatctagcgggctatcttagtgggcatcctcgcatttgtgttgatggctgccggaaaagtgtacatttccttgtttttgaactgcagtgcgatcagtcagccagcaacccatccagtctgtgtcacctaataaccgctaccaaaacaaaagcaaaccggttttcagagatggaaatcaccaggtcatctcattcctaaacttcatctctcttagcattcaaaacctcattgttgtgtgtttcaccagttgcataaaggcttttgatgcggactttgatgtgatatgcaaaactggcaggccactgaacccattttttatatgcgttgaatttgtagaaaatatttgcacttaatcatatatagctggctaagttaccactcatatgtgaattcaaaagcagtttcgaacatagatatgtacaaaatacaaaatgagattataaattattactcatgattttacaaaatgactaaagctcagttattttatatttgataaacttaaatgaataaccataagtaataggtctcagtttttcttcgagtgaagaaagctctatcaaacttccaatctccttgtcgacaacgaaattccgtgtgtaagccagcctgattcccacgcgaatgtgtcagtcaatgaacgtttattcacctccttaattgtgatggtgtccttttcgaaagccggaagcaatctcctggctgttggcctgcatttcctcatttctacgctagtgggttagtggtatccacacggagacccattgcaatgatagcccattgctccgagagccgggccagagtcaaaaaccagtttgagccgctaaagagcgggtcagcccccgcttaagctctcttagctgtttttttctgctggctccgctgccgaaaatcaagctagcaattttgcacattcgccaattgggctgggagtctgaagcggtcgcttggtgtctaaacaacgtagtcgcgcttgcctaaccaagatgtgtgattagtagtgagtgtgtgatataaactgtagtgattccaacgaaaggtcagtggctcatcgaccactcaagtgatccccactcgcaatgagattgatctggctgcagctcctggctgctggggttgctctctatctggcaaacggttgtgcaacggccgccaaggcatccacaagccgcggagttgcacaatacaagctcccgctccctgctccattgccagaccacgaatctgtcgcggtttcaggcgcggatcaggctaggcgacagcagcagcagcagcagaagggagcatccaaccagcgaaggcgcactcaggtcgtgcggcggcgcaggccctcctctacaacaactacttcatccacctcaaccacaacgacaaccacatcgacaacaactacaacgacgacaacaacaagtgagtgcccagataattttggttgtccaataataaactggacaagctatagttatgttggctac

SEQ ID NO: 18455 - DNA, 979 bp, DROSOPHILA
aaaacgccaacatgggtttcgctactctctggtactcgcatccccgcaaatatggccaaggctcccgatgctgccgtgcctgctctaaccgccacggtctgatccgcaagtatggccttaacatctgccgccagtgcttcagggagtacgccaacgacattggcttcaagaagctggactaaatgtgtcctcttcgcattttaacgcggtaatcgcgtatattaatgcatattaatgtatggagtcgtcggatgtcggggactcggtaaattagtatgccggcagcaacagcaacaacaataatcatttggggatttaagcaaggacaaagcgcatcgaagcattgattcaatatagccagaatggccaacagcaacaccacaaaatgccaacagttaccaccttccgcgaaggatctttgttaaagcactagttttgtttaaatctccgcctgattaaacccataacaagaaacgtatttaattgtgtcataatttgagcctgtatctagcgggctatcttagtgggcatcctcgcatttgtgttgatggctgccggaaaagtgtacatttccttgtttttgaactgcagtgcgatcagtcagccagcaacccatccagtctgtgtcacctaataaccgctaccaaaacaaaagcaaaccggttttcagagatggaaatcaccaggtcatctcattcctaaacttcatctctcttagcattcaaaacctcattgttgtgtgtttcaccagttgcataaaggcttttgatgcggactttgatgtgatatgcaaaactggcaggccactgaacccattttttatatgcgttgaatttgtagaaaatatttgcacttaatcatatatagctggctaagttaccactcatatgtgaattcaaaagcagtttcgaacatagatatgtacaaaatacaaaatgagattataaattattactcatgattttacaaaatgactaaa

SEQ ID NO: 18456 - protein, 56 aa, DROSOPHILA
MGFATLWYSHPRKYGQGSRCCRACSNRHGLIRKYGLNICRQCFREYANDIGFKKLD

SEQ ID NO: 18457 - DNA, 5322 bp, DROSOPHILA
cagcccaggcaaacgggtgcggagatctgtgctggtccccggaccagaggcgcctccttcaggactatctcgtatggtttaatggtgcgggtggccaccagatgccggcccagctgctcattgtgggcgatctgtaagagggttgaggttatgttgggccctttcgtttggatatcagtaccgcagtaccttgaatggatgacagcttggcttgtgcactttccagtcctgcttctggtgctggacactgcagtaggagacctggttacagttggagcacttgttcttcgtcggctcctcgcacacatggcagggattcatggtggcacggcagatgtacaatccaaaaagagatggttttcagtcggcgagaatctcgtccgcactctcattcagttgcgcgatgtgcatccacctccgcacgccacactcaattcctataaactgggccagctgatgaacagagcacacacatcacatctgctgccgtgctctacgctcggtcctcttataactatttatagaccaccgctcttgagtggaccaatgctgtgcgaggcgggccaccctaaccgtaatgaaattaaaacgctgattgattttcttctgtttgtttttgtatctgggccacactgaaggcctagatgcacacagaagcggcagcttggccaagatttctacgatttattcactatcgttacaccaattaaagcactctcatactatatacaaaatcaccattggccagtagttggtatcagattactggtaaggcgccgggatagcaatacgattaatttataaatacagtttttacatagtttatatagcctccaccccaacaaaacactgaggtataaaactactgacgtttacgcttacgcctgaacttggattttggcctgcgtttaggcgccgctgttttgtgactctggccagggacactaacttctccatctcccgatcctcctcctcctccacgatcctcagacgccgtcgatcaaatatcagtctcgtcactcggcccattggcctcgcgcagggtcacgaacttttgaagcgtgacgttctccttggtggcagcagtgctgccgctttttgaactattccgcaattttcccttgtcacgtgacttctcgtgcacaccgttcacctggaaattgtcgctttggaatggtatcgaaatgggtaagctgtattcgctcggaaatgcaacagttcggtcgttgtccttatccttctcatctttctcagacactacgggttcggcattgctgtgggcattgtagtttcctacaaataaaataaaaaataaattaacattgcaattccaataaaggtagagttgtgttaaggaaataatcatcaatccaattcccacctttagctccaaacatctcggcgtactgcttgaacgcactgcgattgcgcttgcctctattacgcatattcaaacgcagggcggacaccttcattttggacctgctgcgcttggactttgaactacttggtcgcaggtccgactccgtctccatcggctgacgcgtgccggttaggcttggactggggctggtactgggacttggactcggggtattgcgaatacccaaattgctttcggtgtcggaatgattgtgctgatagctggctgccgcaatctcctcgtcttctccttccccttccagatcctgatcctcatcatcgtcgcactcatcatcttgatcgatgatttctatttcctcggcatcgtcctcatctgacagggcctgtcgaagtataatttccggaccaccaccatagatgttatgcaggaatcgccacaagcgcgcattcagttgggcataatccgagcccaaacgcacgcagctcacagtcgcacttccattttccgtgggagcagcgatgccctcgttggtaatcggtcccggatccttgtgggtttttccgcgcgaaaactgctgccatgagcgcagccatggcattgcgattgcataaatggccgtcgaatcaaattcgttctgcagcccattgtattttgtgaactcgttcagttcatattgttgacgacgggaaagggtctctgctgcccgcttgcagatctcgcactcgaatattatattcactgctggtccgccaccgaaagtccggtagagatagtcccatagcggctgagagattggcaccgcaatctggctgattacgtccgccttggaatgcaaaatcccaccatgggggcacaacatctcctggttgtttataggtcctggttctgaaaaggtggccaatcttgagagccattcgcgggttatatagaactgaatgtccgaatcacacaggggatgggaagtcgacaaagtcatcgcctcatccctgactagcttcatctggggattgtgtttgtggtaaaagagaacatacgcctggcaggactgcaccagctccgaagaaacctccgtcacaaactgatcatcgaactcataccactttccgttgagcgtattgcgtgcgaagcaagtataatggccaccacccactgttccatgatggcaaatcaccgacgacaggttgtaaatggccacctcgctcttgcaatccttgtgaatgtacggccgcatgtcgaagccctccagcggaaagtaaacgtccgaggagatttttgaactataagaaagatcgttgcgaaaccgcttcaggtggatacacaaaacctctggcaaggtgaggacgcgggagtactttattcccgtccgaagtttgttgcagcgctcgcagctgaaaagtacatacactgattgattgaaacgcctatatatcctaaaggatcttctcacctgtacatgttgtctcccttcaactcatccgcgctgaaaaaactggccatgcagtcgtagagcgtcaccgagggtccgtaaatccaggagcgcagcatattccacatccaggacagccagccttcgttggtcctagcggaagtttcagcggcattcaaactttgcacgcttaagctatgggtttgatgaagaacgttcagaaaatcacgattgggaatgggcagcgagagatcctggaatgtttcctcgcgtgtggacacacgatcgcaggtcaggcactgcaccgaggacaaaagcttgccatcgaacacgtcgctgattattgagcgcgctgcttctataggtttctgttcggcggaggaggcatttttttgctgatgctgcaacggtgcctgctgcaattgcaccgaatggccttctggcagcccactgttggaaccatttgtccgacagggcgttacaaagtactctgtctttagcaacacctctgccgatcgctccgacatgctgctttcacaggtgtcgtattcgctttcggatgcatgtgacaaggacgcaggcgctgcctcatcatcgttttcgtcatccgtttcgctgggctgctgctgctgaagtgactggtattgcggctgattctgcgtctgcggcagcattgagacctgctctgtcagctcctcgtgcagctggtccatgaagcaccgcaagaactcctgggtatcgtgttgctgatagccccgaaacatgggatgaaccgtgcgaatgccatacagaataccacgcggggcaataaactctgtaaaatctcaaactttagtaggttttccgattaagagagggtgaaaggctgaacctttgggatcatcgacatcctgccagatttcctgcatcaagcgacgataactcttggccagcccgccgggcttgcagcgacgtgcgctctgctctgctatgtactccacaaggtcgctgcagttgataaagtagtgtgtcatcggcggcaaattactcagtgcctgtagtgccgagttcatatagcaggtattcgcaatgttctgcaggcccacgagtcccgtgcccgagccctttgctgtgtctgtgccctcactgtcactggcgttcgagtcctcgcgccgtgcaagcgattttagcgatccgctgaagagtttgtcgtgacatcggctgctccttggatcacccatggcatacccgttcgccagctgaccgagaaaaaatcgaaagtcatgtaatcgagcattaaacaatgcctacaaatgcgacagttcgcctggagcggaattctcccccacaccttaccgtgtggccctggctgctgtgtatggtgcggttgcggtgctctacatatggattgtgcggatttgggttggaactcaaactcattatagttccctagctgccagtattttgttttttttttatattttaattgagaattttgattggaaacgaccgcagaaaaggcgtttgcgatttcggatggtgtttttggtattgtccgtcagtgtgaccgaagcaaaaaaccgggagtcaagcggatattattcgtctaatatttagatgatttagaacgcgtatgagtatcgacttagaataaattttaaaatttagaccaaaccaattaaaatttataagtataaataatttaaacatacatcataattttttccaatacgatacttctggttaagagcatcgctggcgtgccatccccactgtaagaccttcggccacacttatttgaaactcgggaaaaaaaaacgcagaaaatagtcgaaaatgtgtatacaaaaagtgtaactaagcgttttcatgagtgataagggccaagagtttactgctagacgttcgagcggccagtgacaggcctggtttagtcgtacccaaaccggaatgggtgatgcctcatagttttttctgcatctgctggcggagattcgactaccccctccgctgtacaaggtaaaacggccctgcctttccgcattcccttgtgtaacagccctgcttttgcgatgctcctgttgggaatcgaatgtaaaaaggactcattcaaatgaatcattaattgggagcaggcgatgagtgtgcaagtgcccctgtgggatgggctactgctcagcgtcattcaggccgctagctattacatcaataagttcatgaagcagtattttgccagcgaaacatcccgtgtacgaaataatagaactctataattatagttttagctaatcgcggatagttgtgcctggccaacacgcaggccgttggaagagtgccaaggagccatcatgacgctggagacgcagcccgttggcggggtgagcgacggcaagatcgctggtctttatgatctggaggagacactgggatccggacactttgccgtcgtgaagttggcccggcatgtgttcaccggtgccaaggtggcggtcaaggtagtggacaaaaccaagttggacgatgtgtccaaggc

SEQ ID NO: 18458 - DNA, 2937 bp, DROSOPHILA
aaatcgcaaacgccttttctgcggtcgtttccaatcaaaattctcaattaaaatataaaaaaaaaacaaaatactggcagctagggaactataatgagtttgagttccaacccaaatccgcacaatccatatgtagagcaccgcaaccgcaccatacacagcagccagggccacacgctggcgaacgggtatgccatgggtgatccaaggagcagccgatgtcacgacaaactcttcagcggatcgctaaaatcgcttgcacggcgcgaggactcgaacgccagtgacagtgagggcacagacacagcaaagggctcgggcacgggactcgtgggcctgcagaacattgcgaatacctgctatatgaactcggcactacaggcactgagtaatttgccgccgatgacacactactttatcaactgcagcgaccttgtggagtacatagcagagcagagcgcacgtcgctgcaagcccggcgggctggccaagagttatcgtcgcttgatgcaggaaatctggcaggatgtcgatgatcccaaagagtttattgccccgcgtggtattctgtatggcattcgcacggttcatcccatgtttcggggctatcagcaacacgatacccaggagttcttgcggtgcttcatggaccagctgcacgaggagctgacagagcaggtctcaatgctgccgcagacgcagaatcagccgcaataccagtcacttcagcagcagcagcccagcgaaacggatgacgaaaacgatgatgaggcagcgcctgcgtccttgtcacatgcatccgaaagcgaatacgacacctgtgaaagcagcatgtcggagcgatcggcagaggtgttgctaaagacagagtactttgtaacgccctgtcggacaaatggttccaacagtgggctgccagaaggccattcggtgcaattgcagcaggcaccgttgcagcatcagcaaaaaaatgcctcctccgccgaacagaaacctatagaagcagcgcgctcaataatcagcgacgtgttcgatggcaagcttttgtcctcggtgcagtgcctgacctgcgatcgtgtcttaagcgtgcaaagtttgaatgccgctgaaacttccgctaggaccaacgaaggctggctgtcctggatgtggaatatgctgcgctcctggatttacggaccctcggtgacgctctacgactgcatggccagttttttcagcgcggatgagttgaagggagacaacatgtacagctgcgagcgctgcaacaaacttcggacgggaataaagtactcccgcgtcctcaccttgccagaggttttgtgtatccacctgaagcggtttcgcaacgatctttcttatagttcaaaaatctcctcggacgtttactttccgctggagggcttcgacatgcggccgtacattcacaaggattgcaagagcgaggtggccatttacaacctgtcgtcggtgatttgccatcatggaacagtgggtggtggccattatacttgcttcgcacgcaatacgctcaacggaaagtggtatgagttcgatgatcagtttgtgacggaggtttcttcggagctggtgcagtcctgccaggcgtatgttctcttttaccacaaacacaatccccagatgaagctagtcagggatgaggcgatgactttgtcgacttcccatcccctgtgtgattcggacattcagttctatataacccgcgaatggctctcaagattggccaccttttcagaaccaggacctataaacaaccaggagatgttgtgcccccatggtgggattttgcattccaaggcggacgtaatcagccagattgcggtgccaatctctcagccgctatgggactatctctaccggactttcggtggcggaccagcagtgaatataatattcgagtgcgagatctgcaagcgggcagcagagaccctttcccgtcgtcaacaatatgaactgaacgagttcacaaaatacaatgggctgcagaacgaatttgattcgacggccatttatgcaatcgcaatgccatggctgcgctcatggcagcagttttcgcgcggaaaaacccacaaggatccgggaccgattaccaacgagggcatcgctgctcccacggaaaatggaagtgcgactgtgagctgcgtgcgtttgggctcggattatgcccaactgaatgcgcgcttgtggcgattcctgcataacatctatggtggtggtccggaaattatacttcgacaggccctgtcagatgaggacgatgccgaggaaatagaaatcatcgatcaagatgatgagtgcgacgatgatgaggatcaggatctggaaggggaaggagaagacgaggagattgcggcagccagctatcagcacaatcattccgacaccgaaagcaatttgggtattcgcaataccccgagtccaagtcccagtaccagccccagtccaagcctaaccggcacgcgtcagccgatggagacggagtcggacctgcgaccaagtagttcaaagtccaagcgcagcaggtccaaaatgaaggtgtccgccctgcgtttgaatatgcgtaatagaggcaagcgcaatcgcagtgcgttcaagcagtacgccgagatgtttggagctaaaggaaactacaatgcccacagcaatgccgaacccgtagtgtctgagaaagatgagaaggataaggacaacgaccgaactgttgcatttccgagcgaatacagcttacccatttcgataccattccaaagcgacaatttccaggtgaacggtgtgcacgagaagtcacgtgacaagggaaaattgcggaatagttcaaaaagcggcagcactgctgccaccaaggagaacgtcacgcttcaaaagttcgtgaccctgcgcgaggccaatgggccgagtgacgagactgatatttga

SEQ ID NO: 18459 - protein, 857 aa, DROSOPHILA
MNSALQALSNLPPMTHYFINCSDLVEYIAEQSARRCKPGGLAKSYRRLMQEIWQDVDDPKEFIAPRGILYGIRTVHPMFRGYQQHDTQEFLRCFMDQLHEELTEQVSMLPQTQNQPQYQSLQQQQPSETDDENDDEAAPASLSHASESEYDTCESSMSERSAEVLLKTEYFVTPCRTNGSNSGLPEGHSVQLQQAPLQHQQKNASSAEQKPIEAARSIISDVFDGKLLSSVQCLTCDRVLSVQSLNAAETSARTNEGWLSWMWNMLRSWIYGPSVTLYDCMASFFSADELKGDNMYSCERCNKLRTGIKYSRVLTLPEVLCIHLKRFRNDLSYSSKISSDVYFPLEGFDMRPYIHKDCKSEVAIYNLSSVICHHGTVGGGHYTCFARNTLNGKWYEFDDQFVTEVSSELVQSCQAYVLFYHKHNPQMKLVRDEAMTLSTSHPLCDSDIQFYITREWLSRLATFSEPGPINNQEMLCPHGGILHSKADVISQIAVPISQPLWDYLYRTFGGGPAVNIIFECEICKRAAETLSRRQQYELNEFTKYNGLQNEFDSTAIYAIAMPWLRSWQQFSRGKTHKDPGPITNEGIAAPTENGSATVSCVRLGSDYAQLNARLWRFLHNIYGGGPEIILRQALSDEDDAEEIEIIDQDDECDDDEDQDLEGEGEDEEIAAASYQHNHSDTESNLGIRNTPSPSPSTSPSPSLTGTRQPMETESDLRPSSSKSKRSRSKMKVSALRLNMRNRGKRNRSAFKQYAEMFGAKGNYNAHSNAEPVVSEKDEKDKDNDRTVAFPSEYSLPISIPFQSDNFQVNGVHEKSRDKGKLRNSSKSGSTAATKENVTLQKFVTLREANGPSDETDI

SEQ ID NO: 18460 - DNA, 3411 bp, DROSOPHILA
tgcacagtgcaagcacggatctcccaagtacgatcatctggtgcgcaaacgaaatgagctgagggaggagttgcaaagcctgctgggcgataatggtgtgctgatctatcccacgcatcccacggtggctccataccacaatgagcccattacgcgacccattaactttgcctacactggtattgtcaatgtgctgggcttcccggccaccgctgtgccgctgggcaagctgggcagcgagggtctgccactgggtgtccaaatcatcgccaacttcaatcaggatcgactttgtttggccgttgccgaggaattggagcgagcctttggcggttgggccaagcccgaagttcggctctaggagcagtctcaaacgtgcaagtatgcagcttagctagcttttagatagtagtggtcaggttaacgtcctggtctccccccacccattactaactacccctacccacccgagcattcgcctggcgatgaaaggtattccttgtgtactccagtgcctcattgtaatatcaattttcgatgtggatttatctattttgtatgtgtttttaaatgtaatctaatcatagatccgcgcggatccgttcccgttttgcatttataataaataattgcaaccaactgatatctttgttttcattaattggcgacaggcgcccattgaccaaacaagcagagaagtcagaattctgaattcgaagccaacgcgttttgtggctaaacaaatctttattttgaaagaccaaccttaaaaatatgccgactcaccgcctcaattgcttttagtttgcttttgttttttaaacattttcattcggcaaggaaaactaaacccactacaactagcgatatcatggatatcgtattcacatatgtaattccgatgctcctctcattcttcggcaacgagttacattcgtaatttggtcacttaaaaactactcggctgtgggcggttcggcagggcaatcctcgctagcctctagcccttgccgcccagcgacaggatgagtttcagtagctcggtgcgcttcgccttcacggtgtcgatgtgcagcgacggcagtccgtcgatcacctcgtatctgtttaggtaatcggcaatgtggtcggtcatgcagataacatggatgccacagtcgtagccgttcgcctgctgtaggcagcgcatgggccggaatttggccattcggacgccaagcaggtccttgatcttgttcatcagctccagggagttgcccgtgttgttgttcccatacgaatcgaagtgatagaaggtcttctccggacgcgagaagaccaacagtgaccagtggctgccaccagcatcggtggtttcgttgtcgttcagcgcgaagaagataaagggcttgccagtggtgttgctctggtcgagaagctgcttcagctcctggtcgcccatgtacttcatacactgcgtaatctccggcgcaatgaagtgcagatccgcattggtcttgtacttcatgtgggccaggtattcgtagtagaagctcaggatctggtcgttcagccagtgcgggccgtggagcaactggacgtcggacatccgcaggcaggagtcgtggaaggtcagcgagatggggtctgccttggagttgctgcccattttggtatggaagctattgttggtgaatctggggcgccggcgattcgtattctggttctggcgtgtatgttgcctggaatgaaaataaatggcaaaaaattgatttaaatcatgttgttgcgactagattcgtgttgttccagctggcgactatcacctaagtattttcctatcgtggggcaacattttcactaacaatcttcgcgaaaattcggctaaaagaataaaatttttccggcgactaatacaactccagggtttcaaagtcaacgcaggaatgacgttttcggtttccttttgcttttgctttccctttcgtttgccggccggtactgttgttattgttgtggtttcaaagcaatcagaaatcagtcatgccaagcgcattttaagaacactataatcgtattttaaaccaaaataaacatatcgaaattaactaatcttcgtacaaagctgttttgttattgtctttgacaacgaatgggcgtagcaaaacaaaatagaggacactgaggaggtgaaggtggtggtcagatccccacatatatattttttactcaccacgaaaaatggctactcctcctcctcgaagtcgcgacctcgctttttgtccgttctttggacactcctcgcgtattaccatttatttggctgtttgggagcaaataacttgaatttaccaactgatattttcactaatataaaaagttacacaacactctgaatagtttttccgcttttccgctcaaataataagtcgccgtactgtatatcttactttctggcttgggctgccagactgctcgctaaataggtggcagtgcagactgtgaaatgcagtgttgcctaatgtggcaaagttataaaaagtaatttaaatatgtataatttaattacaaatattttttattccttttaaaaagttttttgaatttattaagttcacatttttaacatttcttgcaatctgattttttttttttttgaatttattaagttcacatttttaacatttcttgcaatctgaattttttttttttgaatttattaagttcacatttttaacatttcttgcaatctggcttataattttcagggcaaacttgcttttcgggtatgttgaaactcgcagtggtattaaaattagtttggcatttagtttccgaagaagtctcgctggattctggaaacggggcacatccttcgtcaggattccacgtaccccctcgcaactgctcttccaaccacttaagttgcttgtttatctagaaaattacaattcttttaagcgttttttttttcatttatgtaaatatgcaaacaaaaattattgccttttctaccatctcctcgtctctttcgcttccaaataaattggctgtaaattggtagatattcgatggctttgccttaaccgcctcggctgtaatgacccgaattatggctcggatctctggatggcgttgtagatatgtccaatcgtccttgcgcatatttcgggaaatatttccaatagtttcataaaattttgatacgttttcgttaatgtttttagcatgactagtattttccgtgttttcggtttcctcagcgcttgatgttttcgtgacatccatattcactttgccagaaaaatgtatattttcaaattttaattattttgaagtatttcgttcattggtgcttgtggacttaaaactcaacgagttttcgataaccaacattttgtacaaaatagccaattccaagcttaaaaataa

SEQ ID NO: 18461 - DNA, 920 bp, DROSOPHILA
cgacttattatttgagcggaaaagcggaaaaactattcagagtgttgtgtaactttttatattagtgaaaatatcagttggtaaattcaagttatttgctcccaaacagccaaataaatggtaatacgcgaggagtgtccaaagaacggacaaaaagcgaggtcgcgacttcgaggaggaggagtagccatttttcgtggcaacatacacgccagaaccagaatacgaatcgccggcgccccagattcaccaacaatagcttccataccaaaatgggcagcaactccaaggcagaccccatctcgctgaccttccacgactcctgcctgcggatgtccgacgtccagttgctccacggcccgcactggctgaacgaccagatcctgagcttctactacgaatacctggcccacatgaagtacaagaccaatgcggatctgcacttcattgcgccggagattacgcagtgtatgaagtacatgggcgaccaggagctgaagcagcttctcgaccagagcaacaccactggcaagccctttatcttcttcgcgctgaacgacaacgaaaccaccgatgctggtggcagccactggtcactgttggtcttctcgcgtccggagaagaccttctatcacttcgattcgtatgggaacaacaacacgggcaactccctggagctgatgaacaagatcaaggacctgcttggcgtccgaatggccaaattccggcccatgcgctgcctacagcaggcgaacggctacgactgtggcatccatgttatctgcatgaccgaccacattgccgattacctaaacagatacgaggtgatcgacggactgccgtcgctgcacatcgacaccgtgaaggcgaagcgcaccgagctactgaaactcatcctgtcgctgggcggcaagggctag

SEQ ID NO: 18462 - protein, 215 aa, DROSOPHILA
MGSNSKADPISLTFHDSCLRMSDVQLLHGPHWLNDQILSFYYEYLAHMKYKTNADLHFIAPEITQCMKYMGDQELKQLLDQSNTTGKPFIFFALNDNETTDAGGSHWSLLVFSRPEKTFYHFDSYGNNNTGNSLELMNKIKDLLGVRMAKFRPMRCLQQANGYDCGIHVICMTDHIADYLNRYEVIDGLPSLHIDTVKAKRTELLKLILSLGGKG

SEQ ID NO: 18463 - DNA, 2405 bp, DROSOPHILA
acccgaaaggatatgcacgaaagtcgcacttgtcgcccactcctcgtccaggtctacgaacaaattcgtcaactacaaaaagaagttaccccggatctggacatgtatctaaagatcatcaatagcttgaacgaaggggacacaatcttcacgttggcggatgcaggtgctttgcgcggcaagattggacaagtggcagaggccatggacatgaggagcaagcgcattctagccatattttgtgaaccaggcagccgggaggaggcattaaagaaggccattcggttgggctgcatccaagccatcaaggagcgaatgttatcgctgcccccactgccagaggaatcgcacatacgccagatgcaggagcgtagacgcatggaaacggagcagcgtatcctcaccgaacagcgcatggccatggaagcctacgaacgaaataacatggcagctaaccaatccaacgttggagttcctggtccggaaagcggatcctttgcccaaggggtatgtagacgaggactctctgcaaagatcaatatgtaacctctgtgattccatttgcttcacagtctgatcttcaatctctgaacaactggtcagcaccgcaggcggctagcaagtccagcctggacgatccgctgatcgagcagataaacatcattaagggctacatcaaacaggctcgccaggacatgaactttgaggtggtggagacgctggagctaaatcttcgcgagctacagcgcgaagtgtacgagcgacagcgccagtcccagggaagcaccgccgcctcacccacagaggcctaagcagtatcctacatagttaaatgtatattcattccctctatgacaaattacatggcttacgttacgttacgaatttgtggtgtatattgtgcgaaaaattttagtttgtgcgaagtttctgtaaatcaaagtttgtgcgtttgacgacaactgagactataaaatgcaacatcctatttcgattgagtctatgacttcaggccaacggcagcgatcagtgccttgaccttggtaatgtaggcggcctgggcgtcggtattgctcattcccttgcggttgttccacgcctcccacttggccttgcccttgaagtccagaaagccgggcttatctgcattggattagaattatcgatggtgcagcggagtgacgactatgtccgagacccacctgtattgcaatcccccacagtggcctgtttgtacaagctgtagagctccaaaaggtcattgtccccgggtgtggtgtttaggttcttaacatcttcggccgcctggttgaattcctgtttaggttaagtttgaataggtaatcagactttaagatacgaatgcgtatttgacgtagattcagttcacctgcaattcggacatttttgtatctattttttaactagtggaagtctttggaaaagaaattgcacgattttacttcaccgaatctatcggcgtctatcgatatctggtctatacttttgtgtgaccaacagtttttcaatttagagtggacaagctgttgcgttttatttcgcgggtctggcagcctatacacttaaaagattcgaagtctaatttcatattgagaactgagatacattattacgatgatagttaggaacatgtgtaacagttggtagacagtttcttgccaaaacaattgtgttttgaaaaaagctatggaataatatgaacaatatccaaaatagtccgttaagattttcaagacattaacgaaatattttaaaaaccttccaatgttgattgtctcaattgaacatctttcagcccactgtcctgctctctccaaatgtggcaacaaaaatgagaggcttatggcgcgtgaaacatgatttctattagtaacatatggagtaatgatgtgctgtacgtcaacgttttgaacagttgtacatagtaattaaaatgtatcaatattaagaggaaatttaatatataactacttcttaaatacacaaaatacaattgatttctagcatatgtggccatattagacatcatcaatacatgaatttaactcatttcatgatatgacacccgcataaacgcattgtgagagcgggagagcgtgggtatttaaggagaaggtagcgctaaccactcattcagttcgaaatgttttcatctgcgttggtcgtgcgtccggtgctccgctaaaagtaacaaaaagtgcacaaattgccgggagaaaatgttacattaacgatattttcggttaatgctgagcacacggatacggatactacgctatatacgcagttcgcaaccaaaatcgatgcaatacgcggatttgggcaaacacaacgcagtgcctgtaaaaatcgaagccgaaacgaaacaataacaaatgcgctaa

SEQ ID NO: 18464 - DNA, 273 bp, DROSOPHILA
atgtccgaattgcaggaattcaaccaggcggccgaagatgttaagaacctaaacaccacacccggggacaatgaccttttggagctctacagcttgtacaaacaggccactgtgggggattgcaatacagataagcccggctttctggacttcaagggcaaggccaagtgggaggcgtggaacaaccgcaagggaatgagcaataccgacgcccaggccgcctacattaccaaggtcaaggcactgatcgctgccgttggcctgaagtcatag

SEQ ID NO: 18465 - protein, 90 aa, DROSOPHILA
MSELQEFNQAAEDVKNLNTTPGDNDLLELYSLYKQATVGDCNTDKPGFLDFKGKAKWEAWNNRKGMSNTDAQAAYITKVKALIAAVGLKS

SEQ ID NO: 18466 - DNA, 2764 bp, DROSOPHILA
ttcgttctgtcatattccaatgtaagtgactatttattatactgcaaccatatttatttcttgacattgccagcccgtactggaaagtaatgaaagtgaatttctttctggtctttctattaagtacaaagagctaaaaatacattaaatggttttgtgacaggttaaataacaagtgggtaacagtccctggaaaccgaaaccaagcgttgataatatgattttttgagtttcgagttgaggataaagtgtaaataggcatggctaatgtacgaactataaaagccaggaaagatagctaatttatgttcttgcacacaaaactatcattatgaaagtattcctgttgttcattttcatctctgctatctggctccaagcattttgtatggtaagcaatcgcaataatgttgaaattccattctttgaaatgtccaagttttagaaatcttctgaaaaaataaaagcctgcttgaaacggcagctggggtatacaattacagaaaatacaaaatttgatgctaaagaagactctcttcaaagcaagtgtttttatcactgcttactggaagtgaaaggtgttattgcaaatgatgcgatcagttcggagcaaccgaggaaagtacttgaaaaaaagtatggcattactgacacagatgaattggaaaaggctgaagaaaagtgtcattccatcaaggcttcaggaaaatgtgaattgggctacgaaatcttgaaatgctatcagtccattaccaagcattagacttctaaacatgctattatgtacctggtgttcggataaacattcaacttatgcacatcacactttaaaacgttaatttttgagaaacttcaccaatgtacataataaagtgtaaaaccgaaaactaactaaatataaaatgttatttctggatcaagaagcctttgaatttatggaactctatgccaaatgtgattttaccgtaatattttcagtagtaaaaaggctctagtcgtcatcacactgtagtcccaaaaattttcggatcaaaattttcttgatatttatctaggctaaaatttaagttatccgtaagctttattatgtccagctatagaagattattccgggcaaagcgcctaatgaatttgatgaaggctaatcgcggaatgaccagtactggcaagcaaccgattttcgatgtggagactagaaaagactttgagcaacgtgtgatcaatagcgatcggccggtggttgtggactttcatgccaggtgagcttagccttcagttaaatagaaccatgttaagacattgttccgccttcctgatcagctggtgctgtccatgcaaggctctggcccctcgactggagaacgttgtgtccgagcaggaaggtcgagtgagattggcccgggtcgatattgatgagcatggggaactggcccttgactacaacgtggggtccgttccttcactggtggtcatcagcaacggcaaggtggtaaatcgaatggttggcctgcagaccagcgaatacctacgcaagtggctccataaggcggtgccacacccaccacctgaggatacggaaaactagatcagcatgtcactaggggagtcttattaaaccacgttctcagcaacacgtttttaattaattttcgatttaacaagtttcttaggtgcatacactcaaagaaataaggaaccaagtatgtagattataactatataccatattttgggaagaacttgtactatttaaatttcgaatataaagaaaagtaaaacttaaaaattgtttaaagaataaatgtttagatgcccaggggctttttgggaattgcgctcagtgtactactgttcaaatagctccaactctgggcgcccagtggcggcaattcaaaatgcaaacaaagtctcgtctcgtgttcaaacaatttgcggatcggtgatgggaggagaagcacactggcaggaacaaatacaaaacgtatatcaattgtttgtatatttgtttgccaaaaacaacaagcttactcgctctccgtgtgtctgtatacttttgttgtgtatatccatgctgtctaggcgatgtgaatgcatgggggaatgtctctaattgattttggtaatgttgctttttaatgaagtgtcacaaatgtgctgcttgcgatgatgcatgtggtgtcgagcagcatttagctcccttaggaacccaaaagaaacacaattaatgccgtctactgtcggtggtaaattaattatagacgcaaaatattgtaacattgctacatggggaaagtaagatataaacgattccacaggctttaaaatctaaagctttgtatagtattcaatcaatatgaataacatattgtaaaaagaagttatagataacataacatctttaaataaacaccgatttcaagagctagaaaacgaacctcgccctgtaaatgaataacgaaaagctttatcgtcagcaaggcccattagctcagttggttagagcgtcgtgctaataacgcgaaggtcgcgggttcgatcccctcatgggccatgttttttttttatgttgtgtattatattataaatatttcagttttcaaacgaaatcacatgccacaattaaaatcgttcagtaaaagtgccgggtatgtagagtacgcagtaaagtttgtttgtgctggactgccggatccacaaaatagatttgccgcaatgtaattgagtatttgtattcaattaagacttatttcaatatttgcataaa

SEQ ID NO: 18467 - DNA, 703 bp, DROSOPHILA
atcacactgtagtcccaaaaattttcggatcaaaattttcttgatatttatctaggctaaaatttaagttatccgtaagctttattatgtccagctatagaagattattccgggcaaagcgcctaatgaatttgatgaaggctaatcgcggaatgaccagtactggcaagcaaccgattttcgatgtggagactagaaaagactttgagcaacgtgtgatcaatagcgatcggccggtggttgtggactttcatgccagctggtgctgtccatgcaaggctctggcccctcgactggagaacgttgtgtccgagcaggaaggtcgagtgagattggcccgggtcgatattgatgagcatggggaactggcccttgactacaacgtggggtccgttccttcactggtggtcatcagcaacggcaaggtggtaaatcgaatggttggcctgcagaccagcgaatacctacgcaagtggctccataaggcggtgccacacccaccacctgaggatacggaaaactagatcagcatgtcactaggggagtcttattaaaccacgttctcagcaacacgtttttaattaattttcgatttaacaagtttcttaggtgcatacactcaaagaaataaggaaccaagtatgtagattataactatataccatattttgggaagaacttgtactatttaaatttcgaatat

SEQ ID NO: 18468 - protein, 132 aa, DROSOPHILA
MNLMKANRGMTSTGKQPIFDVETRKDFEQRVINSDRPVVVDFHASWCCPCKALAPRLENVVSEQEGRVRLARVDIDEHGELALDYNVGSVPSLVVISNGKVVNRMVGLQTSEYLRKWLHKAVPHPPPEDTEN

SEQ ID NO: 18469 - DNA, 5231 bp, DROSOPHILA
tcaggcgaagatcacgtttaagccgggccgatatgtgccacgcctgcacggtgccacgggttggtatgttccggatgatagtggaaagtaccggcacgatcccaggccctatgacggcggctatggagatcgtggtgttccctatgactccgatttgagcggcattttccggaatgcccagcgccaactggaggcaaaggtccaggaggccggtgaaggtctatccctcggtccacgagatcatctgcgattcatgatcgactttaatttcaatggcaccggctggcagataatccagtttcaatgggtacgagatggcgatgagtcccatccagacaccaaggagtacagctacttgacggagaacaagctatgggactcggatcaggcctatgcgtaccaggagcccgacgatggctgccatatcaactgtcagccggagacggcggtatacccgctacaatcggagcctgtccaggagccagtggtgcagccaactcaggagcagcaacagtccagaacaaacatcaattcagagcaggatgtgagtagtcaaaaaatatctaaaattctagaattgctaagtaaagtattgctttcctttagcctggcaagattcatgataccatcaatgaagtcctggagtacatacaacaacgaatcctgcctacgttgccaattaaaggggagtaaatcggtttcagaaacattcaataaataatgaaaataaataaacagtgtggtttttatatcaaggtatatcaaactttagtagatatactagagtttagctcacggctcatatatattacacttgaaaaatccataaactattaagaatatttatcccttaatctgataaaattaaactaacttacggacttcagaaacaggatgtagataattgaaagtatttggtcctcttgattgaaacacctttgaattcctatggcacatcaatttattcaatttaaaatgtatacacttgtaaaatccaactttatttcttcgtcttggcatttgcttccaaaaaggcgagtaacttttccacatagggcggtggtggtggcgctgtgggcaggtgggcggcacttggcacaaagccattgtcgtctgctacatagtccacgcggtagaggatgccgtcgggtccagtgtactcgtagaatcccttggaacgaagtccctcctcctcggtcagcttttcgatgcgtccactttcctcgcctaagatgccgttctcagtttcccaactaaaaagcatggttttaaaatgcgtcacattgaaagttacacaatacccacagatagtgatagccatccacctccacatcgtcttcctggcggatgatggcccatccgttgcctccttcgccggtgccacgtcccttgggaagattggcagttggatcggcaatagccggcggcgctgcagtggtgggtcttggttgaggcctggctgaggttctgggcactacaactgctgctccaccaccacctgccccggatccaccttcaccaccaccaccaccgccaccaccgcctccaccacccctgttcttgtcccccacatagcgacctgcatcgccggagtaatccccaccaggacgatcgtcgtgcttgtacttgttgtccatgtgcacgtagcgtccatcgttgccacccgagtatcgtccatcgcctccaccgcgataacgtccatcgttaccgccgcggtacctaccatctccggcactcgcccttgtcggcggaggacgataccgtccatcgttttgggccagaacggcagccgcaagggctataactagaacgatctgcatgggaatgcatattaaattttgaggtatctgaggtaagtcaaactcaccgctacgcgcagccacatcgtcgaagatgagcaatgaaaagatctagccgtcggcccccagctttatatctttcggatgcacccccatacgcccacatatctaagcagcatccagcatccactacgagtggattgctgtgtctaattgcaactgatccgaccggtgacttgatcaattaagcgtcttggtttacggggcgattaattcataatttgttggaaggctgctttccgatctgatggctcagcgatagaaacgattcaatggagatgcattgcagcgttctccacctggaacagccggctgttgaaacttcttggaggtactaccacgatattcggacgttgtccacgtttcttgaaaagataatacaattccaagccgcttcaacttcatttatgccaaatgcctgaaactaggcaacataatattgcgtgccctgtaatgatcattaaagctgactgaatggataaagatctttccatttggaatagagtgccgcactagctaatgaaattattatcgattaagtctactatgagtttaatgatatccatttaatataatattaatcacaagcatgattagattggccaatattatacatcgaaaatgaaaatctatggaaaagttatgcatgtattctaacgcatttatttggtttactttcttcaggttcagttgaacttaagtctttgcaaatcttatctagaaaaatcaggctgttttaccatccccctcattaaagaacaagtatgaataaggttttcccgaccacacgcgcctagcccataaaatcagaatattcagtacatattttgattcacgagggtaaggtcaaggaattggacccaagtgagttaaatcttatctgaatacgggttatttccaatatatttacaatcgcataagaaatcgatccaaacgcaaaagtaaattggaaatcaatacatcattagtcattagatcgcaagacgtcatcgtttgattgcatatctgccacttgattaagtctactaaagtcagtattaaattccacagctaaatcatttgctaatcattgaaaatccactctgcatttgttgttgtatggccagttttattgttcattcgcacacgttttgtaattgagtagaaccaggtaattcgattgtagaagtcgatgtgattacctaaccacgtcggttgttgaacccgccgggctgctcttgtggcggcggcggagcggtggccaagtaggccaatgccttctggattgcaggcgggatgggtggcggcgtgggcaggtggtcgccctgcggctggaagccattctcgtccgccagataggttatccgaatcggaatgccctcgggtgaggtgtacgagaaggagccctgtgcgacctttggagcggtaaaagggcaaatgcaagttagtgctcgtttcgtttggccaactggtagccggcaaatgccaggcacgactgtgaatggagttctcctacacccacctggccggcattatcggtgcctggattcttgaggtagccctcctcctcggcgttgatgccgttgcccgtctcgtacagatacttgtaggagccgtcgaagttgacctcctgctcctgtctgataattggaatgggttctcccggcgcttggcctctcacttgtggtctggcctgggccaagctgagcagcagggctgctatgaagagcagctgaaagcacgcggatgcgatatcagcatggagtatacccaagttgatctcttccatcttactgtgtattgcatgtcgaaccgagctgtatcctgtgatcctgggtcctggtcgtctgctccgagttcgtctcgatccgttactgtggtcaacagaggcgactctttgcatatttataccaaatcgcttgaacttttgcacacagacactattgcagttggagattaaagagtgaacgcctagcattttgaagacccgccgatcggaagcctcttttaggtggctcttgtcggaggccaataccatctcccatggagcgcaaatgaaccgaaccggaccggaccgaatcgaatcgaatccacctacaagtgcacgacccatccgatatgctgcaatttgtcgaatgagttgtctacatgacagccacagtggggactctactttatcattagagcaaagaaaaatatagtttagtataatatctcacaacattaagttgttatgctggaagttatcatcagcacagttgcatcttcaattgcttgctgcaatagaaactatcctagctagccatcgcccactgtgcacctgtattgcgaggggcgttggaggcactatgatcatctcggatcgtgttgaacatgaccagcttgacattcataactcatcctcggcagcgtgagaggaatagggacagactgctgcattcctacatcaatttgtcagtgcagtcattagacatttgactcaacggcttgatgatcatcattggcgggattatgactgccacctgaccatgatcatgtctggctggccaactgacttactcaccagctaactgaatgtggcaagtgccgcttgacctttgcggcagccgaacagatgtttcttgaacaggtccggccaaaaggcggtaatgcctgagccggggcgttccgttgccagttgagcaaatgtcagttaccgccgaagtagaaatggaggtggaggtggaagtaaagccccaaatgtcccaccgcccaatgctacgtgagatggttaacttcgattgcggtattgtgtgagagcaagagacggcgcttgtttgttttttggtatttggtgtttttatttggctattcaggtgatgaggatcgtatcaagtggcagcatcgtggatcggatgggcggctctatccggacttcttgttgaacagcagggacaggagctgttgcttgattggcttagtggtggtggtgtccgtggtgtaggtgtaggtggggtaggtcggggtggtagtataggtgtacgtcgtcgtcgtgggcgaagagggcgttgtgggagtgctggttgtagttgcggtagatgccattgcgatggccaggacagcggagaaacagacgaggacagcgaagaacttcatgttgattggattttttgggcttttaggattgctggctggctgttgcttatcgacggacgagctgctgaactctgagtgtgtctttcgctggtccaggcctcactatttatacccatattttgactgcggcagtcgtagtattccctgtaatgtttgcacaaatggttcctttaccgtttgctacattgctagctttcccccaccaatgtttaccgaccaactcattgtgaaatgcatccaatgtttgatccccttcca

SEQ ID NO: 18470 - DNA, 1531 bp, DROSOPHILA
atgaatgtcaagctggtcatgttcaacacgatccgagatgatcatagtgcctccaacgcccctcgcaatacagcatatcggatgggtcgtgcacttgtaggtggattcgattcgattcggtccggtccggttcggttcatttgcgctccatgggagatggtattggcctccgacaagagccacctaaaagaggcttccgatcggcgggtcttcaaaatgctaggcgttcactctttaatctccaactgcaatagtgtctgtgtgcaaaagttcaagcgatttggtataaatatgcaaagagtcgcctctgttgaccacagtaacggatcgagacgaactcggagcagacgaccaggacccaggatcacaggatacagctcggttcgacatgcaatacacagtaagatggaagagatcaacttgggtatactccatgctgatatcgcatccgcgtgctttcagctgctcttcatagcagccctgctgctcagcttggcccaggccagaccacaagtgagaggccaagcgccgggagaacccattccaattatcagacaggagcaggaggtcaacttcgacggctcctacaagtatctgtacgagacgggcaacggcatcaacgccgaggaggagggctacctcaagaatccaggcaccgataatgccggccaggtcgcacagggctccttctcgtacacctcacccgagggcattccgattcggataacctatctggcggacgagaatggcttccagccgcagggcgaccacctgcccacgccgccacccatcccgcctgcaatccagaaggcattggcctacttggccaccgctccgccgccgccacaagagcagcccggcgggttcaacaaccgacgtgatcgttctagttatagcccttgcggctgccgttctggcccaaaacgatggacggtatcgtcctccgccgacaagggcgagtgccggagatggtaggtaccgcggcggtaacgatggacgttatcgcggtggaggcgatggacgatactcgggtggcaacgatggacgctacgtgcacatggacaacaagtacaagcacgacgatcgtcctggtggggattactccggcgatgcaggtcgctatgtgggggacaagaacaggggtggtggaggcgcgccgccggctattgccgatccaactgccaatcttcccaagggacgtggcaccggcgaaggaggcaacggatgggccatcatccgccaggaagacgatgtggaggtggatggctatcactatctttgggaaactgagaacggcatcttaggcgaggaaagtggacgcatcgaaaagctgaccgaggaggagggacttcgttccaagggattctacgagtacactggacccgacggcatcctctaccgcgtggactatgtagcagacgacaatggctttgtgccaagtgccgcccacctgcccacagcgccaccaccaccgccctatgtggaaaagttactcgcctttttggaagcaaatgccaagacgaagaaataa

SEQ ID NO: 18471 - protein, 324 aa, DROSOPHILA
MNVKLVMFNTIRDDHSASNAPRNTAYRMGRALVGGFDSIRSGPVRFICAPWEMVLASDKSHLKEASDRRVFKMLGVHSLISNCNSVCVQKFKRFGINMQRVASVDHSNGSRRTRSRRPGPRITGYSSVRHAIHSKMEEINLGILHADIASACFQLLFIAALLLSLAQARPQVRGQAPGEPIPIIRQEQEVNFDGSYKYLYETGNGINAEEEGYLKNPGTDNAGQVAQGSFSYTSPEGIPIRITYLADENGFQPQGDHLPTPPPIPPAIQKALAYLATAPPPPQEQPGGFNNRRDRSSYSPCGCRSGPKRWTVSSSADKGECRRW

SEQ ID NO: 18472 - DNA, 4308 bp, DROSOPHILA
gaaggacccaatggcaacgcagactaaaaccgactattataatatggcagcagttgggggtttatatttgaatgtccaacgggccagagtgaagccttatcaactgataatgctcgtttatcagcatattgaacatgtatacgatacttaagactaacggtgagtttgagtctgcttgtgaaattcgtgatcaagtggaatttaatggctgcacgtgaaaccataactgatgaagccgaccataatactcgtatattggctaagaacctgagtgccggcgaaatctaaaaggactgattgaaatcacggggggggctctacatcggtttttctaaaccctaggtcagtacttcgaataatgttttcatttatttttataaacaaaacaataataatataataacatctatttgacgtaaattgacctgaatgactcgcgaaggacaaatgaaattaaaagcagcagggtaataaaatatcaaactgcattgtcaatgtgaagttcgccataatttcgttccttagataaatcaaaggtacatatatcgttatcaggtattgttaatagtgggcgattaatcatatacatatatatcttatatatatatttatacacgttgttagttagagctaatgcattgttatggttttaattgaacgaattataatactttgcagtttcatatcggccactaatgggaaaatatctgagcatacaccaatttaaaatgccttccatggctcggtcacacgcatcttatccttatcttccgtattgccaacacggcttattcacggtggggaatatacatatgtacatatagaagccgatttggtcggtcaacccatgacgttggacttgtgactgacgacatgactggccaatttcacgccggttttccagcgattatctacaatacgagggattcagttatgacagtttattggcaatttcaatacaggcaagctttctgatttcattcgtgttttatctggttgcctaggacatgaccatgcgaagggcatcgcggttgatcttggcctgcttaagcacgtgaccctcgatgaagatgtccgactcgtatttcagatagttgacgcacttgtccacataaaacagggactcctccagtcgatccttgggcgacaggctcgtttcaagggctacacgacgagtctgttcggcaattgccgagtgcagttcgaagcaaagcgtgccgagcgtgcgaacttcgcctgtcgagtaaaaataacaagccgcccacttgagataacactgcgtatacgtaataatcgttaataacacttacacggcgtcagtttctcgtacaactcaacaagttccctagcgaaattgagctttagcagcagtctgtcatccgggatcaccattagctccttctgatccttggccagcagctgaacgagcaggattttaatctcactcatgtgaaaatgctgtggcggcagccacttttcgtaatgcttgaggtatctgtgagttaaagatttgcatttaggagaccttttctcatatttatgcttacttactttaatccattttcagcgattttctccatgctctgaatgtctttgccagcccgttccaaaatgcgttccacatagtgtttctggacctgcttgtggcactcgcgacagctagaagagattaggaaatcacatacatttcacgacgacttggttgaaggcacatggagactcaccgccaactgccgttccattcgtccgccttggtgggcagcatcaatccgccgcactggcgatcctcgcacttaatagcgctgtagttggtgtccaactcggtgacatccacacatctctcgcaggcacacttgaacagctttgtctgcatcaggtggcgctggcgatcggcggtgccccacatggcgtccgagtagcagatgctcaggtgggcgttcttcttgatctcgcgcggtgcccagaggatgcagtgtccgttcttgttgaagctcttggccagattgggcaggcaggagttctccgtaaaggaggcggtataaaagaccgctacatgagatggatcagtggtgggcacctcgtgtccatttatttgcagagcaccaactgctttcataatctcctcctcggtgaacttctgtgttttaaagaacctgaaagtattatatttcgttaaagaaaatacgcttgtaagcatgtaactgtctcaaagaacagaaaatgaaatattgtttaacttgctgaaataattttatgttattagattataattttgatagcccgccaatcataaatacttatgaccacagacaaaaaccagactaacgtacttatatcggtgagagagataagataagattgtttatgtttatatagattcattcaattatgatatataaatgtttgtgtacccactttggaataaactgcccgatgctgaccagatccgccttccattggttggacccccttctggtggactccagtgactccaggtcctggaacttgctggccttctccgtacttgtttcgccaatcagcaggcaccttacggtgctcaaacacgtgtacaggggatgtggtccaccgaactcctgcacattaaccttctgaccccgatccttggtcagaccgcactccgccttgtgctcatccagggacttgcactccggtccgcacagcggccaaccgcactgctcgcactcgatgtgatcctccgcctcgatgccgttcaaacagcccaggcaaacgggtgcggagatctgtgctggtccccggaccagaggcgcctccttcaggactatctcgtatggtttaatggtgcgggtggccaccagatgccggcccagctgctcattgtgggcgatctgtaagagggttgaggttatgttgggccctttcgtttggatatcagtaccgcagtaccttgaatggatgacagcttggcttgtgcactttccagtcctgcttctggtgctggacactgcagtaggagacctggttacagttggagcacttgttcttcgtcggctcctcgcacacatggcagggattcatggtggcacggcagatgtacaatccaaaaagagatggttttcagtcggcgagaatctcgtccgcactctcattcagttgcgcgatgtgcatccacctccgcacgccacactcaattcctataaactgggccagctgatgaacagagcacacacatcacatctgctgccgtgctctacgctcggtcctcttataactatttatagaccaccgctcttgagtggaccaatgctgtgcgaggcgggccaccctaaccgtaatgaaattaaaacgctgattgattttcttctgtttgtttttgtatctgggccacactgaaggcctagatgcacacagaagcggcagcttggccaagatttctacgatttattcactatcgttacaccaattaaagcactctcatactatatacaaaatcaccattggccagtagttggtatcagattactggtaaggcgccgggatagcaatacgattaatttataaatacagtttttacatagtttatatagcctccaccccaacaaaacactgaggtataaaactactgacgtttacgcttacgcctgaacttggattttggcctgcgtttaggcgccgctgttttgtgactctggccagggacactaacttctccatctcccgatcctcctcctcctccacgatcctcagacgccgtcgatcaaatatcagtctcgtcactcggcccattggcctcgcgcagggtcacgaacttttgaagcgtgacgttctccttggtggcagcagtgctgccgctttttgaactattccgcaattttcccttgtcacgtgacttctcgtgcacaccgttcacctggaaattgtcgctttggaatggtatcgaaatgggtaagctgtattcgctcggaaatgcaacagttcggtcgttgtccttatccttctcatctttctcagacactacgggttcggcattgctgtgggcattgtagtttcctacaaataaaataaaaaataaattaacattgcaattccaataaaggtagagttgtgttaaggaaataatcatcaatccaattcccacctttagctccaaacatctcggcgtactgcttgaacgcactgcgattgcgcttgcctctattacgcatattcaaacgcagggcggacaccttcattttggacctgctgcgcttggactttgaactacttggtcgcaggtccgactccgtctccatcggctgacgcgtgccggttaggcttggactggggctg

SEQ ID NO: 18473 - DNA, 1793 bp, DROSOPHILA
ttagggtggcccgcctcgcacagcattggtccactcaagagcggtggtctataaatagttataagaggaccgagcgtagagcacggcagcagatgtgatgtgtgtgctctgttcatcagctggcccagtttataggaattgagtgtggcgtgcggaggtggatgcacatcgcgcaactgaatgagagtgcggacgagattctcgccgactgaaaaccatctctttttggattgtacatctgccgtgccaccatgaatccctgccatgtgtgcgaggagccgacgaagaacaagtgctccaactgtaaccaggtctcctactgcagtgtccagcaccagaagcaggactggaaagtgcacaagccaagctgtcatccattcaagatcgcccacaatgagcagctgggccggcatctggtggccacccgcaccattaaaccatacgagatagtcctgaaggaggcgcctctggtccggggaccagcacagatctccgcacccgtttgcctgggctgtttgaacggcatcgaggcggaggatcacatcgagtgcgagcagtgcggttggccgctgtgcggaccggagtgcaagtccctggatgagcacaaggcggagtgcggtctgaccaaggatcggggtcagaaggttaatgtgcaggagttcggtggaccacatcccctgtacacgtgtttgagcaccgtaaggtgcctgctgattggcgaaacaagtacggagaaggccagcaagttccaggacctggagtcactggagtccaccagaagggggtccaaccaatggaaggcggatctggtcagcatcgggcagtttattccaaagttctttaaaacacagaagttcaccgaggaggagattatgaaagcagttggtgctctgcaaataaatggacacgaggtgcccaccactgatccatctcatgtagcggtcttttataccgcctcctttacggagaactcctgcctgcccaatctggccaagagcttcaacaagaacggacactgcatcctctgggcaccgcgcgagatcaagaagaacgcccacctgagcatctgctactcggacgccatgtggggcaccgccgatcgccagcgccacctgatgcagacaaagctgttcaagtgtgcctgcgagagatgtgtggatgtcaccgagttggacaccaactacagcgctattaagtgcgaggatcgccagtgcggcggattgatgctgcccaccaaggcggacgaatggaacggcagttggcgctgtcgcgagtgccacaagcaggtccagaaacactatgtggaacgcattttggaacgggctggcaaagacattcagagcatggagaaaatcgctgaaaatggattaaaatacctcaagcattacgaaaagtggctgccgccacagcattttcacatgagtgagattaaaatcctgctcgttcagctgctggccaaggatcagaaggagctaatggtgatcccggatgacagactgctgctaaagctcaatttcgctagggaacttgttgagttgtacgagaaactgacgccgtgcgaagttcgcacgctcggcacgctttgcttcgaactgcactcggcaattgccgaacagactcgtcgtgtagcccttgaaacgagcctgtcgcccaaggatcgactggaggagtccctgttttatgtggacaagtgcgtcaactatctgaaatacgagtcggacatcttcatcgagggtcacgtgcttaagcaggccaagatcaaccgcgatgcccttcgcatggtcatgtcctag

SEQ ID NO: 18474 - protein, 513 aa, DROSOPHILA
MNPCHVCEEPTKNKCSNCNQVSYCSVQHQKQDWKVHKPSCHPFKIAHNEQLGRHLVATRTIKPYEIVLKEAPLVRGPAQISAPVCLGCLNGIEAEDHIECEQCGWPLCGPECKSLDEHKAECGLTKDRGQKVNVQEFGGPHPLYTCLSTVRCLLIGETSTEKASKFQDLESLESTRRGSNQWKADLVSIGQFIPKFFKTQKFTEEEIMKAVGALQINGHEVPTTDPSHVAVFYTASFTENSCLPNLAKSFNKNGHCILWAPREIKKNAHLSICYSDAMWGTADRQRHLMQTKLFKCACERCVDVTELDTNYSAIKCEDRQCGGLMLPTKADEWNGSWRCRECHKQVQKHYVERILERAGKDIQSMEKIAENGLKYLKHYEKWLPPQHFHMSEIKILLVQLLAKDQKELMVIPDDRLLLKLNFARELVELYEKLTPCEVRTLGTLCFELHSAIAEQTRRVALETSLSPKDRLEESLFYVDKCVNYLKYESDIFIEGHVLKQAKINRDALRMVMS

SEQ ID NO: 18475 - DNA, 4715 bp, DROSOPHILA
ctttttgtacagattaatgttcattaactttagctaacttacgcctcaaaagctctttttttaaaccccagcgtaaaagtgtgctacgaaaagaattcaatctaaaatagaaaatagaatattttaaaactattattcaactaatggttaattactagttttattttacacaaaattattgtaattaccatatattttattgacaagaacttagtaagtgaaatcaaatgagtaatatcatataattataatctttactgtactttagctttccagtacaaggtcagactttaaatcatattctagaaattgggtcaattcctgcttatcggaaatgtgtatatatgtatatttgtaccaaaatacaaaattttttctgcgactaccgacaacaagtgcttagattaagacttgtttttttttcttctcgccattgcgggatcaaaaaacccattaatttttaaacgccgcccgtatattgtgtattgaaaatgctcaatacatatgtgtagatgtttgccaaaatgtcagacactttcattatcaactgcgttttggcctttgaaaccaaaaatgccgttcaactcaagggcctttggtggtctttgaattcctgagctcaaaattcttggtaatttataacaaatatttagtaggttttatttcgatatacgataataacaaattaattatcttatgcatagcaacatcgtcaaattcgacagttcgacagataaataaatacgaaataacatgggatcggacttatgtgcgaatattctccggttgccactcgatatgttgacatcttcaccttccttttgctttttttgtggatttttttcggtattgcgatggcttgttataggttttgcccgttgatcactcggcaaatgcatggggaatggagttggatgttggagttgggactaggactgtttttgggggcttgggtagcgggaacatatggctgtgaatgagggcagctcaggctcgacacttagtgggactttgctgcctggcggagtcgctccaatgcggcctgctcctcgcgctcctcctcctcggcgagctccacctcgtgctccagcatatggatctgctcggtcagctccttgggcatctcctccagatggatcgccttgatctgcgccttaaggtccttggtcatgtgattgatgcggaagccgcgatggtcgaactgagccccaccgttgatcttgtgctgctcctccacgtacttgagggcacggacaatggcatcggggatcgggtgaatgtggtctccctggggcatgaagccgccatcgttggaggcgtagtttacgcgataaagcttgccatcgtcaccggtgtactcatagaatcccttggcatgtgtgcctccggtgtggtgaagcttggcctgctcctcgccatagattccattctcagtcaggtaactgttggataaaataaattaaaattgattaaaatgattgtacacacaaaagctgattatacgaataatataatattaagaaagcggaaatgagccccgttctttaatttaaattgggattgccgaaataaggacttgagaattttcaaaaatcatacaaaaacttacgagtgatcgtatttgtcctgtttgcggacctcttccttgtgcaggatcttgtggcgaccctcatcatcgtagttgaacagaatattgcggggcgtggtggtggtggtggtggtcgaggttgtcgtccttttggtggtcgtggttggtttcttggtggtcgtgctctgcgagtggtgttgtgatcattggcttgggtgtttttgatcgggcgtgtgtgcatgcgattgtgtggcatggtgtttggtggcaaaggatctttttgggggtcatgcgggataccgaatgtggggtgtcatgtagcgcggaatggttgattttgttgcgtagccgagaaacattcgcatttttgcttggattggttatgaaagcaggggggttcgggattggtttttgggggtagatttcgctgtgttggccggatgttggaattcgggggattctggtgggatctggtgggttcttagtactgtgtgctcggttggtgatggggttcatgatcggggaagccgtactccaaggggatttctggtactttaaactcggcgttacttactgtgtacaggtcgtggctgaaatggacaaaggcacatgaaataaaatacaatacttcacaccaaaaccagatgagtcactcacttgtaaggcctgtcgtcatggacatagggaatattcgaaccagcgtagggtccatagcctccgtcatagggatagggaatgtgatggtattttccaagctcacgctgatcgctcacatgtctgtagggaatcggcatgtgatgatagcgaccttttgggaaagaaacaaaatcggaagttagtgggctgtctcgttaatatatctacggtttctctcggtgtttgagtgagtgacttgcgattcaaattcgaaactattcaagttattcatatctaatattagatatttacacagttaattagtttctcattaagtttttgtacaaaagaggcagctggatctaaattggttgcaatttggagttaaactacagtcgtttaactacagtcgagttgatttacaatttccatatggatttttttttttgtagactgctttttgtgtgaaatgatttctgtttgtgtgattgtgagatagatatgcattttgctccttctttcaataatttacctatactttcttgcgaaccactccggcctagagtatgagtataagaaagtgattgtttaatatcagagtgcttaaagtaaaaacggttctttgattagtgatagaagcttggctcaaggtctgaataatctgagttttgtttacaatatcgctaatttcagatgtcagccttgagcttgaacttattcgaggagagtcagtggattattcgtgtaggtgagtgtgtgttttcgaagtcgtcgggtatacagatatacatatggtggtgtatgtatagtatgtatgttagtatttgggcaagtcggtcttgcttttcgatcgattcacatttgctgggtgttagtgggcgttggcagcggcatgcagtcattgggcgtggcagtaggcacgatatttgatattggcttgtctcacgaaaataccttcgttctgcgaattcccatggtacttcccatcgtcgctggggcgatacttgccatcgttagaggattgctgtggaaccgtatacttgccattattatccggaacgggactggcgtggcagacaacgaagagggcctgcggggcaagaggatgtcgttcaataaaccgatttgcataatgccgttaaatgtgacaggaagtggcgcccaccgccgcacgttcggttgaatgtactcaaacaatgctgcggatggcagtaaagattcaaggcttcacacgacgtgcagcagctaattaattgtgctaaaacttgctgataaacaacaattttatatatttttcctcaggcacgtgagtaacacttggcggacactgcacttcgtcaccaatcaggagaccaatatccttttgcgctactcaccacgaccagggagaagctcagcattgacttggtgaacatgttggctttgagtatcctttaggggaaagtatcctttttcgttaagataactgagatggtaatcctgctcgaaaggcgattgcaacaggaatgtttggtttcccttccagtacaccggatttatatagaaatgtgccaggttcgcagtcgcagcgctgctctcaacgcatcgtcgcgcctaaaattctctgagcggagattcgtcggttcacttcggttcatcagctacatttcatgaagacttgtaccccgagctgctccctttggatttttagacagaagatgagccgaatacttctggttccaccttttgttagcttctctcgcctcttcgagttcaatcgctttctggggcatcatctttatggcgtatcaatgtcacaagtaaacgtaatttcatttattaccaatcaaccgatttgtattatttcacaaatgtcgcttaatcgagttcatcggccaatattgttctttccagagcgcaggatatgtggctttaactgactcatcatcggagttatttactctagttgtgaaaaagaaattcccatgtttttcagaattgtcatcgaatttcgtgtgaacaataagagcgaattattttggaagcaatttcatttcgatgataatcgaaggttgagttcaggtcaaagcggacgtcaccgagattaaaacaataaacaccatataggtaacattatttcgcgttctgtgtttctgtgtcatcgacgtgggaagaatttttgatagcataaagggaaaaccaaaaatattaccaaaacttgtaaagttaaaagcatggagaaaatatatatatatttctaagaagctgaaaatcgttgcgcatgtgtacaatggaaacctgagagataatttaattatacctttccataataaaaaccatctttacaagtaaggcttaaaaataaagcgattaaattcctagagccaactggtcgtatactaaatctttcccatcccatcacagtttcttgacagagagtttcattgcaaggaagcgatattcaaaataagacaatatttaacaccagccagctattcctgaacgacgtcag

SEQ ID NO: 18476 - DNA, 1051 bp, DROSOPHILA
cctttcgagcaggattaccatctcagttatcttaacgaaaaaggatactttcccctaaaggatactcaaagccaacatgttcaccaagtcaatgctgagcttctccctggtcgtggccctcttcgttgtctgccacgccagtcccgttccggataataatggcaagtatacggttccacagcaatcctctaacgatggcaagtatcgccccagcgacgatgggaagtaccatgggaattcgcagaacgaaggccggagtggttcgcaagaaagtataggtcgctatcatcacatgccgattccctacagacatgtgagcgatcagcgtgagcttggaaaataccatcacattccctatccctatgacggaggctatggaccctacgctggttcgaatattccctatgtccatgacgacaggccttacaaccacgacctgtacacaagcacgaccaccaagaaaccaaccacgaccaccaaaaggacgacaacctcgaccaccaccaccaccaccacgccccgcaatattctgttcaactacgatgatgagggtcgccacaagatcctgcacaaggaagaggtccgcaaacaggacaaatacgatcactcttacctgactgagaatggaatctatggcgaggagcaggccaagcttcaccacaccggaggcacacatgccaagggattctatgagtacaccggtgacgatggcaagctttatcgcgtaaactacgcctccaacgatggcggcttcatgccccagggagaccacattcacccgatccccgatgccattgtccgtgccctcaagtacgtggaggagcagcacaagatcaacggtggggctcagttcgaccatcgcggcttccgcatcaatcacatgaccaaggaccttaaggcgcagatcaaggcgatccatctggaggagatgcccaaggagctgaccgagcagatccatatgctggagcacgaggtggagctcgccgaggaggaggagcgcgaggagcaggccgcattggagcgactccgccaggcagcaaagtcccactaa

SEQ ID NO: 18477 - protein, 324 aa, DROSOPHILA
MFTKSMLSFSLVVALFVVCHASPVPDNNGKYTVPQQSSNDGKYRPSDDGKYHGNSQNEGRSGSQESIGRYHHMPIPYRHVSDQRELGKYHHIPYPYDGGYGPYAGSNIPYVHDDRPYNHDLYTSTTTKKPTTTTKRTTTSTTTTTTTPRNILFNYDDEGRHKILHKEEVRKQDKYDHSYLTENGIYGEEQAKLHHTGGTHAKGFYEYTGDDGKLYRVNYASNDGGFMPQGDHIHPIPDAIVRALKYVEEQHKINGGAQFDHRGFRINHMTKDLKAQIKAIHLEEMPKELTEQIHMLEHEVELAEEEEREEQAALERLRQAAKSH

SEQ ID NO: 18478 - DNA, 2951 bp, DROSOPHILA
atccaagccaaaataaagcgaggaaaatccaagagcaaagcgcgtgaggtgtacgaggtggaaaaaaaaacacatacaaaacaacgagtgtgcgggaaaacaaaacgtcggaaaatcgcaaggcgagtcggttgaagggggcgggccaaaggtgtcacacgggtccaccaggacaatcaagcggaagtgagcagttacggctagtgtgtattgtgtgtgtgtgtgtgtgtttgggggcggatgggatagaaaaccgttccgaatgggacacttgtcttcaaagcaggcctatttataccgcacccggtcatgggcaatcataatcgtggcgataatgatgaggagaggctggtgccgatcagtgccagtggagcgaaaaatcaatacccttccttgccacatgtctaaaattagcgggatactctcacacacattgtttgccgttattaaatatactattaaaaaggagttctatcaactttgataaggaagttgtaagtcaaccaaggagttatgcgggtttatataatagaatcatatataatataatcaactcattatcaatttaaaaggttcttagagttttttagtgtaaaggaatatacattttaaaaccaattcaactaataaagtgtgttaacatgcctactagtgtatatcaccatcggctttcggaagttaactttctttcgcattttgtttttgttgcgggaccctaaagtggtagtgccacccacgcccacgcccatcacgtccctaccacccacatccaccaactggcgaaccggaaaggttgtgcgtgcgtgggcgttgtggccaagctgatttgctcttaattgttgcagataaacgaaagcatggcgcccaagtagaacattccaccagcgcccgacagcaagccaacaagcttcagctcctgcttctctctattccgatttccactccgagtttgatatacgcgaccgcgttcgacccactcgaatccgtatcggtaaccgggatgacggagcagaagaatcaggtgacgcgcgctgcaccggagcagagcaacgattaccgcgtggtggtttttggagccggcggcgtgggcaagagctcactggtgctgcgcttcataaagggcacgttccgcgaaagctacatcccaacaatcgaggatacgtacagacaggtgggtgggacgcctggtgctagagattactcacataatccgctggtcttcgcacaggtcataagctgcaacaagaacatctgcacgctgcaaatcacggacaccacgggatcgcatcaattcccggctatgcagaggctgtccatctcgaaggggcacgccttcatcctggtctactcggtgtgctccaagcagagtctggaggagctgcgacccatctgggcgcttatcaaggagctgaaggttggtccactgcctgacaatcatttctcatgtactaatacgttgtgtgtccacagggcgccgacattcccaacatacccgtaatgttggtgggcaacaagtgtgatgagaccgccgagttgcgagaggttagaggatgttccatctgatccgtcatatacatacatgcttaatctaagatctaagttacaatcttcaagggggattttaaacagaaaaatcatctctttaagaaaacctctaatccaaatgtgccatccacaggtctcccaagcggagggtcaggcccaggcgaccacctggagcatatcgttcatggagacgtcggccaagacgaaccacaatgtgaccgagctgtttcaggagctgctcaacatggagaagacgcgcaccgtctccctgcaactggacaccaagaagcagaagaagcagaagaaggagaagaagtccaaggacacgaacggctcgataccggagaacggcgatgcgggggccagcgccagcggcggggccaaggagaagtgtcgcgttatgtaagcatcggatggccaaagagccagatggccagatggcatggccatgtgacccgggtcacattgcgtcgagctgaagtgaacggagacgacggtgacagacaaatactcgccttggggcagcacccttgggtggggggttgctggcttaggtagccacccacacgggccacgccacaccacaccacaccacgcaccgcacacaccacttacaccataccacataccacacacaatccccactttatccacatatagagttacatgcataacgagacacttgtatttaggaactgactggataagtcgcaccacgattgcaattacgattacgagtatattttgcataggttatatattctattcgagccgatcagatctttctagtcgcacagagacacgataccacgtactgcatacatatatacatatatactaatccaaacacaccacggaaactaaccctaagtttgcacataatcgcatctgaaacgtaacggcatacatatcaaatgtttacatacttacatacatactgcatgatccatcagccattccataaccagatatcgaaacgaaatcgaacgaagctatacactaatatctctaatgaaagccaaagtacctacttaaagacatagaatctgtatctactacgatatgataacaaaatatttacatggatccatcaacgtaagacttctccgtgatcgccacatagagagcatcgcgaggcaaccggaaacggaagtggccgcaattggccgaaaatggccgatgcctccccctgactatcattgctgtttaactatttaccacctaaccagaataataccgattcggacgattcgccccgatcgccatataagctaatgtataaaatactcaaggccaacaacaccgacagcccacagtccgtaaaacagatgaaagaagaaattcgcaatggcattgtgttttttgtattatattaaatatgtatgtacaattttacacttatttgc

SEQ ID NO: 18479 - DNA, 702 bp, DROSOPHILA
atgacggagcagaagaatcaggtgacgcgcgctgcaccggagcagagcaacgattaccgcgtggtggtttttggagccggcggcgtgggcaagagctcactggtgctgcgcttcataaagggcacgttccgcgaaagctacatcccaacaatcgaggatacgtacagacaggtcataagctgcaacaagaacatctgcacgctgcaaatcacggacaccacgggatcgcatcaattcccggctatgcagaggctgtccatctcgaaggggcacgccttcatcctggtctactcggtgtgctccaagcagagtctggaggagctgcgacccatctgggcgcttatcaaggagctgaagggcgccgacattcccaacatacccgtaatgttggtgggcaacaagtgtgatgagaccgccgagttgcgagaggtctcccaagcggagggtcaggcccaggcgaccacctggagcatatcgttcatggagacgtcggccaagacgaaccacaatgtgaccgagctgtttcaggagctgctcaacatggagaagacgcgcaccgtctccctgcaactggacaccaagaagcagaagaagcagaagaaggagaagaagtccaaggacacgaacggctcgataccggagaacggcgatgcgggggccagcgccagcggcggggccaaggagaagtgtcgcgttatgtaa

SEQ ID NO: 18480 - protein, 233 aa, DROSOPHILA
MTEQKNQVTRAAPEQSNDYRVVVFGAGGVGKSSLVLRFIKGTFRESYIPTIEDTYRQVISCNKNICTLQITDTTGSHQFPAMQRLSISKGHAFILVYSVCSKQSLEELRPIWALIKELKGADIPNIPVMLVGNKCDETAELREVSQAEGQAQATTWSISFMETSAKTNHNVTELFQELLNMEKTRTVSLQLDTKKQKKQKKEKKSKDTNGSIPENGDAGASASGGAKEKCRVM

SEQ ID NO: 18481 - DNA, 2909 bp, DROSOPHILA
gcttggggatcggctcggaatttgtccttaacagttaagcgtctagagatgctgtcgagatgcgagattatggcagcaagaagtatgaaggggcctatcaaagttgtaaaatatttaaaaagtgaatgcaggtttccttccaaatggaatgatttacatctataagttgagcctatatgttctaatgcgtagtacacacgtcatatttaagtacaatacaaacacgagctgcaattgtttgcagtgtatggcgcaatggagaatgattgccagtgcacaatgccgtccatatgacgattaataatagccatccacataaactgtgattaaaacgccgcgtcttacgaccgccgagtatcgaagcaccggacaccgggcatcggatgctggataccgaatgggtaccgaatacccaacgccgagcacaagtatcgataatgcgtcacagtcagtgtactccaaaggtcgtacgctgaacccagatgcggagaaccaagacgggattccgtgcagatcggcggcagggcggtgatcactgatcactgtcagccgagcagatcgttgtgtgaatcacggcgcgtgctgttattgttatatgttcggaggcgtttcgatttctggccttttggcgatatctatatgggggcattcattaaagtcacaaatacttaataagtatttaaataaaatgactttttaatcaattacaagttcgatttgtgatgctcgaacgcttggcacttgatttgcatgctattcgcatcagatgtcacatcttcacgccgcaggagtgattctggtgttattttattggctccgatctgaacatacatatgtatagtacgtttggcattgaccctgagtcccaaaccccaaacttgccaaatgtcacactttcttcgatgcgtcacataccaggcaatatcccatccgatcgcatcggatcggtcagatgtaaatctgtcaggtatttacgatccatatccaatgtcagaacgagtttgtttgggtttatttggtatcagtgactttattgacaaggtttcacctttgaaaactgtcgcacataaatcattaatctgcttaaaactatatttgtggccttagagagttccatagttccgggaactggtagaacacaccccaaaaagtgtcgccgactagacgggaagaaggattttgccgcagaccagggccaataagatcagcacgaacggcaaccggaaatttggtgtcgaatgacttcctgaattgcaaagttctccgcgacagttgcaattcatccttccattctccttcttgcagccctccggtaagtccatcagtcgatacttctgctcccaatgctttccaatatagtcaaagtaatgatccacctgcttggcacagcctcgcctcaccctgatccactcatttccattcaccattgtggtcagcatggtggtcgagcacatggttgagttcgggcattctcgcactcttcccggcgaattatcagcagatccgcacgacgtctcctgatcgacacactcgtagcaccggagtgcctcgccaatcgccagacccgcgaccagccagaccatacagatccgtagtggaagctcagatccgctgcccatgatctccggacgcacactacccagccagctaacgaagttggaggactgcgattaatgtgaagagtttttcgtatgttcgagtttcagtgattaagccgaggaatacacaaccgcacccagctcgagctgatatgccagcgagatgcgagtttatcccaaacgacagtgtagtctcttgcttttggagggcgttttctcgcagtgctgtgaattagatcattatgctagtaaagcatgctttactcgccgtgcggtcactgacgcaatctcggtggctctccagccctgatctgttgctcgtagaagctatcacaaaagtaaagtgtctatgaaatgattgttatgcattaataattcaattaaagaatcagttctatagagacaagagactctggttcacaagacttacatatgtataagaagcttactcaaatcaactttgataagagagtcgaccaaaatgagacattttcgtttgggtttaatctttaggcacacaatgaatttcttatgtattgttttattatttgtgattctacatatacaaaatcgtactatgtatctatctcagtttactaattggttttttcaactcacattattctttatgccaaagcagagcgtggttaataaaaatcatttatatacatataattcgtataccaagttatatctttaatatatttaataacaatttctagctaccttcgaatttccgcaagcgttgaggcgtttaagatgctttccatcagatcgcaatgagaaactgcgttattttttcggaattcctgtttgggatctagagacctcaccgcccgactccgcgcatgatttacgggaatcttcacctcctaattcttctgaccgtctttagcatttggcgcacaacaattgaaatctttataggctgtgcatcctaacaatgcctataaattagtctcattttcgcgtgggctttcgcacacatttcgctgtcaatgcttcgagaatcatttttctcctctcagattgcgattttgttcgttttttttttttttttgctttttttttgctttgtttattcgacgattttgctgttaagattgctcacccggtttgcctgtcagggtattgtttaattatcatttgctctctttttggtttaattagtacactttgtggcagcgcgatgtcagcagctgtgagcgaataaatcagaattgcacgtctataaatattggtagcagatgaagccagtttagccaccgaatgccaatgggaatagatggatcgcttttggtagcactcggc

SEQ ID NO: 18482 - DNA, 909 bp, DROSOPHILA
atcagggctggagagccaccgagattgcgtcagtgaccgcacggcgagtaaagcatgctttactagcataatgatctaattcacagcactgcgagaaaacgccctccaaaagcaagagactacactgtcgtttgggataaactcgcatctcgctggcatatcagctcgagctgggtgcggttgtgtattcctcggcttaatcactgaaactcgaacatacgaaaaactcttcacattaatcgcagtcctccaacttcgttagctggctgggtagtgtgcgtccggagatcatgggcagcggatctgagcttccactacggatctgtatggtctggctggtcgcgggtctggcgattggcgaggcactccggtgctacgagtgtgtcgatcaggagacgtcgtgcggatctgctgataattcgccgggaagagtgcgagaatgcccgaactcaaccatgtgctcgaccaccatgctgaccacaatggtgaatggaaatgagtggatcagggtgaggcgaggctgtgccaagcaggtggatcattactttgactatattggaaagcattgggagcagaagtatcgactgatggacttaccggagggctgcaagaaggagaatggaaggatgaattgcaactgtcgcggagaactttgcaattcaggaagtcattcgacaccaaatttccggttgccgttcgtgctgatcttattggccctggtctgcggcaaaatccttcttcccgtctagtcggcgacactttttggggtgtgttctaccagttcccggaactatggaactctctaaggccacaaatatagttttaagcagattaatgatttatgtgcgacagttttcaaaggtgaaaccttgtcaataaagtcactgataccaaataaacccaaacaaa

SEQ ID NO: 18483 - protein, 152 aa, DROSOPHILA
MGSGSELPLRICMVWLVAGLAIGEALRCYECVDQETSCGSADNSPGRVRECPNSTMCSTTMLTTMVNGNEWIRVRRGCAKQVDHYFDYIGKHWEQKYRLMDLPEGCKKENGRMNCNCRGELCNSGSHSTPNFRLPFVLILLALVCGKILLPV

SEQ ID NO: 18484 - DNA, 3564 bp, DROSOPHILA
cataaaaaggcgcaacaggtacctcggtcgtttgcgtcagttcaattacatccttgaaaatatccaccaataaggagaaaaagccgtgtcggacgtatgagcatccggatcttccattaaacaaaggagcctcctcggcactctccaatatcttagtcagcaaaacgtccaaatcccgagcatcctgcaccctctccagttcatccagttgcgatgggatcagggagaagagcagcgatcgcttatggaccgccgacataacatcgtactaattacacaaaagttacacacatatgacgtcatgtcgccaactttggtctaaacagcgatcatacctgaaaacgcttgcgctggaacagcagattgacgaacttcttgaagtatgtgagtgccacggcatcctccatggccactggagacacatctggacacgtaggacactggcacaattcaccgggctgattgatatcgttaaccaggtccgaccaggcgggatccggactcagccaggactcatcgttgccgctctgacagcataccctgtgcaataccaacaggaaacaactgaccgctgcctccgttctcattgtcctggtttctcaatgtaatcactcctaggtagtaagcactcgataataattataattcagcgcaatttcgtggtaaggcggctgatgcaaattggcagtgtgaccaagtccagttagcaacatcacagcgtcacgtcagtgctgcaatatctacttatcacttcaggaaaatgtagctttatatttattagacaaacatgcttttatgatttttcttcacttctactgcaaattgaattatttttattaaacatctttatcaaataaatcaaacaaattgttgtaaattgaccaagatcaaaaatcgtaactgcgaaaaacaaagcattaaaataaaataaaagctagactgtcagcaccaaagctttatgcgatcgctagatggccacactgcgtgttgtgaataactgtttagccaggtcagcactgcaccaataattgcaagctttaaaaccgaaataaaaaccacgaggaaaatggttaggtcagctctcgttgttgcagccatcgcactttccgtacttattgcactgcagggcgtggatgccgacaaaaagcagagcaagaagtacagcaaggaggccaacgacccgcattttcagcaagtaaagcaggagaagtatgatccggattttaagagcatccagcggccatttcgcatggccaagttgaatctcgtgtgggccaaggcgcagaatgtaagtggacaccataagatatctcatatttaaccgtactaacctcggttacagcgcttaacagagcccaagctcaagtcactgtacatggaactcaagatccacgataaggaggagatcgcttggaagcagctcaactcgcagcacaaggacaaagacgggctgaaggccgacgaactgcgccgcaagctcattggcatcatgagcagctacgatctgctagagcattttgacgacactcaggatacggagaagcttaagccctacaaggtacgtatctaaatcatctttcctaagagcaagagtttctctacatccaagttaactttaagaaattccacgacgccgaggagcgacacagaaacaagagtcttttcaaggacaagaaactcaaccgactttgggagaaggccgagatttccggatttactgcagaggaattgaaatccttgaaacaggagtttgaccatcaccaggataaagtggatgtgtactacagcttgctggaaaacattggcaccgtagacaccgacaagcatgaaagtgagtttggctaaaaacagcacgaaaagcatcaattaatttcattgattattctcgttagatgctattaacacggaagacttggacacctacaatctgatttcgaatgatgtcaatgagaacgacatcaaaacccatgcgcaaaacgtgaagagtttcgagaacgaccttaacactctgcgaggacatcacacgggcatcaaggatcactacgataggctggaacgcctggtgtcctccggtccacacagtcaggacttcattgaacccaaggtccagggtctatggcgagtggcccaggctagcaattttacggttaaagaactggagtccattaaaaccgaattgcatcacttcgaaagtcgcctattaaagctgcgtcacttgcatgccgagcatgctttgcaaaaggagaaatacaaggtatatgtttcttaatatcaatcaagtttgtaagccaactaacaattatttatagggcgaaaaagtgaaggacaaaagcagccgctttgaggaaatggaggatcagctgaagaagcaaactcgcaaagtggagaagctccaggagaacattgaaaaaaccatcttcaagcacaccgagctttaataatttgaaagtgaaacactgaaagtgccaagcgaataaattagatttaattgcaactgtttgtgtaacgcacaaaaatattcattcttgctgctattcagcatagatataattttgataccaaatatcatttgaacataaataaaatctcaagtttaattttgaactatatacaatctattttgacctttaaaaaattcaatgtggaaaaaataaatttgtaatatattcaaagtacaatatagggttaagaataaaccgttaaaaaaaacgataaaattagtgtgaccatatgatagcaggcacaaaacgcgtatttccctccacccagtaggaccgcacctagtatgaccgcatgccagtcgcattattgttgttgtcgtttcgtttggtgggccaaaaaacaagaaaatattagctaagcgaaaagtttaaaaagttaatatatatatgtgcagcggtcggtgccagcgctttatgggtacatagtgcatatgtacacacaccgacatgggcatggtggaggcgtcgacgtcggaactgcacctggaggccccaaattcgtacacgtacctcctggcgaccgtcagcctgacgctcactttcatcgttatgctgggcgcttgtctctgctgcaagaagcggatccctaagtaagtcctccccaatacccagaggatcagaggatccacatcgtttcgatggctctagcgggaacagggcggtgcaggccagagagagagtgaaagtgggtctctttctccaacactacgccgcccagttccagttggatgcactcatgtcgctcgccaatctctctataccctctaactccacagaaatgacttgatgggcctggagggcatggtcaagctgaagaatccggatgaggtcattgtggtgaccaatctggtgggcaacagcgagtcccaggcggagctgaatgcctccacggtgtccaatgcggactcggaaaagcggtaagtccccatttctttgctgtctacataactgagctggaaataacgcatccttaaccaatttccaggtcgagcactgcagcccatcgcagtttgcctgacattcccgtggccgagagcaatgataatgggtccgaactatatga

SEQ ID NO: 18485 - DNA, 1332 bp, DROSOPHILA
tttagccaggtcagcactgcaccaataattgcaagctttaaaaccgaaataaaaaccacgaggaaaatggttaggtcagctctcgttgttgcagccatcgcactttccgtacttattgcactgcagggcgtggatgccgacaaaaagcagagcaagaagtacagcaaggaggccaacgacccgcattttcagcaagtaaagcaggagaagtatgatccggattttaagagcatccagcggccatttcgcatggccaagttgaatctcgtgtgggccaaggcgcagaatcgcttaacagagcccaagctcaagtcactgtacatggaactcaagatccacgataaggaggagatcgcttggaagcagctcaactcgcagcacaaggacaaagacgggctgaaggccgacgaactgcgccgcaagctcattggcatcatgagcagctacgatctgctagagcattttgacgacactcaggatacggagaagcttaagccctacaagaaattccacgacgccgaggagcgacacagaaacaagagtcttttcaaggacaagaaactcaaccgactttgggagaaggccgagatttccggatttactgcagaggaattgaaatccttgaaacaggagtttgaccatcaccaggataaagtggatgtgtactacagcttgctggaaaacattggcaccgtagacaccgacaagcatgaaaatgctattaacacggaagacttggacacctacaatctgatttcgaatgatgtcaatgagaacgacatcaaaacccatgcgcaaaacgtgaagagtttcgagaacgaccttaacactctgcgaggacatcacacgggcatcaaggatcactacgataggctggaacgcctggtgtcctccggtccacacagtcaggacttcattgaacccaaggtccagggtctatggcgagtggcccaggctagcaattttacggttaaagaactggagtccattaaaaccgaattgcatcacttcgaaagtcgcctattaaagctgcgtcacttgcatgccgagcatgctttgcaaaaggagaaatacaagggcgaaaaagtgaaggacaaaagcagccgctttgaggaaatggaggatcagctgaagaagcaaactcgcaaagtggagaagctccaggagaacattgaaaaaaccatcttcaagcacaccgagctttaataatttgaaagtgaaacactgaaagtgccaagcgaataaattagatttaattgcaactgtttgtgtaacgcacaaaaatattcattcttgctgctattcagcatagatataattttgataccaaat

SEQ ID NO: 18486 - protein, 379 aa, DROSOPHILA
MVRSALVVAAIALSVLIALQGVDADKKQSKKYSKEANDPHFQQVKQEKYDPDFKSIQRPFRMAKLNLVWAKAQNRLTEPKLKSLYMELKIHDKEEIAWKQLNSQHKDKDGLKADELRRKLIGIMSSYDLLEHFDDTQDTEKLKPYKKFHDAEERHRNKSLFKDKKLNRLWEKAEISGFTAEELKSLKQEFDHHQDKVDVYYSLLENIGTVDTDKHENAINTEDLDTYNLISNDVNENDIKTHAQNVKSFENDLNTLRGHHTGIKDHYDRLERLVSSGPHSQDFIEPKVQGLWRVAQASNFTVKELESIKTELHHFESRLLKLRHLHAEHALQKEKYKGEKVKDKSSRFEEMEDQLKKQTRKVEKLQENIEKTIFKHTEL

SEQ ID NO: 18487 - DNA, 17062 bp, DROSOPHILA
actgtgccgtggtctgtgtgaatcaggtggccaccagggacggtcaggatgagattccctgcttgggattgcagtgggcgcacctaggacgcactagactgcgtgtttcccgggtgcccaagcagcatcgcatgggtgatcaactgataacggtgcgcaaactggaaatactttactcaccagagactcccaatgatttcgccgagtttcttatcaccgcagaaggtgtggtcaatgttccagagccatctgttcccagcccacccgccaaaatgcgtcgactgtgattgattgaatttattctgtttattttgttatcgtttaatttgttgaatttaaaatgtgtaacggcggagcgttcaattagccatacgattgtcttatactcctgttaaattcagcggaatattttagggtttaataatttaaatttacttagttgccaatcaggtttaggtatcattaaaatatataaaaacaaatttagaaaacatgcttttcttatttcttttcaggaacaaaaggttttctgatgacctgattaacacgataacgcaatcttgtttcaattttttttttaaataaatgtaaagttccgataaatttaacccgagtttaagccattttccgggcataatcatcttatttgttgccttaattccttttttgtacaaacactcaataaatatgtttcattcaattgcaatttacagggtagcagagcttacaggcctacatacatagtatagttcatagttcaagtagtaaaatcaattttgtaatcgcctcgtatacattatcacatgaaattctcaaaagttcagattacaatttgccatagtttacgcggacatttaaatgcgacatttacaaaagcctagccttagcgtttaagtatattaaataaataaaatacaagcctaaaggtgaacggattacgcgacaattaaattacaattaagtaatacaactatgggggttttctttctgtttagttttatttttgtttttcttttgtttattgggatagtttatcctctttgtggatgagcaatattcgactttttggcacaagttaatttgactgtggtttcttctgtttaaatctcccgcatggcgacatcctgatcctgggaatcgtgagcttctatggaatcgccatgctcgctggaggacacctcctcctcctcctcctcttcctcgccgtctccatcgccttcgccctccgatgaggaactttcggttttgaccctcttttccggctgcatttgtttgttggccatggccaaggcaatggaaattttactcgcggccaatttgctttcaaaatccatttccgttagctggccattttgaattgccgccctttggagacttaactgcagttccctgtgctgcggagactcctctcgttttatgtccaatttctcggtttgttcgagtggagcggctggttctacagttaaaggtatggcatgctgatgcaaacgctggtgtagcaattgattttcattactattatttggccttttttcgactgcgggcttttgatcgctgctctccaattctgcacttcgatgtgcttgattagccgttttaactgtcttttccagcagcgcatttaactgctttttaatcttggtggtactctgtttggcgggcacttttccctcgctgttattaacattgttgtttaacgtattgttgttgttattgttactgccgcgatttggagactttggagatttcttgatctccgcaatggtggcggcattgccaacagtgggtgaagtcgcattgctggatctcttgtcggtcggctctccacttggcgttgttgttgcggtgcctgttgctcctggcttcgcattcgaggatttgtgctccgccgcctcgttatttgtgacattgtcctgtttcttccacttggtgcgccggttttggaaccagatctttacctgcaaaaacagtagaacatggattgggttagttaaggggtataggaatgcattcttttggaaaggcagcaccttgtgcctgaagaattcgcgaagttgtaacgtatatattctagcaaatttttcctgaaatgaaattcgttgctgcggagatacgaattacaatatttttttttaaatcagcaataaatatgtaagtattaaagccgagattaatattgccaacggttgtttccaggttaatacatgaaatgccgctcgaaaatgtgaccccaaaatggctgagccaaagccagttcacagccgcataattacgaatgtttatgccccatttggccttattagtgggcgcataacaaataactcgagagctgtgtatcctaacgttcgaaattatttgaatatacttccgccccgtcagtcagtcggtgctcatttttcctcagactccaaacgagcgcaatgatgaaatgacaggcgcacgtcaaaaggcaaaaatcgaagcccccccccctccttctcacgctcgcttgctgtttttcccaattttccccccttcggttttccaccgacggcaatggcgcaacataaaacatttgcctctcattttcgttttcatttccatttcatccagaaatgatgggccagctaaataaatgaaaaatctatttaaatcgcgcacataattagtatttcagcggcatgtctgcagatacacacacttacattcggatagagatacaaacgttaaagatagatgcctgttcgtagttcgtagtccatatgacatgctcatttcgccgcagtggcggaaaaaattatgaaattaacatgaaaacgccacgaaattacccatttcgaaaagtataaaaaattttaaagaggaaatggcccaagtacgcgccgcacaaacaaaatgccgtaaattttcgtatcgaaaatcaattaattgattgccaaatatttccgaatatactctcgcacactattgaatggcaatttgaattgctatatacccgccgatggattgatgcccatgcaaaattgtttattttacggatgaagatggattatgagtgagttttcctcactattattgtttttttttttcctttttgtgcccctaacaattgggcattactcatcccgcgtgccaccctcgaaatagttcattagatacattcatacattcatataaacaataaagcatttcccgtgtttaccttagccgcactcttaatggccagagccaaagtggattccttcctttcacctaaatggctttatttttatggccttttcgaatacgggccatcatctcatcatcgtcatatttaattgttgattattttcatgtgctcgaagtgttcaccgtcagccgtgtgtgcgatgatctaattgatttcggttttttcggattattaatgtttggggcgcgatgcgatatggtaaatattgcataaatcttcattaataatttatgtagcaacttaaaaattttccccgcttttgtttcgaatcgattgcgcaccgtcaataaactgtcttgtttgttgtgttttgatctgggcactaaacctcattaaggcgagagatgtggaaatcattctataaatacaccaaatcttgtcaaacgcccctcgcttttctttcgacccgctcctatgatttattgacatttaagtgtgtctgtgtgaacgtgtgtggcgaaaatgacagaaacagagctcataaatagccccaaaggcaaactagagtcactcggaaaaacacacaaaatcgatcaaatatttcccaggaatttccatcttcattatctcgtgtgctttgtgatttactggatttttttatgggataaattaagcaggaattcgcactaaattgtttccatatatttgcatctaaattcaaagttattcaataagaagctactattaattgtattttaatttgtatcccataatttctgtcagtgcaggggtatttgccacttaaataggtttatgacagatgcgtctaagctattttgttggtccaacacatgtatttcaatcaacgccagaagatcagagagtcgcaccaatccttaaatagtcggctagtcagtctggtcgggtacgcaattttctttgccccataacccatgctgttaacctccctgccattcaagccaccgctcctgcccctttcccaccccctcactcattttcgtttttttttcccccgtcgtctatgcgtgtgcttagtataattaattttcacattcgccgcgcacttttcgaaaataaacgaaggaaattatgtctggcccaacaatgagcggccaaattaggatggccaagtgtttttggccgccggggaatgggaaaaatgtaggggagtgagggaatatgggcagcaaaagagctactaagtaatggtggctgctgcacataattctcggtcgtgccaagaaaaattcaacaattttccgagctccctttttacaaataatgttttaatgtgtaatttagcatatattcggttcgtttgtttgtttgttttgtggtgttgaaaaaattatgataattgcccctgtgggcgaggaatgcggcgtcatattgccgtaggtgatggaaaaacaggaaaggaaagccataactcacacgttctggaacattgttgaacttaatctgtaattatgcacccgcagaaccctaaatcaaatgtaaacaaggtgaatatggctggcaaataatgcaaaagcaccttcgattcccctccgtcggcgatttcagtcgtgtaacgaaacactctgcttcgtgcaaatatgcgcaatgcattgccattactaattaataacataatcactgcattgcctgtcatttcggattatgtttcgcccacacaaataggccccacttatatccgccccactttgaaaattcgaaacattccgaaatgttaacagcaaatttcgggtggtttcaattttctgctgtgttggcagaattcactgtattcggcggcagtcactgtgaatttcgagatttagctacttaatattaagtaaactagttggaccaaaaatcttttcattgggtttcctaattaaattatgtatatccgatttctattgtacgaaaaaattgctacgtatcttgaaatggatatggaatggaataaatttataaatcaagcactcatattaaatcacagtgactagctaacatgctggttagcatctcctttttgaaaggatgctgtcctgggatatcgatataagagcatttgctttaaattcgttgcttattaattaaggcacaaatgcaaactgatgaagccagtctacgtgtgtgttggcaataacaacgtaacaatgctattatcaccggatatccaatggagtccaagcccacaccccctttaacatccgcattcgcatccgcatccgcattgctccccgagttttgcgtagcaagtgcatttaatgtttcaaaggagttggatgtggaatttatgcaacatcattattacacatgctaaatgcaatcaaaagatgatggttatttggcatggaatgccataaatctaaattcgcaatgcaactgtcggtgaattcggatggaacgtatccgtaattagcagatacgaaataattcaacttaaatgagagaaatttcatcagtcgagattagtgaccccaagcccaaaaagaagactcatttgaagcgatgtgtgaaattaaaaaattttgcgatgcaaattggcattgccaaaattgtctagcccatttggggggatcaaaatgtaatttcgtactagcatttctggcaaattcatctaaaataaaatcttttctgccacaaattgaaagccaaagtgtgtgcatagaaagcccgaacatacatacataaatcaacaaaatgcagcggaaaataaagcaaagagcctagagaagcaatttagttgatgatttttcgttttcgtatcgtattcgcgtcgctttcgtgttttcgtttcattttaatttgtatttttagttcttatttgatttgctttgcggttttagaatttgatgtcagcttggcagtccaaagtggcagaaagcagcataaattatgcttattagttgcactgaaaaacaggtactaaattgtttttcattttttcctccagctttgacagaagttttggccaacttcgccctcttgactgttaattggcttattgtgttggattgtctaaaatgttttttttttttgcctccgttttgttgccatgttttctttttcggttagctttgaccgcccactcaagtttggtggattgtgtttgggccagttcttgctgcataaagtgctcattaattacttactggccgctcaaagttaattgttcatattttatcaaaagaaagaatgagctgtcaactgctgctgactcgctaattgccaagtgcttagttctggcagcagtttggtcaaaataaaaaatagccatgtcaaaatatgaaattcagcaacgcccacaaagagccgacgatagcgatcgttgtctactaactgcggcgatcgtacatccgacagagatagtcgatttctatagacgattttcgcaagcgatcgacagagacgggacgagctatctgaaagatctgccgacggagccacgccctctgtttattttcaaacagttttgctcgtcgccaatcgaggcagatgcctcgtcggtgctttttatatttgaacgggctagaaaaaaagaaaaaaaaactcaagtggcccgccattaagtcgagtgcttatgcaaattttattccaaccagtttgtttaaagttagtggggtttatatttcaagacatttaaacggtttttcgaaagttatttcatagaaagtttacgtttaaaataccattaattacctaatgcacaggattttcaaactgtaatacctcttaaatgctgctgattaaatcccattgggaacaaaacccttttttgcggtgtcatctggggcgtatgcgtaacaatttaattaagttgtggtgccgaataatactaataacagcaaattgcatttattgttttgaattatgcactcatgcacacactttgacactttgtggtgaccattgtgctagtttatgctagccactttggaccgtaattaaatgtgagggtcgagagagcaaaaaaaataataataaatatatcagtttgcgaaatatttatttattaattagtaaaaaaaaaaagaaataagcgctgctgtttgcatagcctaaaatgatttcgtgttcgtttaaatcgttgaaagcctacgtggcgtatgcgtaatatttgtttgcacattttgcggatagtgcgcttgtgtgcattaaattattcacgaattgattaaataattgccgactaataaaatgtaaattagctttaattagttaattaattagccaaaggcattcattacacagccgctggagtgttgagtgcgcctttatagatatgcaacgaacgatttgatctttaattggattaaaactcaaatttattgagcgttaagtaggtttgccataagtcaaatccattttcttatacttcgaaaaatgtcgtttattccttaatgggctgatgccaataaaataaatggtgtttcacgtccatttacttaaggcaataaatatccagtttattcaacacagccaaccttttaagaaactattttttcgaagttgtttttaatttatttgattgccagccatttgtacgttacataatttgcaaatgatagaattatctgtgaattgcatacagaattcctttcgctgctgcaactgattgatatcactggcaatattatcaatactaaaggaagtaagcaatatgatgtccttgtttacatcgcacacacatgcgaatttaatttaatgcagcataattttttttagccatttttgcagtgccacaaacagactgcgaatgtaaataagtccgatactgtgcattcgaaactccaaaaacacattgctctagttgggtcaccattatgtggtgccctcaaagatgaattgccatttgatttgtttgtgctgcttgtggcagcagtttaatttaattatcgcatttgtcatttggccaaatgccagtgaaactgctgctattgctgctgcttgtgttctggcccacaatcgctagggccatccaacgaccatgcaattgaccatataaatacaaacaaatgggcaaatgtagagatagttggcccaaatcagaggttaaaactacagagtatcgaaatgcaaaggagttttggacttgcagtttaatcaaatcatgtaaataaatgcttataaaatatataaattaagtttaaattctgaaatactaagatactactatacacttttggtgctattaacccgttcgattggccaaatataccatccctttgcattaatctctagctgcaatcagaatcaattaaaaaaaaacccgtttgacagtgagtaaatcaacatttaggtcgcacctgagtggcaattacattcgggtttatgagcgagcgatggcaaacatttaaaatgaaatgcctaatgcaaattgtcgagacagttgcagtgcagaccgcaagcgaacagttgccagcacacgcccctatgctatcactgcggcattatggcgcaccaccccccagaaccacccaccgcaccacccactgcaccaaccccgggctccacatttcagagcaccaccccagccgttccaaccaccacccccccgtacccacaatttccccccgccccaggcactaatatgcaaatgtaatttgctgcgtttggcgcgtgacgttcgtttggtaatcgcaacacaattacaatgttgtcagtttgcatcagtgtgggtgtgtgtgtgtgtgtgtcgctgtgtgcgtgtgccgcagggggtggtggtgcagcggttgcagttgggacagccgcatctacgcgtaattaattgatttttatctggcttaaggctattttacagtttgttgatgacagacgatgcagacacgagtgctccctggatgaggcacacaacgtggagcgagctgcaccgctgtggcggtgccaatggcagccacctcaattcaactcatctcatccacatcatccacatcccattccccaagagtccagagggcaagccatatgagagccacattatggccgatgtgtaggtctatttaaagccaattttatgactctcattttgtctctggcattttttcatttgttttacgtttgactgcgaagtttaattttcaaagtggaagcaaattgtgtcctttaggaatataatacatattagttgattctatgaatacgaatattgtcattaaatcaagtatcattaaaaattccatgaaatagcgcaagtattaagtacttaactcgacgctctgcttaaaaatgacttcgtaaataatttgcgaaggaaatcgggaaaaccttgatccgattataaatcgtgtaattataagttttaaactgcaattgaactggttggcaattacgggaggagttggtaatttgattccaattaacgcaaatctctcgctgcaaaacttgatccagtgtgagtggtgggtcgatgggaaaattggcaagtgccaatgcaaatggccaaaaggcttaatgtccggccacagcaggatacccacatacacaacacacatacacgcgcgcacacaggatacctagcacacacacacacacacacacagaagcccgtgtcctgcagttaatttgctgatattattgctgtgattaacacatacatgtttatgtgccctgaccgtgttttatatataaacacaacaatctgagcgcagttgtgtgagcgtggaaatctgtgcattgcacttgaattgacgtcggtttctcacgcacacactcacacacacacacaggcagacgtgtcctttgccaggatgataaatgactggagcgagcttataatattaataacgtagacaaaacacttgaacatgtcgacatgcataacattttggctcacatagacagttggacatcaagcataaagcactgaacgaaaacatatacctaattggcttaggttggggtcacttgaatttttgaagcaagtcatttagctattttgcccagtgtacacacgcacacgctgcagaatccttagtgtttatatgtgtatatcaacttgtaattaattgacttgatggagaatgtaatttaattaagcaagcatttcaatgtgactccgttgccatatccttgttgttgccatggcccatttgcttggtttccatctacatgtacatctactatacattcctcattttctctttgccttgtttggttgtgtgtgtgcgtgtgtttatccgactgggtcttttgccatggcagccaattagtcttatggcatttgagctcccacacggcgtatgcgtaacgtgagattattaatgcaaatcgggtttgcattgacaggcccaagttttgacagctttgttgggattgacgaggacatggtatgaagcgggatatatttatgggatataatggtatataaatatattcgtatttgcgttaattggagcgtttgcctaaatacttttcctaagctgagccctaaatgcttaattaaagcgattcaaaaatcaggacaaatcatttgcatttagagagttgatgccttaaagctgtggctaaacttttggtatttaaactgctcactgtcaactgcaagtgcagataacaaacgacttgagcgtgtggccaaatatgagtatgctgtttgggacagaaaccgcaaaagggttcaggaatggcattaaagttttgattaatttagcgcctcttaaagagccaagcacacagatggcaatcatgtgggtgtgtttgttcataaattttgttgttgctcttaattggctgacagcagttgggccccgggcatgtccttgctgcaaagttaatttattctaattagtcaataaatctcaatttatttcacaatcaggcaaacccagtgtctgtgtgtgtgtgtgtgtgtggtgtgtttgtgtgcacttgagtgtgagcttgtttgtgctttaaggcatttctggctgccatgcgaattgtaaacttgtccttcgccttcgccccttgaaaatatatgtacatatatgcactctatcctccacaaaatcacatgttcgggcagctgctgcaagtgcaaatgcaacgaaatacaatttggcattataattactgaggcattaagcagcatcacaccttgcttcctcttgttatgctcttcaattaaattacgatatatttcatggctcccggggtgattcgagttgggtaaataaatatcggattaaactaatgcggccagcggaatcggaaaatgtctatttttgccaaaatgctgatcaaattatgcttttaatttggcacggttttatttttcatcgctacagttggcatcaaagttctaaagccaaaacgcagtgaatgtttaaaattattgcattattgcaaataataataataataatgaaatagtaatcctatttaaagttgaacttattaagttacaaaataatttagaaaattaacaaggtataatttcgctgccttgttattactgtagactactgtatgtggaattctattataatttttatgttagcttgtgcatttcctcgtgcaaattaggcaaattaaatattataagcatacgcacagaagcggacaacaaaacatttatgggattattgagggggttttaaaaagtgtttaatttagttaaatggccacaattgcgattgtgctttttgagctagaattgaccagtaaaatattgtgacactaaataatttgaataatcccacaaaaacattatgtacgctagctgcaatttgcaatgataatcagtgggggttaaatcaatatgaaatatttttaatcatattgcataaaaatatggcatcattttgagaaaaatctcaattgaaattatccttgctaaatcatatacttctatggaattctagtatctaaaatttcaaggattaattcttaacgatctggacttagaataacatatatatactatattttgattagtactagtatgttatcttacctgcgtttcggtgaccatcagcagcttggccatttcggtgcgctcgctggcgctgagatactttttgttctcgaacatcttctccagctcgaagatctgcctgccggtgaacgtggtgcgtgccttcttctttcgccgcgcatccgttgaaccggaatcggagtcatcctcggtggtctccaatgtgctgttcgcattgctctgcatttgcgcattcacattgctgcccggcgaactgctattgttggccatcaacttgtcccgcatcaaactgtcactgctgcccgttggactgatatccggtggtagagccacagttgacgatagcttctttttcttggccgccggcttaccagaactttctgcaaaagtgatggagaagaacaaaggtatacaatgaaacgtttagccagatatgagtgtgcacatttgtcttggccatgtttgcctggcttttatatcgaatcgcagctgtttaacctcaatggggccgcttggctgccatttcataaccgcttttgcaattagcccgtcaaatgtaacagcaattgactgggccaactggctttttgttatgcattgttcgattcctctactatatgcatgttttcccctttcttgtttctactcttttcactatgcatttgtttgccatttgccataagctcttgcttttgttttcgattttgtactcttggattaggtggcttagtttacttatggcacaacttagcagaaacattgcatatagcgaaaggattgtacgaaacaaatttctcattcatataatagtcctttgtttaatacttaaatacttaaaaaaatcgctcagctagttgttaatttaataaatctattagccctcgcagggcatctattggccactttcgttgaccaatggccgccttgcaaatatcgggcgaaaaaacaagtgttaactgtgcttaataaatgccatatgcttttggccgcggcttttggacttgacggggccaaaacgtgtctggcatgaatcggacgaaacgttgcctggacaactacaattaccaatgcataattgaaatctaattgacagttaaatgcaaaacgctcgatatcgctgagctgtgtgtgatgtacatggttgtttgctgctgtttctgtcgtcgttgtcgttttgtcgcattgctaatacgccgcgtgggccccggcggcctcatatgcatgacactgtgattaattaggtggtgcgggggtgacatcagtgccattgtcgccgtattttcgctgtcgccattggcaattggcaattttctctatcgaaccaaactccccacccccccgagaaaggaaatgagagacgatggcagtggagtgttaagggcgccccaatggcgcgaaatcaataaaactaaatggcaaaacaaaagcggaaaaacaacaagctggccaagcgttaaaagcccgcaacttgtgcaattagagcaacaacaataaaaccagaacaacaacaacgaaaacaaatgcaaaaaaaagaaaactttgcacaaatgtttgcttatatttgccagcagcagcatggctcttaacgccaattggcaatttccatgtcatttccattaggcccagtcgatgacggcgggcatttaaatgtcgttaggccaggccaactgggcaaaaaagcaagaaaaattggagctccatcttggaaacgaaaactccacttattggcccgctcgatttgacggcactaccatttatggcagctgcaaacaagtaattaagcgaaaaattaaccgatgactatgtcaaacaatcgcttgtctggaagttcgtcattcaatcggtttgctgtttggctgttgttttcgccaagtctggtacgtgattttaataacaataaaaacggaacacacacacacacacaacattgagcaattaacgcgccaagcgaatagtggcagcaaaattattcaaatgtatgttctcaactttgcttgtttttgcccaccgattgccattttgtatggctttcattgtggctgccgcaattgctaattgcattttcgtatattttcgtgccaatgcgctggcctctttcgaattaaatcattttaatgcacccaatgcaaatgcatattcaaattggcaaccatttccgattcaaatatgaaataaaaataacaaagcaatgagccaaaaatgcttctaattaaattttgtacattttgttgaccaattacaatttcaatagcttattaattatcgcaaaaagaacgacctgaatgtatacgcaaacattgtattgactgaacattttctggaacgttttgttaacgatttaacatgagtttatttatgtaaaatgaaatttgaagcgcagaacaatggaaaaaaaagtgacaagatttatgtatattaaataaccaattaaaactttaaaaattttagaaatgaattagctattttcatgttttcaaaccataattaaactgtaaatggcatataaaattcatagaaaattgagtggctgacagacgagccgcgttaactggagtgtgctgaattctaatgacctggccattagaccagccgaaataaaaagggcccgaaacgttgagcgggccaagaagatgccgatgggcatcatttaagttggcataacacgcatacgccgtgttgcccgccgcacgcttcgctgaagcgtgttgagagctccacgctccgctcaattggcaggctcgtcgagcgttgccacacggcacacacatcctacctatgctcggcgccaatatgcgagagatcacatcagaaatagacacactttcaaaaaatattgcctaaattaattatagattttgagctatctatgctaaagcaagtttaggcaagcaagtgcttttaaatatacagttctaactattcgcaactctaagcaatagcattaggataaatcttagcttatccaatatttaggtaatattagttttttttctctgtgtacaagtaatgcccaatacatacccttcttggtagcagactttccgaggatttggctctgtttggtggccggcatgggtgagttgttgctgtcgcgagactttttgaccacacacagatttagcggctgatcgagcggagttgcaacagttgctgctgtgatggttgctgccactgctgctgctgctgttgcggcagatgttgccccagcaacagcggcactctcctcctcgctggcatcgctcatcgaaatggaggagcttcgaatgggctgctgttcctgatacggtttcagtatgctattcggcgatttggccggtccttgggcatcaaaggcgacctctggccgttcctttttgacaaaggacatgcccaggatatcggcgatggagtggggcgtcgggtgtggcggcagtcgatcatagacatgggcatgccaattggtgggcggaccaggtgtggttgtaatcgcaggtgtgctgaccgaacgccgttgctgctgcagctggacagtctgctgctgcggctgctgatgctggggatgcactgaacttggccggggcgccacaaccgcctccagttgcttttgcagaaacgttgtgggtggactgtcggagatcgtgctggccatgttgttgttgtcacgcacgcgcaacatattcaccagcttctccttgctgttcccgatgggactgaccatgtgcgtggtcatcgaggtgggcggtatggtcagcggactgctatagttgtagccattgcaggccatcttgtacagatcggagttggactgctgctgctgctgctgctgctgctgctgttgatgatgatgttgctgctgcaggtgatgcagttgttgctgctgctgctgctgttgttgctgatccttaacaataccgtaattatgcgccagggcgccactggccatttcagctgcctccaaatgtgcgtcgcgttcagtttcgggcatcatttgagccacgttgcctgcaaataaggaaaatgttaaacaagttagtactgaaaaatggagataaagtgagagagcaaacttagattagctcgaacagctgcacatttgtcgtcaacttgttaacggtctgcctgccaactggcgcctggtaatgtaatttgtgcccgccctcgacgtgaaggccaaaaggcttcgtttacagcggacctccacttactttcaccgaacatcaccccccgtcccattgacctctcgtccacctttcaacttccccccactcggcagagacccgaaagtaatgcaataaaatacagcgtcagtccgttgccacttgctgcctgtgccgcaatgtgcactgcgcaaaaatacttgatatttttgagtttgggttttctcaagccagattataaacgtagctattagtaatagctaaaaaaaagcttaaaaaagctttattttatacttatactatttgaagccctactgataagtatcacctaattgtttgatcctcaaaaatgttcaattgtgacgaaatggcgaaatcagtgacgaagaaagaaaatgctatcagagctaagatggtttgtaatatattttagactaatcatagctgtttggctttccgataagattactgctttatgaatcataaagttagcaaggtaagtgtatattatgtactcgtacaaagaattataatttaattttcagtgcagttcaacttatttaaccctccggcaagccttggcttcggcttcacccgacttgggttgagttaaagtgggttgggactgggacgagttgggtgggtcaggcgtagcctatttcctggcgcactgcgttgtgatttgcataacaaaatgttgcacaatcattgcgaaagagaggggcggagcgagcgacaaggatagagggagatagagctggaggaaggatccaactaggcggcacatacgttttcaagtgctgaatccacccggtgggtggtgggtggtgggcggtgtcgcacagc

SEQ ID NO: 18488 - DNA, 2284 bp, DROSOPHILA
ggcaacgtggctcaaatgatgcccgaaactgaacgcgacgcacatttggaggcagctgaaatggccagtggcgccctggcgcataattacggtattgttaaggatcagcaacaacagcagcagcagcagcaacaactgcatcacctgcagcagcaacatcatcatcaacagcagcagcagcagcagcagcagcagcagtccaactccgatctgtacaagatggcctgcaatggctacaactatagcagtccgctgaccataccgcccacctcgatgaccacgcacatggtcagtcccatcgggaacagcaaggagaagctggtgaatatgttgcgcgtgcgtgacaacaacaacatggccagcacgatctccgacagtccacccacaacgtttctgcaaaagcaactggaggcggttgtggcgccccggccaagttcagtgcatccccagcatcagcagccgcagcagcagactgtccagctgcagcagcaacggcgttcggtcagcacacctgcgattacaaccacacctggtccgcccaccaattggcatgcccatgtctatgatcgactgccgccacacccgacgccccactccatcgccgatatcctgggcatgtcctttgtcaaaaaggaacggccagaggtcgcctttgatgcccaaggaccggccaaatcgccgaatagcatactgaaaccgtatcaggaacagcagcccattcgaagctcctccatttcgatgagcgatgccagcgaggaggagagtgccgctgttgctggggcaacatctgccgcaacagcagcagcagcagtggcagcaaccatcacagcagcaactgttgcaactccgctcgatcagccgctaaatctgtgtgtggtcaaaaagtctcgcgacagcaacaactcacccatgccggccaccaaacagagccaaatcctcggaaagtctgctaccaagaaggaaagttctggtaagccggcggccaagaaaaagaagctatcgtcaactgtggctctaccaccggatatcagtccaacgggcagcagtgacagtttgatgcgggacaagttgatggccaacaatagcagttcgccgggcagcaatgtgaatgcgcaaatgcagagcaatgcgaacagcacattggagaccaccgaggatgactccgattccggttcaacggatgcgcggcgaaagaagaaggcacgcaccacgttcaccggcaggcagatcttcgagctggagaagatgttcgagaacaaaaagtatctcagcgccagcgagcgcaccgaaatggccaagctgctgatggtcaccgaaacgcagcaggtaaagatctggttccaaaaccggcgcaccaagtggaagaaacaggacaatgtcacaaataacgaggcggcggagcacaaatcctcgaatgcgaagccaggagcaacaggcaccgcaacaacaacgccaagtggagagccgaccgacaagagatccagcaatgcgacttcacccactgttggcaatgccgccaccattgcggagatcaagaaatctccaaagtctccaaatcgcggcagtaacaataacaacaacaatacgttaaacaacaatgttaataacagcgagggaaaagtgcccgccaaacagagtaccaccaagattaaaaagcagttaaatgcgctgctggaaaagacagttaaaacggctaatcaagcacatcgaagtgcagaattggagagcagcgatcaaaagcccgcagtcgaaaaaaggccaaataatagtaatgaaaatcaattgctacaccagcgtttgcatcagcatgccatacctttaactgtagaaccagccgctccactcgaacaaaccgagaaattggacataaaacgagaggagtctccgcagcacagggaactgcagttaagtctccaaagggcggcaattcaaaatggccagctaacggaaatggattttgaaagcaaattggccgcgagtaaaatttccattgccttggccatggccaacaaacaaatgcagccggaaaagagggtcaaaaccgaaagttcctcatcggagggcgaaggcgatggagacggcgaggaagaggaggaggaggaggaggtgtcctccagcgagcatggcgattccatagaagctcacgattcccaggatcaggatgtcgccatgcgggagatttaaacagaagaaaccacagtcaaattaacttgtgccaaaaagtcgaatattgctcatccacaaagaggataaactatcccaataaacaaaagaaaaacaaaaa

SEQ ID NO: 18489 - protein, 722 aa, DROSOPHILA
MMPETERDAHLEAAEMASGALAHNYGIVKDQQQQQQQQQQLHHLQQQHHHQQQQQQQQQQQSNSDLYKMACNGYNYSSPLTIPPTSMTTHMVSPIGNSKEKLVNMLRVRDNNNMASTISDSPPTTFLQKQLEAVVAPRPSSVHPQHQQPQQQTVQLQQQRRSVSTPAITTTPGPPTNWHAHVYDRLPPHPTPHSIADILGMSFVKKERPEVAFDAQGPAKSPNSILKPYQEQQPIRSSSISMSDASEEESAAVAGATSAATAAAAVAATITAATVATPLDQPLNLCVVKKSRDSNNSPMPATKQSQILGKSATKKESSGKPAAKKKKLSSTVALPPDISPTGSSDSLMRDKLMANNSSSPGSNVNAQMQSNANSTLETTEDDSDSGSTDARRKKKARTTFTGRQIFELEKMFENKKYLSASERTEMAKLLMVTETQQVKIWFQNRRTKWKKQDNVTNNEAAEHKSSNAKPGATGTATTTPSGEPTDKRSSNATSPTVGNAATIAEIKKSPKSPNRGSNNNNNNTLNNNVNNSEGKVPAKQSTTKIKKQLNALLEKTVKTANQAHRSAELESSDQKPAVEKRPNNSNENQLLHQRLHQHAIPLTVEPAAPLEQTEKLDIKREESPQHRELQLSLQRAAIQNGQLTEMDFESKLAASKISIALAMANKQMQPEKRVKTESSSSEGEGDGDGEEEEEEEEVSSSEHGDSIEAHDSQDQDVAMREI

SEQ ID NO: 18490 - DNA, 4871 bp, DROSOPHILA
tatttgccattgtactccacattggattcctgggaaatcggatcatcgttgtccgtcgccgaagcagcgaccacaaaaagggcaattaacattaggtacttcatgacgggatctctattccgctctatatcgatatcactgcaatgcaatccaagctggtgtctcggttcgactggtgatcccagcggtaaacaaagactcttatataggcaacggaattggcgagctgttgaagccatgataaaattcctgtactaaaatatttaacatgaaattaaaatgtgaccaataaataatattgaactcgttttgccccgctttccgttcgtcgctggcctttcgaaaatgggtgtgaaattttggtgcagacaacttcgacgattccggcctgcccccacattgtttttcaaatacaaatacaaattcaaataaatataaataatagtaatgtggtgccatcttcagtggacactcgtcatcggcatcactcctattctggttctcgccgattcctaaccaacttgaccacatttttgtcagcctgcgtctggccactttgcataagatgaatctatcacatcttaatctcgccttgaagtgcaaaacagagtggaacaatagaacgagacattatttttgggcagagtctatgaatagccacgttacgatctaaagtcctatgtaaaccatattctcaatatgtgtgtgcatctggacggacaaccagttatgtgaatgcattaattccttttggcgtttgtcatcgctgctattgggggaattgtgaatctagatttatgaccacgacagaagcaccaaacatcgaatggaaatacgatgcgcgagataatcagtgtcagtgggagtagtttgctttagatgtcaaaagttgttcggaaaccaggtgcagtttatcgagacttcgactattaaggattatttgaggccattgagtttgccgattcgggcatatccacataattaaacacctgatttgtttacttttcgaaagaatctttaattctttatttgcagctaaaggctaaagaatatcatcatagttcttcacaagagtttgtataattctcgacgcaacgaggaatcctcatcgacatcttggctaagactacgtgtaaatgtttctaatttacagactatttacacaaagttcgctgttgataatattcctgtatattatttagttaatttcttgtttgcgtgtattttttttttttacattttccttgttgatttcattgataaatcgacgatatcacatgagtccgaaaatggcagagttccggcgactaaaagatctgaagagattcgcatagagtagtagagttcgttggaagaaagcaagaaatcagactgggctatcagtatcatggtgttgtcatgtggttctcgtgtcgtgttgtccctcacatccgtttgagtgtgtgtgtgtgtgttcttcagtcagtggatttggccgacctttgacctcctgagtgggcaaagaagtaggaggaggcgaaggttacagcccttggcttgtgtcttatgagtgattgtctggggatcggaattggggtgttgggcagcaatcaacttgcagcaacagagcagcatctacacatcagaatcgaagttggtcagaatcgttggtcaacatctggcgggtaatccactcctaacgacgctttgccggtggcaggctgagcaggtagtcaagggccttctggatcgctggcgggattggtggcggagtgggcagatgatcgccctgcggctggaaaccgttctcatcatcggcggagtagttcagtgtgatcaggttaccctcgggcgaggtgtacgacaccgatcccctggcgatgatcacgtcactggagtctggcgaagtggccttcttcagggttccggtctcctcagctttgattccattggccgtctcatagctgcaagcatataaattagtagggtctaatcgaattctccttgaaatcttgctataaatatatataataaaaggcttaatatcaccttgtttttatgcatcattcgtctggcgccaagcaaatcgaattaaaattcaatcaactgtttaacttttagcatttctgcgcagacctctatttaaatatggctcactaatccatatttcgttagctttattagcatatttttttttttattctaatggaagcaccaatagctggttttgctaacggattgagggaaaagtgttgttgggggattatcgtttgtcttaaactatgtaagtcactttagggggtttcttaaaaagcgaaatttagatattttatccccaaagtatgcttcaaaatcagttttttttagcaacggacagatattaattgctatattactaagatttttcaagcacggcttttaactataatgggttttagagacatgagataattaaagattgaagttcaattaacgtgtaaatacctgattaacacgtattattatgacggttcatatattaaaacgattagtgtgtatatcttactaagatctctaagtaaatcaattaatactatgctaatctcacccttaaatataacataactattcagatcacttacgcatagttgtaggatccatctggctcaatgttggactcctggctgatgatggcgatgggctcctccgccttttggggggcagcctggcagcagctcatcaaggcggtggccagcagacagagagcaaactgtcgagggcaaaacgaaatggagagttccgcaatgttagccgagctaataaacatcttgaaatcgtgcccgatgctatgagtgctattatgcaacgtccccgaatgccgggagatttattgccttagctatcttcgctattttatttgctgttctcacataccgggctttttagacaccgttttgaggtcgccaaatagatgccaattaaatattttccacatttccacacacacacactcactcacacacctaatgtcgactgactcaattaacttttacacaaaagagcttggaaatgaaggggcgtgttccactgcctcatcggagttggtaagttgggcttacttctcactttttggccactttgagctcaccccagttcgagattgactcttgggcaattgtcgctgaagcgagctgaatgggtttcgttttccatctgggattccaatttcgtgtctgaacttttcagtccgatggacagctgccaggtgttgttggtccgtgggtctgactctgacctttgcgtggctagcaggctgcctcggaattcgaatccgttaattgcctttggcttttaagccattcaaatggcaatgtgctatatgtttttgcacccgcctttacgactggcgagcctcataattgcggaagatttagccaaaaaaaaaaaaaacatctcaaaagggcctcggtttctttcctgaaccataataaatgcctcaaaagctcaccttaggcgattgatttacgatggcttttactgccggagcatgtctggtcatatgttttatgggaattggtggaagaagatgtggattgccaccgaattttgtatctgtcattttttttagaactcatctaacttgcgagaaacgtgatttctttcaaacttagctttgctgaaataagtgattcttgattcacaaaggctctcacaatgtatccctaatgtcagctcaaagattttatccttatggacacttttcctattcgtatgttacataacaccaccgatccactcgactcctttggcacccacttacgttcttcatcttgttagaaattcggtagtgtaatccaaaaggcaagtgtatcctttcgtctgggtcctcagcacactgcagttgttaattgaacgaacgtttctatttaatgatgcccaatgccggcaggtgagtctatttatacgaaaattgcactggcgaggctgcaaacaattcagtttcagttggcaaagcgtcgcacacacacacacacacgttatagccaagatgcaaagctgcgacacgagtacggccaaaaccaacaacgaacaactaacaaccaactcgcaacttggctagtagggggatgggtatgggtgcctagattggtgggtgggttggtaggtgacgaggtggctggccagagaaaagagaagacaaactaaactaaagattcaacgccttagtcgcagtctcagtcgccgtcgacgtcgccgtttccaaagagcagcagaagcgacgactgcggcgaaggcccagttgttctgggctggaaataaagaaccaactcggtactaagtacacgtaatttatgcaattgcttcaggtttttgcagagcgtctacaccatttaaatctattgcttggtaattgcatcagccggcggaaatagatacacagcgatacaaagtgttaacgattataatatctaaatattcaatgatctagttttatagcaaatggtaaaatatttgtaaattatgcgtatttacataggtatcaacttgatacatgtaattagtaaatggagtaaatgtattacaaatttagcttgctagttttcaatttcaaatctttactatagagattgtgctgctgagggaaagatttttaaggtaagaactgatattatagaacttattttcaagtcgctgaacaactaaactgtttttgaaacgatttctaaagaaagttttcgaaaatttccaaataatttcaaaattttcaaaattttgccagtcaaattttcttcagtgtatgcatccagcaagcgacgaaagaagaacggtcgatggatacgccccagataaacgataattataatagcgatgatgataccgatctcgccgccggcgttgccacctgactcgaa

SEQ ID NO: 18491 - DNA, 1164 bp, DROSOPHILA
ttcaattaacaactgcagtgtgctgaggacccagacgaaaggatacacttgccttttggattacactaccgaatttctaacaagatgaagaactttgctctctgtctgctggccaccgccttgatgagctgctgccaggctgccccccaaaaggcggaggagcccatcgccatcatcagccaggagtccaacattgagccagatggatcctacaactatgcctatgagacggccaatggaatcaaagctgaggagaccggaaccctgaagaaggccacttcgccagactccagtgacgtgatcatcgccaggggatcggtgtcgtacacctcgcccgagggtaacctgatcacactgaactactccgccgatgatgagaacggtttccagccgcagggcgatcatctgcccactccgccaccaatcccgccagcgatccagaaggcccttgactacctgctcagcctgccaccggcaaagcgtcgttaggagtggattacccgccagatgttgaccaacgattctgaccaacttcgattctgatgtgtagatgctgctctgttgctgcaagttgattgctgcccaacaccccaattccgatccccagacaatcactcataagacacaagccaagggctgtaaccttcgcctcctcctacttctttgcccactcaggaggtcaaaggtcggccaaatccactgactgaagaacacacacacacacactcaaacggatgtgagggacaacacgacacgagaaccacatgacaacaccatgatactgatagcccagtctgatttcttgctttcttccaacgaactctactactctatgcgaatctcttcagatcttttagtcgccggaactctgccattttcggactcatgtgatatcgtcgatttatcaatgaaatcaacaaggaaaatgtaaaaaaaaaaaatacacgcaaacaagaaattaactaaataatatacaggaatattatcaacagcgaactttgtgtaaatagtctgtaaattagaaacatttacacgtagtcttagccaagatgtcgatgaggattcctcgttgcgtcgagaattatacaaactcttgtgaagaactatgatgatattctttagcctttagctgcaaataaagaattaaagattctttcgaaaagt

SEQ ID NO: 18492 - protein, 121 aa, DROSOPHILA
MSCCQAAPQKAEEPIAIISQESNIEPDGSYNYAYETANGIKAEETGTLKKATSPDSSDVIIARGSVSYTSPEGNLITLNYSADDENGFQPQGDHLPTPPPIPPAIQKALDYLLSLPPAKRR

SEQ ID NO: 18493 - DNA, 3872 bp, DROSOPHILA
ctgaaacgaagtgcaacttaaaaaaagtagtataaacaatgtcggtgatttcaaacgattaaatggacttaactaatgtcttatttaggaaaactattataatatatctatatatttgttcagctagtagtaggtatacatatttgtttaagccaaaataagtgctgacctgacccattcctctatacactgaaagtagtttatattaacttgatccgtgataaagtcaaccccagtttatgaagagggtaagaaggtcaagtgccttgccaggcttatcagcttatcattatagcagccgagcaacaggtgacccccactccgcgttagattcacgaacgtacggtgacccacttaccgcgattcaagatgccagcgatgaggacgggcgccgctggaggcgtggcatggaccacgggcggggcggctggcaggagctgcggcttgttggggaagtcgtcgaaactcaggccggtcacggaggcgctcagaagcggatttttaacgacacgcgtctggtttgcgttgttgtttacgcgagcggacacgtcacctttcgatctttccgacatattagcggccgatctggagctttaaattgggctaactcgatatgaagatgtgtgccaagtgcacagttgccttaggaattatttttatacacaggatattgacacccacgacggattaaaagcgttaaacccgagaaaacttccaggcaggcaatattctgcttctttccgcgcattggccattcgccatggaaagcttttaccagggctgcagcggatccagaaatggataggcaaaagctggtaatcaaaatatgcttataacatatatattcctagctagttttaactgggaaagagtatgaaatctccgtgactaccataaacaaattttcaaaaatccaaataaacagcaaaaatagccaaatattgcttttgctgcagccctaattctcggatattatttcgaattgcaatttgggaagaagaagagtgaagtagataaatcttgatgatttctgcaaatattagtttttaaataaaattaatggatttgtagaaactctgaccgtattaatcgagtttaggactacaagtgccgtaagccccgtcatgccactgttttaaaacaagtggaaaaccttagggtcaattttttttggggaggagaccacaacaaataacacccaccgaattaactacgattactcatcgccggaatgtctggaaatcctttcgacagcgacgaagatcaaagctcggccagtggagagatactagagggcttcctatgtcccatttgccgtgcggatctcaagtccatcgatgtgctcacggatcattttgcccgccagcatgcggaagaggaggatgccctaaaatcctttaaagatatctttaccaaggcgaaaaagaagatcctaaacccctttgaggatgaaaaaggtgcatctgtatcgtcgcccgcaggttcctcctcttcagcggctggcaagaatcccaatggcaacggagatcgcaatggacccagtaatgcccgctcccgtctaaatgtatttaactatatggccaggcagcagcctggtgctgagtgctcccacttcgagtactttcagtccattcgcaatcctcgcctggagcgatatgccagcgaaacaaacaaactaatcattcgtttgcaccgcctgcttaaggatctgccagcggattcagtgcagcggcgtcagcatgaacagcaaacagttgcctggctggatggtagttccgtcaagttgtgtcccagttgtgccaagagtttccacatcgcccgaagacaacaccactgccgtttgtgcggaggcataatgtgcaatgattgctccaagttcctgcccctggaagatgccagtttgtagatccaataattgaggaaaataatgtaacttatttgattataatcccgcagtgcaactagccagtctttccaccacaagaagcgagccccttcagcagctgcatcagcatgagaacgccatccggctgtgcgaacactgcctttggctgctggacacccgaaaggatatgcacgaaagtcgcacttgtcgcccactcctcgtccaggtctacgaacaaattcgtcaactacaaaaagaagttaccccggatctggacatgtatctaaagatcatcaatagcttgaacgaaggggacacaatcttcacgttggcggatgcaggtgctttgcgcggcaagattggacaagtggcagaggccatggacatgaggagcaagcgcattctagccatattttgtgaaccaggcagccgggaggaggcattaaagaaggccattcggttgggctgcatccaagccatcaaggagcgaatgttatcgctgcccccactgccagaggaatcgcacatacgccagatgcaggagcgtagacgcatggaaacggagcagcgtatcctcaccgaacagcgcatggccatggaagcctacgaacgaaataacatggcagctaaccaatccaacgttggagttcctggtccggaaagcggatcctttgcccaaggggtatgtagacgaggactctctgcaaagatcaatatgtaacctctgtgattccatttgcttcacagtctgatcttcaatctctgaacaactggtcagcaccgcaggcggctagcaagtccagcctggacgatccgctgatcgagcagataaacatcattaagggctacatcaaacaggctcgccaggacatgaactttgaggtggtggagacgctggagctaaatcttcgcgagctacagcgcgaagtgtacgagcgacagcgccagtcccagggaagcaccgccgcctcacccacagaggcctaagcagtatcctacatagttaaatgtatattcattccctctatgacaaattacatggcttacgttacgttacgaatttgtggtgtatattgtgcgaaaaattttagtttgtgcgaagtttctgtaaatcaaagtttgtgcgtttgacgacaactgagactataaaatgcaacatcctatttcgattgagtctatgacttcaggccaacggcagcgatcagtgccttgaccttggtaatgtaggcggcctgggcgtcggtattgctcattcccttgcggttgttccacgcctcccacttggccttgcccttgaagtccagaaagccgggcttatctgcattggattagaattatcgatggtgcagcggagtgacgactatgtccgagacccacctgtattgcaatcccccacagtggcctgtttgtacaagctgtagagctccaaaaggtcattgtccccgggtgtggtgtttaggttcttaacatcttcggccgcctggttgaattcctgtttaggttaagtttgaataggtaatcagactttaagatacgaatgcgtatttgacgtagattcagttcacctgcaattcggacatttttgtatctattttttaactagtggaagtctttggaaaagaaattgcacgattttacttcaccgaatctatcggcgtctatcgatatctggtctatacttttgtgtgaccaacagtttttcaatttagagtggacaagctgttgcgttttatttcgcgggtctggcagcctatacacttaaaagattcgaagtctaatttcatattgagaactgagatacattattacgatgatagttaggaacatgtgtaacagttggtagacagtttcttgccaaaacaattgtgttttgaaaaaagctatggaataatatgaacaatatccaaaatagtccgttaagattttcaagacattaacgaaatattttaaaaaccttccaatgttgattgtctcaattgaacatctt

SEQ ID NO: 18494 - DNA, 1749 bp, DROSOPHILA
aagagtgaagtagataaatcttgatgatttctgcaaatattagtttttaaataaaattaatggatttgtagaaactctgaccgtattaatcgagtttaggactacaagtgccgtaagccccgtcatgccactgttttaaaacaagtggaaaaccttagggtcaattttttttggggaggagaccacaacaaataacacccaccgaattaactacgattactcatcgccggaatgtctggaaatcctttcgacagcgacgaagatcaaagctcggccagtggagagatactagagggcttcctatgtcccatttgccgtgcggatctcaagtccatcgatgtgctcacggatcattttgcccgccagcatgcggaagaggaggatgccctaaaatcctttaaagatatctttaccaaggcgaaaaagaagatcctaaacccctttgaggatgaaaaaggtgcatctgtatcgtcgcccgcaggttcctcctcttcagcggctggcaagaatcccaatggcaacggagatcgcaatggacccagtaatgcccgctcccgtctaaatgtatttaactatatggccaggcagcagcctggtgctgagtgctcccacttcgagtactttcagtccattcgcaatcctcgcctggagcgatatgccagcgaaacaaacaaactaatcattcgtttgcaccgcctgcttaaggatctgccagcggattcagtgcagcggcgtcagcatgaacagcaaacagttgcctggctggatggtagttccgtcaagttgtgtcccagttgtgccaagagtttccacatcgcccgaagacaacaccactgccgtttgtgcggaggcataatgtgcaatgattgctccaagttcctgcccctggaagatgccatgcaactagccagtctttccaccacaagaagcgagccccttcagcagctgcatcagcatgagaacgccatccggctgtgcgaacactgcctttggctgctggacacccgaaaggatatgcacgaaagtcgcacttgtcgcccactcctcgtccaggtctacgaacaaattcgtcaactacaaaaagaagttaccccggatctggacatgtatctaaagatcatcaatagcttgaacgaaggggacacaatcttcacgttggcggatgcaggtgctttgcgcggcaagattggacaagtggcagaggccatggacatgaggagcaagcgcattctagccatattttgtgaaccaggcagccgggaggaggcattaaagaaggccattcggttgggctgcatccaagccatcaaggagcgaatgttatcgctgcccccactgccagaggaatcgcacatacgccagatgcaggagcgtagacgcatggaaacggagcagcgtatcctcaccgaacagcgcatggccatggaagcctacgaacgaaataacatggcagctaaccaatccaacgttggagttcctggtccggaaagcggatcctttgcccaagggtctgatcttcaatctctgaacaactggtcagcaccgcaggcggctagcaagtccagcctggacgatccgctgatcgagcagataaacatcattaagggctacatcaaacaggctcgccaggacatgaactttgaggtggtggagacgctggagctaaatcttcgcgagctacagcgcgaagtgtacgagcgacagcgccagtcccagggaagcaccgccgcctcacccacagaggcctaa

SEQ ID NO: 18495 - protein, 505 aa, DROSOPHILA
MSGNPFDSDEDQSSASGEILEGFLCPICRADLKSIDVLTDHFARQHAEEEDALKSFKDIFTKAKKKILNPFEDEKGASVSSPAGSSSSAAGKNPNGNGDRNGPSNARSRLNVFNYMARQQPGAECSHFEYFQSIRNPRLERYASETNKLIIRLHRLLKDLPADSVQRRQHEQQTVAWLDGSSVKLCPSCAKSFHIARRQHHCRLCGGIMCNDCSKFLPLEDAMQLASLSTTRSEPLQQLHQHENAIRLCEHCLWLLDTRKDMHESRTCRPLLVQVYEQIRQLQKEVTPDLDMYLKIINSLNEGDTIFTLADAGALRGKIGQVAEAMDMRSKRILAIFCEPGSREEALKKAIRLGCIQAIKERMLSLPPLPEESHIRQMQERRRMETEQRILTEQRMAMEAYERNNMAANQSNVGVPGPESGSFAQGSDLQSLNNWSAPQAASKSSLDDPLIEQINIIKGYIKQARQDMNFEVVETLELNLRELQREVYERQRQSQGSTAASPTEA

SEQ ID NO: 18496 - DNA, 3348 bp, DROSOPHILA
gtatttatggtatatgtatgcggattgccctcacctatcaaaatgtattaattgaacttagaggtgttcatgcatacacttaaaaaaaaaaaatagggaaagctaaaccagtgtcttttaaatggtaaataccaaatacgacagcacattcaggaaagattaataactcccatttggtttctaaaggcaaactatatcagttttttgcctgcttctacgccagatgaattcatttgcagcttttatttttcaccttttcataacatttgttattgaaaaatatcaagaaaactaagcaaatggtacatatatatattacagctgtaagtctgtttcaatggaaactggttgttttcgaatgggagaatgtggctttgcctgaagtacatatgtacatatatgctcaaaagaagttgttataaatatttcacaaaaagtgtatcatttcgcctggcaggtttgttatgattatcccttaaattgaactcattttggaagaaaatcggacaatacataaactacatactatgttaaactattgatacataaactataggttcggtaacgatcatgtttagctaattcattaaacattttcctgttgtaaatgatcccagcaagagtttgtttatatacgtgtatggtgaaaaaatatgatcacttaaaactggaaactgtgttttatataggttaatattaaaatgaaacttcgcatttgatttaatttttgtgataaagacaaattggttaaatgtgtgatagttaaatcatcataacaaatacaaatgagattgtaataattgtattattcgataatagcatatagggtgtgataatagcaaattggttaactaaaagcggttatgccaagctttgtcagagatatctgatagatatccaaacgattgatgacaattatagaggaaatggttatcgggcaattgtttgaatacagtaggttctggcgactgattcgaaagcattcaacccatatacgttcatttttttcgacacgaaaatacacataaaatcatcaatttgataccataatgagcaacaaactgggctatgatgtgaccgatcccactgtccaattgctccgggcatcggcgttcatgcaaaatgggccagtgaagcaggttcgcagcctggaggatctggaccgctgggttcgctcgcaggcatattacgatatcattgcgtacatcagcaacaccagcaaggccatccagggtcatcgtttgacgcagacctttccggtcacggagcagatgcgtcgattgagcgagatattcgatggactggatcacctgattgtcgagcatacaccgaaaattgaggactcgtatctggcgttaccgttcggccaggttagaagcaaggcctatcgcacttggatgcgagagatgtaccagcatgtgtttagcaaactggacgaggccatcaatgtgaactgcaagcacatcaacgaactgggacaataccttcgacgatcgtttggtaatgggaacaccctggattttggtccagccaacgagttgatgttccttttctttctctgcggcctatttcgcgccggtatcctgttggccaaggatacggtggccgctgcactgatgctcttcaatcgctatgtgaatgtggttaggcgcctgataagcacctatggactgaccattgccaaggatccggcgtgcaccatcgaagactactactttttgccgtatctatggggtgcggcccagttatcggtggattctcccttctcgccgatgcagtgtgagcaggggaagataatggataattataggcaggacttcatgatgctggaaatcattgaccacctgcagaagacccgcagcggtccattgagtcgcgtggccctgcagctgtggagcatcctatcgatacccacgtggccgcaggtctacaggggattggagcgcaactacatcgaccatgtgctctcctcgttcggaaccgtggagcaagccatcttctgcgaactgatgtcctttgaggcggttgtaccgatcatgcctctgcaacgggcacacttgggcacccacttaatagtggatgagaaggagaacgaggatgagctcgagcagaaatatggggaaaatcgatggtcgctatcgccaccggtcagcagatatgtcagcatggaaccggaatcctttctcggcttccaggcatccaagactcataacaaatcgaaggagagcgaggatgagcggctctggatgatgcgacagctggtcgatgagaacgatccaaactccgacatgttttttccggatcgcgaagttaaaggacgtgattcgctcacttcgttcgccaactaaggtcactaaaatgtcaatccaattaatatatgtgaatttctgaggatgcgaactgcattggaattggtctgcaattttcaattttatatttacgaattttctgcaaaattgcgttatttatgtttaaaaaatgcaccttattggaataggaaaaggtacgcaaaacttttgtctgcacgcaggcgcaatgcggtttttttttatcaaactaactttgaactatgtattatggattcatcaacaagattttaaaacactaatatcgttttcaaacgggctcttgatatcgatatcgcagaaatcccctcgctctctctgtaacgagtcgcagtcaaattgtgccaagctttcgcaacagaaccgtttatattattttaaaaatagccttttccgcgaattcaaatcgctagggatttttgaagtgtggccctgtatagtttgttctaacgttctgtgtgtatatctcatgcagattgacgcgtttataattaatcaggcgaaagaaaattatacagtaattgttgtgtctcgaaaaaagagtttttgaaattggtaagtgaaaagaattggcgtattaatgaaggcgctttcaacctaaattctaagcaaatatcggtactctttttcttcgcttgatccttcgctcagtctgctagctggagatcgcagtcacacacagatccattgatctgataaaggacatgacttccgttgcaaaattgtgcccagagttatggcacccgaaagccaaaagcaaaaggcttgcaaagtgagcgaaatcgaaatcgtgtggtaaggcgccagcggcatgtagttgtagttcgagttcgttggatattagtcacacccgttgcgagagcgagcgcgagagcgcagagcaatgtacatatatgcatgcgcgtatgcgtatgtgtttgtattttaaactggcagagcgacgctcgctcggtcgctctctctctctggcgctctcacgctcttgctctgcttctagccccac

SEQ ID NO: 18497 - DNA, 1348 bp, DROSOPHILA
atttttttcgacacgaaaatacacataaaatcatcaatttgataccataatgagcaacaaactgggctatgatgtgaccgatcccactgtccaattgctccgggcatcggcgttcatgcaaaatgggccagtgaagcaggttcgcagcctggaggatctggaccgctgggttcgctcgcaggcatattacgatatcattgcgtacatcagcaacaccagcaaggccatccagggtcatcgtttgacgcagacctttccggtcacggagcagatgcgtcgattgagcgagatattcgatggactggatcacctgattgtcgagcatacaccgaaaattgaggactcgtatctggcgttaccgttcggccaggttagaagcaaggcctatcgcacttggatgcgagagatgtaccagcatgtgtttagcaaactggacgaggccatcaatgtgaactgcaagcacatcaacgaactgggacaataccttcgacgatcgtttggtaatgggaacaccctggattttggtccagccaacgagttgatgttccttttctttctctgcggcctatttcgcgccggtatcctgttggccaaggatacggtggccgctgcactgatgctcttcaatcgctatgtgaatgtggttaggcgcctgataagcacctatggactgaccattgccaaggatccggcgtgcaccatcgaagactactactttttgccgtatctatggggtgcggcccagttatcggtggattctcccttctcgccgatgcagtgtgagcaggggaagataatggataattataggcaggacttcatgatgctggaaatcattgaccacctgcagaagacccgcagcggtccattgagtcgcgtggccctgcagctgtggagcatcctatcgatacccacgtggccgcaggtctacaggggattggagcgcaactacatcgaccatgtgctctcctcgttcggaaccgtggagcaagccatcttctgcgaactgatgtcctttgaggcggttgtaccgatcatgcctctgcaacgggcacacttgggcacccacttaatagtggatgagaaggagaacgaggatgagctcgagcagaaatatggggaaaatcgatggtcgctatcgccaccggtcagcagatatgtcagcatggaaccggaatcctttctcggcttccaggcatccaagactcataacaaatcgaaggagagcgaggatgagcggctctggatgatgcgacagctggtcgatgagaacgatccaaactccgacatgttttttccggatcgcgaagttaaaggacgtgattcgctcacttcgttcgccaactaa

SEQ ID NO: 18498 - protein, 432 aa, DROSOPHILA
MSNKLGYDVTDPTVQLLRASAFMQNGPVKQVRSLEDLDRWVRSQAYYDIIAYISNTSKAIQGHRLTQTFPVTEQMRRLSEIFDGLDHLIVEHTPKIEDSYLALPFGQVRSKAYRTWMREMYQHVFSKLDEAINVNCKHINELGQYLRRSFGNGNTLDFGPANELMFLFFLCGLFRAGILLAKDTVAAALMLFNRYVNVVRRLISTYGLTIAKDPACTIEDYYFLPYLWGAAQLSVDSPFSPMQCEQGKIMDNYRQDFMMLEIIDHLQKTRSGPLSRVALQLWSILSIPTWPQVYRGLERNYIDHVLSSFGTVEQAIFCELMSFEAVVPIMPLQRAHLGTHLIVDEKENEDELEQKYGENRWSLSPPVSRYVSMEPESFLGFQASKTHNKSKESEDERLWMMRQLVDENDPNSDMFFPDREVKGRDSLTSFAN

SEQ ID NO: 18499 - DNA, 2439 bp, DROSOPHILA
gtgctcacctcggttagttccgctgagtccacagcaagttcctggggattccgttaaggatttgagttgaaggagtgctggtatgccctgtaagttcgtacacaatttgtccaatttttccataactcatatcgtattccggatttggcaatccgatcacgtttcaattaggaaaatatttgccagccgaaaagctaacggtgaacgccataaaaaatgtagagtattgttggctataaatcgaattgataacactgcgaacttacagatacccaaatgatggctatatgctgcgaatattaaccacaattgtgtcatagagcctagaaacttgcgggaacggaatggtcaatgaacttcgtttgaataaaaacccaaaaacaaaagagccgagcgacaaaaatttcaattcttcttcgatacatatctgatcaatttcgtggtaagagaaatgttctccaaccttttcctcgaatcgcttcgtttgtttggctttagaattaacatgttattgtaaattaaaacgagttaaacaattccgaatcacactttcggtttctgtagggcttgcataatacccattgattttgtctggtcgaagttctaatggcgctgcctctcaatctgaatctcacttaaactgatttcggttacggccttgagatttttgccactctgcttgggcttcgattgcttgcttatttaacaatttagctttcaattagtaattgtttagcgagatggccagcagagccaaaaactgctaagtaaggcaaatttaacacacattttggcacacatgacgcagtgcctccgcaaagtggggatctctgccgagctacagccctgaatagctctctcatcatcatcgaaatgtatttgcactcttttgtttccggctacgcaatatttcgacttgttgtttttcgatattatcttttaatatttttctcagttcttttggttccaatcacattctggcttagttctagcgggctgattattgcttctgctcgggcgtcttgtacggatgcaggcggatgtactccagagccttcagaacggacaccggcgtgggtggcggtgtgggcaggtggtcacccaccgcaaggtatccgttctcgtccgccgtgtaggacacaacataggtctttccatcgtcggcgacgaaggagtactttccattgaccgactccccgttgtgatcggcattcacggacttcaagactccatcctgagtggccttcgagccatctttgagctcataactgcgttaataacgagtggattagttatgagagggcttcaaaggcataatcaacttactgataatggtatttgccattgtactccacattggattcctgggaaatcggatcatcgttgtccgtcgccgaagcagcgaccacaaaaagggcaattaacattaggtacttcatgacgggatctctattccgctctatatcgatatcactgcaatgcaatccaagctggtgtctcggttcgactggtgatcccagcggtaaacaaagactcttatataggcaacggaattggcgagctgttgaagccatgataaaattcctgtactaaaatatttaacatgaaattaaaatgtgaccaataaataatattgaactcgttttgccccgctttccgttcgtcgctggcctttcgaaaatgggtgtgaaattttggtgcagacaacttcgacgattccggcctgcccccacattgtttttcaaatacaaatacaaattcaaataaatataaataatagtaatgtggtgccatcttcagtggacactcgtcatcggcatcactcctattctggttctcgccgattcctaaccaacttgaccacatttttgtcagcctgcgtctggccactttgcataagatgaatctatcacatcttaatctcgccttgaagtgcaaaacagagtggaacaatagaacgagacattatttttgggcagagtctatgaatagccacgttacgatctaaagtcctatgtaaaccatattctcaatatgtgtgtgcatctggacggacaaccagttatgtgaatgcattaattccttttggcgtttgtcatcgctgctattgggggaattgtgaatctagatttatgaccacgacagaagcaccaaacatcgaatggaaatacgatgcgcgagataatcagtgtcagtgggagtagtttgctttagatgtcaaaagttgttcggaaaccaggtgcagtttatcgagacttcgactattaaggattatttgaggccattgagtttgccgattcgggcatatccacataattaaacacctgatttgtttacttttcgaaagaatctttaattctttatttgcagctaaaggctaaagaatatcatcatagttcttcacaagagtttgtataattctcgacgcaacgaggaatc

SEQ ID NO: 18500 - DNA, 381 bp, DROSOPHILA
atgaagtacctaatgttaattgccctttttgtggtcgctgcttcggcgacggacaacgatgatccgatttcccaggaatccaatgtggagtacaatggcaaataccattatcattatgagctcaaagatggctcgaaggccactcaggatggagtcttgaagtccgtgaatgccgatcacaacggggagtcggtcaatggaaagtactccttcgtcgccgacgatggaaagacctatgttgtgtcctacacggcggacgagaacggataccttgcggtgggtgaccacctgcccacaccgccacccacgccggtgtccgttctgaaggctctggagtacatccgcctgcatccgtacaagacgcccgagcagaagcaataa

SEQ ID NO: 18501 - protein, 126 aa, DROSOPHILA
MKYLMLIALFVVAASATDNDDPISQESNVEYNGKYHYHYELKDGSKATQDGVLKSVNADHNGESVNGKYSFVADDGKTYVVSYTADENGYLAVGDHLPTPPPTPVSVLKALEYIRLHPYKTPEQKQ

SEQ ID NO: 18502 - DNA, 7318 bp, DROSOPHILA
tcctctctgaagctgttcgagctggcctacaagaaggtgtgtattggattgtctccttttactatgcaatgtaccaattgcatatttaatccttttcagatgtccgctgagcgcgagagcaacgcaggagccggctcctccgacagcagcagttcgagcgacacttccggcgaagccaagaaggaagagaagaactaaattaggcaaccataatagtcatagttgttgttgtttccctatttaataataaccgcttctggatttcgattaagttctacgttaaacacaaacacttcatattcctttattgaatcatgaatcacgcaaagccacaagcatttacccaaaatgtgaagtaaactatccgatgcgattaggtcaaatcagacgatgagacttccaagtaaacagacgaagaccaagccgccagggagcgtcaatgatcgactgcataaagtttttattgtttattatgcaatcaatcgattttctttctcccttacttaaaacacgtggtcaccgttgtgttgtgttcctgtaagattttgattatttttacgtatcatctaaactagctgtagttgtacaaaaacgagcacagcacaaaaattgaattcgaatggcggccacggcgttctagacgcggacaaataagcagatgctcatttggaggtttaaatttaagataaattgtatgttggtttccagtggacaaccaaattgactgggtaatatgcaattaaatttaaacaaatcgatgtaaacttaaaataaaacaaaacaaacatttacatacaaaaatatctttatttctctagactactactgacttgaatttctgattaaaactcatgtttaaattcctctagatattaaaaaataagcagggataaataatcttatgttaacttaactatggagtttttgtacatataattgatgatgttgttcgcaattcactaagctagttggatttgctaaacctattaagatttttcttctacatggctccgctctgaagtttgtacagcgtgtagtagagaccccgattcgcaagcagttgcttgtggtctccagcttcacacactaatccgttctcgaagacgaatattacgtcggagtggacaacggtggaaagtcggtgggctatactgatcgtggtacgtccttcagaggcggcatcgagtgcatcttggacaacctgaaggagaatagagaaatgaatacggaagtcctttatagaacatggatctgtactccaaccttttcactttcagcgtccaaggcagaagtggcctcgtcaagcagcatgattttcggattccggatgagggctcgtgcaatagctatgcgctgcttctgacctccggacaactgagcacccttctcgcccattctcgtatcataaccctatgggataaggtactatattactagaaattcgagcaaaaagtcaagataggggctcttaccaagggcaggttagcgatgaattcgtggatattggactttttgcacgccgagatgatctcctgatcagtcacattcctggcattgtcaccgtaggaaatattctctcggattgtgcgatcgaaaagaatgggctcctgcgacacgatacccaactggttgcgcagattggtcatagaaacattgcgcacatcacactcatctataagggtagctccctcatctacatcgtagaatcgctgtatcagctggatgcacgtggacttgccacagcccgatggacccactagggcgatcttctgacccttgctcacagcaagctccagacccttgagtacctgaatctcactgcgtgtgggatagctgaacttcaccttgtcgaagcgaacatatccctcgctatgccaaggatcacgagacactcccggtcggtccacaatcgacggctggcggcggaggaacgtaaagatggtcttggctgccgaaactcccttctgcatattgggagcaaaggccaatgcattggcaatggaagccgtacccatgatcagggcttgggatactctaaaataaatggggagagatgaggtgttaggaaatctttcaagttaagtgtgctatttcgtcacttacttgaatacatctccaaacaaaattccgcggtgaatcacacaccatgttccataatacatgcaagcagcataggcaaagaacatcagggaacgggcgagaccgtagaccaatcctcggaagtgggtatttctcttggaaatctatagagataatattggaaatgaattaacaaatttaaaaaaaaaagtactatatagagcctacctcaacagctggaatcagcatgccaatgtagttctggtggaacatttcctcacgacccagagaagctacagtacgaatattggaaaccacttcgacggccagcttggtgcagttctccatggtcttggcggagcccatgttctcttttgccattagagtacgctgcatgtagaaggcgatcaggatgaagggcgtaaaggcaagggccaccaatcccagactccactcgtaatacatggacaaggcaatgcccaatgccagagtggagatcgattgaacgatcgttccaattcgttgaccagtggcctgaggaaacattgaaatcattaggtaagctacaaatgtgaaatccaatttacacttacaccctgaactgcagcagcatctccggagagtcgggcacaaaggcttccggtaccgttcgccttgtcatcgaaccaggccacctcctggcgcagcatggcctcgaacatgagtcctcgaaggcgttccgtcagtctctcaccggcgataccaaagaagtatatctgtaggaacgtggcaatgcccactacgataccggcaatcaagaagtacaagctgtactggttggagttttcgcgaacgtattgatcattatccttaaccgaaagaatctgaaggatgctaccaaagagcacggcaaagatgggcatggcgcagcccatgatcacggaggagatgcaacccactgcgatctgaagccattccggtttgttcattttcatcacctccaacatgggtttcacctcgttggggtccttgaccttcttctttttctttttcttatttttctcgtcagtgaccatcacatcttcgtcctcgtcctcgctaagtactttgatctcttcctcatcttcatccttgatgtcaaagttcttgtagatatcaccagtgggactaaggaccgagccatcatcctcacccagttgagtggttacaagattaaagtagtgatccttcaactccatcaactcttgatgcgttccactctccaccacctcacccttgttgatcaccacaatcctgtctgcccgacgaacggtggacaaacggtgggccacgatgatggtcgtccttccagcgctgactttctccagggcagcttgtactttagcctcactggcggtatccaatgcagatgtggcttcatccaacagcaagatttcgggatcacgaatcaatgcgcgagcaatggctatcctctgcttctgccctccggacaactgagctcctcgctctcccaccaaagtatcatatcctttgggtagcttcttaataaagatggctgcattggctgcggcagctgctgcctcgatctcctcgcgagtggcgtcctctcgaccgtacctgatattctcgtatatggaagtggcgaagaggattggttcctgacccaccactccaatcctagagcgtagccagttgatgtcgaggtccttaagattggtgccattgaacaaaagattaccagcctgggggtcatagaatcgctggaccagttggatgcaggttgatttgccacagccggatggaccaacaagagccaccgtctggccacgatggattttcaggttcagtttgttcagaatagaaacctccggtcgcgtgggatactggaactccacttccttaaactcaatggtggtaaggggctcatttaactttttaccctccccatcaatgggattaatttccggaatctgctcgataatgtggaaaaccttggcgcaggcgcccttcgcgatgccaaatgcctcgatatagggagccgccattccaatattcatggaacccatcatcacggaaaagaatacggtgatcatggtgccagcatcgtagttctcatacgcgggttcgtggtatcccttgattaccagacccactccataccagaaggccagagcataggatgcgtagatgaagaaccaaagcagaccgaatccgattccggagaacatatttctcttgatattcaagatcttggcagcaaccacacgctccttgtacgcagccacctccttcgcctcgccctcaaaagcctttaccgttcgaattccggagagagcgccttcagccaccacggcagcaccagcatacatggtcacctcctttttcgccaggcgggacgtggccacggccaccaggcccatggcgatgaatgttagtggcaaactggtcaagcacaccagggatagctgccagcccttgacaaaggctagcaccaaagatcccacgaaggcgacaaggtaatggacgaacatgaccactttttcggccaagccatcctccattttggagagatctctgaaaaaggcggcacatttaattcgattggcatatctttgattttttttaactatttataagatggtaactttgaaagcaactgataagaaacgtgtgacttgtttggtgtatggttacgtatgacaaaaattccgtgattaactaaagatttgataagatgtgtgagtcacttactcattcattcggctggctacttcgccactctggttgaagtcgtaccacttcatgtcctgatgcagaatggagcgaaagaactttgagcggatggtgaggatctgggagtgggccgcgtagttgaagcaggtgatcgagagataggaacacaccagcataatgatgccgatgtaggtgttttgcagggagaactgccgcactttgtccagaagcaaagtagaaatagcatcgtcagctcgatatgattttccgctctcaagcagtccacccaagtcaatcatgtcctttggatattaagatagatgtataaatagataaagatctatgattttggaacagcatttttgacttacattggcgagattaccgaatatcaaactgttggccggagtggtcaggcctgtggccacggcagacagtagtccgatcacatagagcgctcgatcctttttggtggcgtaccgaaagagctggaagtagctaacctgcttgacatcctcatggtactgggagccatcctcctcatcgctggcatccgactcgtcatgcttggacttctttttcgacttgttgggctcactgcaataataataaagggtggcgcgcacgccaatcatagatggttatcagttcgatgattctattgacgccattgccatgaaccccacagtgctgccaatcaccaatcgccgccaagcttatctatacctaacattccccgtgggaagtggtttgcaacaaccaataacacaatgaccacgcttcggttttgcccgacgaacttactatctacagtttttttttttttttttgtttaactcattggcaatcaatgaacgataaagttgtaattgttagaatactataacgaaggccaaatacactttactatttcgattactaactttcaaattcacacacaatctacatatataaaatcgtttatgtgggttataaatctgtagagcttgtaaagcattgatttcaggatcaaactttaatttaaaaatccttgaaaatatgtgatatttcgtataacttcttcgcatagggtacacaattaaaatacacttagtagctgaataatgcgtatgaaaattcagcggcgtcatcgttgaagtgcaaatttgttaaaggtgaacaacttgaatggaattgggcactcgacggaaacatgtcaattaataaaataatttcttccttttattcatttgagtatcgattgatttaattacttataggacaataggtattaacaagattaattgagattacagccattttccttaaaatttcacaataagttttcttctttcgttggcacagcacaaaattcagatttcccgctttcaaactttgaatgtcctttaacgactttcttttcaaaactcacaagctctttcgatctcgatccgaatcctctagtttggcgcccaggacgatgttcgttttgtactgcgatcgcgaattcacatcgtccttgacgacatcgccgttcttaacggtcatcgtgtatatataactcaagggctaatatcaatatcaatatatatagatatatataaatatacgttggagtgaagagaaggacccaatggcaacgcagactaaaaccgactattataatatggcagcagttgggggtttatatttgaatgtccaacgggccagagtgaagccttatcaactgataatgctcgtttatcagcatattgaacatgtatacgatacttaagactaacggtgagtttgagtctgcttgtgaaattcgtgatcaagtggaatttaatggctgcacgtgaaaccataactgatgaagccgaccataatactcgtatattggctaagaacctgagtgccggcgaaatctaaaaggactgattgaaatcacggggggggctctacatcggtttttctaaaccctaggtcagtacttcgaataatgttttcatttatttttataaacaaaacaataataatataataacatctatttgacgtaaattgacctgaatgactcgcgaaggacaaatgaaattaaaagcagcagggtaataaaatatcaaactgcattgtcaatgtgaagttcgccataatttcgttccttagataaatcaaaggtacatatatcgttatcaggtattgttaatagtgggcgattaatcatatacatatatatcttatatatatatttatacacgttgttagttagagctaatgcattgttatggttttaattgaacgaattataatactttgcagtttcatatcggccactaatgggaaaatatctgagcatacaccaatttaaaatgccttccatggctcggtcacacgcatcttatccttatcttccgtattgccaacacggcttattcacggtggggaatatacatatgtacatatagaagccgatttggtcggtcaacccatgacgttggacttgtgactgacgacatgactggccaatttcacgccggttttccagcgattatctacaatacgaggg

SEQ ID NO: 18503 - DNA, 3942 bp, DROSOPHILA
atgaccgttaagaacggcgatgtcgtcaaggacgatgtgaattcgcgatcgcagtacaaaacgaacatcgtcctgggcgccaaactagaggattcggatcgagatcgaaagagctttgagcccaacaagtcgaaaaagaagtccaagcatgacgagtcggatgccagcgatgaggaggatggctcccagtaccatgaggatgtcaagcaggttagctacttccagctctttcggtacgccaccaaaaaggatcgagcgctctatgtgatcggactactgtctgccgtggccacaggcctgaccactccggccaacagtttgatattcggtaatctcgccaatgacatgattgacttgggtggactgcttgagagcggaaaatcatatcgagctgacgatgctatttctactttgcttctggacaaagtgcggcagttctccctgcaaaacacctacatcggcatcattatgctggtgtgttcctatctctcgatcacctgcttcaactacgcggcccactcccagatcctcaccatccgctcaaagttctttcgctccattctgcatcaggacatgaagtggtacgacttcaaccagagtggcgaagtagccagccgaatgaatgaagatctctccaaaatggaggatggcttggccgaaaaagtggtcatgttcgtccattaccttgtcgccttcgtgggatctttggtgctagcctttgtcaagggctggcagctatccctggtgtgcttgaccagtttgccactaacattcatcgccatgggcctggtggccgtggccacgtcccgcctggcgaaaaaggaggtgaccatgtatgctggtgctgccgtggtggctgaaggcgctctctccggaattcgaacggtaaaggcttttgagggcgaggcgaaggaggtggctgcgtacaaggagcgtgtggttgctgccaagatcttgaatatcaagagaaatatgttctccggaatcggattcggtctgctttggttcttcatctacgcatcctatgctctggccttctggtatggagtgggtctggtaatcaagggataccacgaacccgcgtatgagaactacgatgctggcaccatgatcaccgtattcttttccgtgatgatgggttccatgaatattggaatggcggctccctatatcgaggcatttggcatcgcgaagggcgcctgcgccaaggttttccacattatcgagcagattccggaaattaatcccattgatggggagggtaaaaagttaaatgagccccttaccaccattgagtttaaggaagtggagttccagtatcccacgcgaccggaggtttctattctgaacaaactgaacctgaaaatccatcgtggccagacggtggctcttgttggtccatccggctgtggcaaatcaacctgcatccaactggtccagcgattctatgacccccaggctggtaatcttttgttcaatggcaccaatcttaaggacctcgacatcaactggctacgctctaggattggagtggtgggtcaggaaccaatcctcttcgccacttccatatacgagaatatcaggtacggtcgagaggacgccactcgcgaggagatcgaggcagcagctgccgcagccaatgcagccatctttattaagaagctacccaaaggatatgatactttggtgggagagcgaggagctcagttgtccggagggcagaagcagaggatagccattgctcgcgcattgattcgtgatcccgaaatcttgctgttggatgaagccacatctgcattggataccgccagtgaggctaaagtacaagctgccctggagaaagtcagcgctggaaggacgaccatcatcgtggcccaccgtttgtccaccgttcgtcgggcagacaggattgtggtgatcaacaagggtgaggtggtggagagtggaacgcatcaagagttgatggagttgaaggatcactactttaatcttgtaaccactcaactgggtgaggatgatggctcggtccttagtcccactggtgatatctacaagaactttgacatcaaggatgaagatgaggaagagatcaaagtacttagcgaggacgaggacgaagatgtgatggtcactgacgagaaaaataagaaaaagaaaaagaagaaggtcaaggaccccaacgaggtgaaacccatgttggaggtgatgaaaatgaacaaaccggaatggcttcagatcgcagtgggttgcatctcctccgtgatcatgggctgcgccatgcccatctttgccgtgctctttggtagcatccttcagattctttcggttaaggataatgatcaatacgttcgcgaaaactccaaccagtacagcttgtacttcttgattgccggtatcgtagtgggcattgccacgttcctacagatatacttctttggtatcgccggtgagagactgacggaacgccttcgaggactcatgttcgaggccatgctgcgccaggaggtggcctggttcgatgacaaggcgaacggtaccggaagcctttgtgcccgactctccggagatgctgctgcagttcagggtgccactggtcaacgaattggaacgatcgttcaatcgatctccactctggcattgggcattgccttgtccatgtattacgagtggagtctgggattggtggcccttgcctttacgcccttcatcctgatcgccttctacatgcagcgtactctaatggcaaaagagaacatgggctccgccaagaccatggagaactgcaccaagctggccgtcgaagtggtttccaatattcgtactgtagcttctctgggtcgtgaggaaatgttccaccagaactacattggcatgctgattccagctgttgagatttccaagagaaatacccacttccgaggattggtctacggtctcgcccgttccctgatgttctttgcctatgctgcttgcatgtattatggaacatggtgtgtgattcaccgcggaattttgtttggagatgtattcaaagtatcccaagccctgatcatgggtacggcttccattgccaatgcattggcctttgctcccaatatgcagaagggagtttcggcagccaagaccatctttacgttcctccgccgccagccgtcgattgtggaccgaccgggagtgtctcgtgatccttggcatagcgagggatatgttcgcttcgacaaggtgaagttcagctatcccacacgcagtgagattcaggtactcaagggtctggagcttgctgtgagcaagggtcagaagatcgccctagtgggtccatcgggctgtggcaagtccacgtgcatccagctgatacagcgattctacgatgtagatgagggagctacccttatagatgagtgtgatgtgcgcaatgtttctatgaccaatctgcgcaaccagttgggtatcgtgtcgcaggagcccattcttttcgatcgcacaatccgagagaatatttcctacggtgacaatgccaggaatgtgactgatcaggagatcatctcggcgtgcaaaaagtccaatatccacgaattcatcgctaacctgcccttgggttatgatacgagaatgggcgagaagggtgctcagttgtccggaggtcagaagcagcgcatagctattgcacgagccctcatccggaatccgaaaatcatgctgcttgacgaggccacttctgccttggacgctgaaagtgaaaaggttgtccaagatgcactcgatgccgcctctgaaggacgtaccacgatcagtatagcccaccgactttccaccgttgtccactccgacgtaatattcgtcttcgagaacggattagtgtgtgaagctggagaccacaagcaactgcttgcgaatcggggtctctactacacgctgtacaaacttcagagcggagccatgtag

SEQ ID NO: 18504 - protein, 1313 aa, DROSOPHILA
MTVKNGDVVKDDVNSRSQYKTNIVLGAKLEDSDRDRKSFEPNKSKKKSKHDESDASDEEDGSQYHEDVKQVSYFQLFRYATKKDRALYVIGLLSAVATGLTTPANSLIFGNLANDMIDLGGLLESGKSYRADDAISTLLLDKVRQFSLQNTYIGIIMLVCSYLSITCFNYAAHSQILTIRSKFFRSILHQDMKWYDFNQSGEVASRMNEDLSKMEDGLAEKVVMFVHYLVAFVGSLVLAFVKGWQLSLVCLTSLPLTFIAMGLVAVATSRLAKKEVTMYAGAAVVAEGALSGIRTVKAFEGEAKEVAAYKERVVAAKILNIKRNMFSGIGFGLLWFFIYASYALAFWYGVGLVIKGYHEPAYENYDAGTMITVFFSVMMGSMNIGMAAPYIEAFGIAKGACAKVFHIIEQIPEINPIDGEGKKLNEPLTTIEFKEVEFQYPTRPEVSILNKLNLKIHRGQTVALVGPSGCGKSTCIQLVQRFYDPQAGNLLFNGTNLKDLDINWLRSRIGVVGQEPILFATSIYENIRYGREDATREEIEAAAAAANAAIFIKKLPKGYDTLVGERGAQLSGGQKQRIAIARALIRDPEILLLDEATSALDTASEAKVQAALEKVSAGRTTIIVAHRLSTVRRADRIVVINKGEVVESGTHQELMELKDHYFNLVTTQLGEDDGSVLSPTGDIYKNFDIKDEDEEEIKVLSEDEDEDVMVTDEKNKKKKKKKVKDPNEVKPMLEVMKMNKPEWLQIAVGCISSVIMGCAMPIFAVLFGSILQILSVKDNDQYVRENSNQYSLYFLIAGIVVGIATFLQIYFFGIAGERLTERLRGLMFEAMLRQEVAWFDDKANGTGSLCARLSGDAAAVQGATGQRIGTIVQSISTLALGIALSMYYEWSLGLVALAFTPFILIAFYMQRTLMAKENMGSAKTMENCTKLAVEVVSNIRTVASLGREEMFHQNYIGMLIPAVEISKRNTHFRGLVYGLARSLMFFAYAACMYYGTWCVIHRGILFGDVFKVSQALIMGTASIANALAFAPNMQKGVSAAKTIFTFLRRQPSIVDRPGVSRDPWHSEGYVRFDKVKFSYPTRSEIQVLKGLELAVSKGQKIALVGPSGCGKSTCIQLIQRFYDVDEGATLIDECDVRNVSMTNLRNQLGIVSQEPILFDRTIRENISYGDNARNVTDQEIISACKKSNIHEFIANLPLGYDTRMGEKGAQLSGGQKQRIAIARALIRNPKIMLLDEATSALDAESEKVVQDALDAASEGRTTISIAHRLSTVVHSDVIFVFENGLVCEAGDHKQLLANRGLYYTLYKLQSGAM

SEQ ID NO: 18505 - DNA, 5679 bp, DROSOPHILA
aagcatgaaagtgagtttggctaaaaacagcacgaaaagcatcaattaatttcattgattattctcgttagatgctattaacacggaagacttggacacctacaatctgatttcgaatgatgtcaatgagaacgacatcaaaacccatgcgcaaaacgtgaagagtttcgagaacgaccttaacactctgcgaggacatcacacgggcatcaaggatcactacgataggctggaacgcctggtgtcctccggtccacacagtcaggacttcattgaacccaaggtccagggtctatggcgagtggcccaggctagcaattttacggttaaagaactggagtccattaaaaccgaattgcatcacttcgaaagtcgcctattaaagctgcgtcacttgcatgccgagcatgctttgcaaaaggagaaatacaaggtatatgtttcttaatatcaatcaagtttgtaagccaactaacaattatttatagggcgaaaaagtgaaggacaaaagcagccgctttgaggaaatggaggatcagctgaagaagcaaactcgcaaagtggagaagctccaggagaacattgaaaaaaccatcttcaagcacaccgagctttaataatttgaaagtgaaacactgaaagtgccaagcgaataaattagatttaattgcaactgtttgtgtaacgcacaaaaatattcattcttgctgctattcagcatagatataattttgataccaaatatcatttgaacataaataaaatctcaagtttaattttgaactatatacaatctattttgacctttaaaaaattcaatgtggaaaaaataaatttgtaatatattcaaagtacaatatagggttaagaataaaccgttaaaaaaaacgataaaattagtgtgaccatatgatagcaggcacaaaacgcgtatttccctccacccagtaggaccgcacctagtatgaccgcatgccagtcgcattattgttgttgtcgtttcgtttggtgggccaaaaaacaagaaaatattagctaagcgaaaagtttaaaaagttaatatatatatgtgcagcggtcggtgccagcgctttatgggtacatagtgcatatgtacacacaccgacatgggcatggtggaggcgtcgacgtcggaactgcacctggaggccccaaattcgtacacgtacctcctggcgaccgtcagcctgacgctcactttcatcgttatgctgggcgcttgtctctgctgcaagaagcggatccctaagtaagtcctccccaatacccagaggatcagaggatccacatcgtttcgatggctctagcgggaacagggcggtgcaggccagagagagagtgaaagtgggtctctttctccaacactacgccgcccagttccagttggatgcactcatgtcgctcgccaatctctctataccctctaactccacagaaatgacttgatgggcctggagggcatggtcaagctgaagaatccggatgaggtcattgtggtgaccaatctggtgggcaacagcgagtcccaggcggagctgaatgcctccacggtgtccaatgcggactcggaaaagcggtaagtccccatttctttgctgtctacataactgagctggaaataacgcatccttaaccaatttccaggtcgagcactgcagcccatcgcagtttgcctgacattcccgtggccgagagcaatgataatgggtccgaactatatgaaactgtggcggacaagcaaatggtagatggtcgcaatgcccgtagccaaagtcgtaagttgtattttaaacccataaaataagctcatacttaataccgattttaataacacccacagcacagccaagcatgaagaaacagaccagcgtgtcgcagcacagctctattagccaggcggatgatgtaagttcgccgtactctcgggtcaagggtctgccgcacgactacgccaaggtgcggggcaccgaacatccctatgcccagctgaatgccccatccacgtctcatgcggccaaccacggctctacagcagcagctgcggcggcggcggtggtggccggatcctccagcgaaggtatagatccaatgcaccgcagttcacagcacagcgaaggctccagagagcacaatgattcagcgccggcgcaggctgagattccagctgcctctgcgattgcaggcatgatttcggctagccaagatcttccctacatgacgccgcccatcgccaatccacattttagcggggactcacaagactcgtcgagtaagtctgtaaaaatggagataatgtcaaatcgctaaatgttttattccacagagggatacacaagcattagtgtgagggagccgctggccaacattttggcccaacagccacctgggaagccctcgaacaggaaccctacattatcgcgtgatgttaatgactctcactacgccactgtgtccgatgattctggtgagtcacaagagaaacaccacttctctccagggcaatttcaatgttatacgtatcttgagtttaataatatacaaaatttaatacatatatttagtaatacatttagttagtaatttaattcttttatttaagatgaaacgtatgcggccattgaggatcccaataaccgtcatcatgccaacgccgcggatatatacactagcggatcggagacgtacgcgcaaatccagcctatgcaggccaatcccatagtggtggctgtcgagatcaataacagcagcagtcttccgaccgccagtacatccgccgtccgacccaccagcagcagtggtgctgatcatgctatgcctgttccaccgcctgtggacagtttgcgagcccaaatgcactcgcgtcaggcgtcatcctcatcgaacaatagctcgtctgtctgcaatttgggttcacccaaacctgagaaacgtcaggcgaattcaccactaccaccgacgcccaaggcaattgtgggccaggcgcaccatctgcaggccggtagtattagcaacctagcgtctgggcggaattcggtcatatcagtgatcgaagcgggcgcggaaggacacgaggcggaatctggagaggcgtcgccacagcgcaagcatagcaaaagtctaagtccctccaaggaaggcgagggcaacaaaaacattgagggcatgtacgctaaggtaagaatgtctgccagtaccacatagtacctctgactcaccattaataaccgtaggtgatgaaaaagcacaaattctcgagaaactcgccgtcctcccaaaacagctcacctattctggcaaggaaacagcagcaagatggattgggggtcagtccgctggacagtgctgcggctttgttggtggatgcgcagaagggtcgcgttcggagcaacagctattcagccaaggatcatggctatgaaacgattccagccgacggacagatgatgcacgggaatcgaaagtcggattgctatgcagccaacatgttacaaaaggagagacagcaggaaggaggaggtatgtcgacagctcttacaagtccatttgtacaaactcctgtccgattgctgggtaaaatgtgctgatccctgtgatttgactttacattttcccctggccttgtcactaaatccctgcctaatgcctaatctgcctgtctatctatctgtctctccttgtctttcccttaaaatgccatcccaaactaagttgctatgccaaaatgaaatatgcccgtgttttttaaactaaaacaacgcaaatttcatgagtttttctttggaagtagccgtggttagtatcgtctgcagtgcatccattaacacttctcatcaattcgagtaaatgctcttgttcaagctcatgactaatgaaatgctattttcgccgccctttcagcgattgcccagcccgtcacgatagcaacagcaatagcgatcagcgctagcgcaaagcactacgagactattattaatcagacacaaccgtcaccgcctccgtccaggagcaacaacgatcctggctacgagcaactgcaaccgcatcctgttccttccggtgaggatgaggccaaaaagtccgactatgatcctaactacgaggtgctcaaaagtcgtgctcactctgacgacggctatgcgaaggtgttggataagaagcgtccaccggtgaatgctgacggctctggctacagcaccattccaggggcagatgccaaccacaactatgccagcatcctcgagacaaaggccgctgcggagacggatcattatgcgcggatagcggaaaatgcggttgcaggaacgccgggcagtagcagcagtcgcttgacccccacatcgcccagctccacatccaattccgtgtcgcttaactcttcaacggttgccaccagcacgccgatctcctcgcaatatgaatcgctgacgggcacggggagcgaaacggatcctaactatgagtcggtgtgctatctcaccacggcgtccaatacagcgacaacgacaacagcgacgaccaacactagcagtgggatagagcccggctacgagccgctgcagacggatcaggagtcagacacgcagacgagcagtccgcggagtggggcagcatttacaccaagtgaacagttgctagtggacgactactttcacgtgtagcccgtgtccagtgagctggatctcccctcatcagtttttgctaagcaattctttacgcacacatatcatccattcaatgcacagatcccccatacacattaacgcttcatcgtagttaggaacggcgaccgctaagcgacagtcttagattgcacggcaacgggtcactgacccacgggcaaatccgggacaacagatatcccagaatggcacagcttcatatcggtttgccctttagaatatagcatagctttaggttgaatttgtgtacaaactatttgtatgaacggctcgacaattgcttccgggcgagggtgggtaatcgctccaagtatctactccattattattattctatctcagtaccagtgcgtcctattttaggtaaattaaaggcaggggtcccacttgacgagccacttgtttaaattgtttattaagcacaccggcggtcgttagtgggttgtgtttaggccaatgatatttaaatggcggtcggggttgggttggggtaacttacctacaatacacaaatgtatattatatatatttttatatgttttggcgtttttgctgcttttttactttactgaggtccggtataggcgtaggatatcgtatatacacgtatttacacacacaacacccacgagaatgcaagccaagtatttgtatttgataaatgttaatggaacacttcaaccatcaagaaactaagataaaatgttcaataaattattgatgacacaactcgctcgctattttgatatctctttgtgtataattatctttatttatattgaatatgtatagctgtttactggttgcaacaaggcgtatcattatattcatgtgtggcattgcatgcaacaggacagattcgaatttgaagcagtcgctctatcgattttaatcacaagtaatcatcttcaaggttgacaatcaactgattggctgtttaatgaactttctttgcttaaggcaaccaatcttatccaag

SEQ ID NO: 18506 - DNA, 2734 bp, DROSOPHILA
ttcgtttggtgggccaaaaaacaagaaaatattagctaagcgaaaagtttaaaaagttaatatatatatgtgcagcggtcggtgccagcgctttatgggtacatagtgcatatgtacacacaccgacatgggcatggtggaggcgtcgacgtcggaactgcacctggaggccccaaattcgtacacgtacctcctggcgaccgtcagcctgacgctcactttcatcgttatgctgggcgcttgtctctgctgcaagaagcggatccctaaaaatgacttgatgggcctggagggcatggtcaagctgaagaatccggatgaggtcattgtggtgaccaatctggtgggcaacagcgagtcccaggcggagctgaatgcctccacggtgtccaatgcggactcggaaaagcggtcgagcactgcagcccatcgcagtttgcctgacattcccgtggccgagagcaatgataatgggtccgaactatatgaaactgtggcggacaagcaaatggtagatggtcgcaatgcccgtagccaaagtccacagccaagcatgaagaaacagaccagcgtgtcgcagcacagctctattagccaggcggatgatgtaagttcgccgtactctcgggtcaagggtctgccgcacgactacgccaaggtgcggggcaccgaacatccctatgcccagctgaatgccccatccacgtctcatgcggccaaccacggctctacagcagcagctgcggcggcggcggtggtggccggatcctccagcgaaggtatagatccaatgcaccgcagttcacagcacagcgaaggctccagagagcacaatgattcagcgccggcgcaggctgagattccagctgcctctgcgattgcaggcatgatttcggctagccaagatcttccctacatgacgccgcccatcgccaatccacattttagcggggactcacaagactcgtcgaagggatacacaagcattagtgtgagggagccgctggccaacattttggcccaacagccacctgggaagccctcgaacaggaaccctacattatcgcgtgatgttaatgactctcactacgccactgtgtccgatgattctgatgaaacgtatgcggccattgaggatcccaataaccgtcatcatgccaacgccgcggatatatacactagcggatcggagacgtacgcgcaaatccagcctatgcaggccaatcccatagtggtggctgtcgagatcaataacagcagcagtcttccgaccgccagtacatccgccgtccgacccaccagcagcagtggtgctgatcatgctatgcctgttccaccgcctgtggacagtttgcgagcccaaatgcactcgcgtcaggcgtcatcctcatcgaacaatagctcgtctgtctgcaatttgggttcacccaaacctgagaaacgtcaggcgaattcaccactaccaccgacgcccaaggcaattgtgggccaggcgcaccatctgcaggccggtagtattagcaacctagcgtctgggcggaattcggtcatatcagtgatcgaagcgggcgcggaaggacacgaggcggaatctggagaggcgtcgccacagcgcaagcatagcaaaagtctaagtccctccaaggaaggcgagggcaacaaaaacattgagggcatgtacgctaaggtgatgaaaaagcacaaattctcgagaaactcgccgtcctcccaaaacagctcacctattctggcaaggaaacagcagcaagatggattgggggtcagtccgctggacagtgctgcggctttgttggtggatgcgcagaagggtcgcgttcggagcaacagctattcagccaaggatcatggctatgaaacgattccagccgacggacagatgatgcacgggaatcgaaagtcggattgctatgcagccaacatgttacaaaaggagagacagcaggaaggaggagcgattgcccagcccgtcacgatagcaacagcaatagcgatcagcgctagcgcaaagcactacgagactattattaatcagacacaaccgtcaccgcctccgtccaggagcaacaacgatcctggctacgagcaactgcaaccgcatcctgttccttccggtgaggatgaggccaaaaagtccgactatgatcctaactacgaggtgctcaaaagtcgtgctcactctgacgacggctatgcgaaggtgttggataagaagcgtccaccggtgaatgctgacggctctggctacagcaccattccaggggcagatgccaaccacaactatgccagcatcctcgagacaaaggccgctgcggagacggatcattatgcgcggatagcggaaaatgcggttgcaggaacgccgggcagtagcagcagtcgcttgacccccacatcgcccagctccacatccaattccgtgtcgcttaactcttcaacggttgccaccagcacgccgatctcctcgcaatatgaatcgctgacgggcacggggagcgaaacggatcctaactatgagtcggtgtgctatctcaccacggcgtccaatacagcgacaacgacaacagcgacgaccaacactagcagtgggatagagcccggctacgagccgctgcagacggatcaggagtcagacacgcagacgagcagtccgcggagtggggcagcatttacaccaagtgaacagttgctagtggacgactactttcacgtgtag

SEQ ID NO: 18507 - protein, 868 aa, DROSOPHILA
MGMVEASTSELHLEAPNSYTYLLATVSLTLTFIVMLGACLCCKKRIPKNDLMGLEGMVKLKNPDEVIVVTNLVGNSESQAELNASTVSNADSEKRSSTAAHRSLPDIPVAESNDNGSELYETVADKQMVDGRNARSQSPQPSMKKQTSVSQHSSISQADDVSSPYSRVKGLPHDYAKVRGTEHPYAQLNAPSTSHAANHGSTAAAAAAAVVAGSSSEGIDPMHRSSQHSEGSREHNDSAPAQAEIPAASAIAGMISASQDLPYMTPPIANPHFSGDSQDSSKGYTSISVREPLANILAQQPPGKPSNRNPTLSRDVNDSHYATVSDDSDETYAAIEDPNNRHHANAADIYTSGSETYAQIQPMQANPIVVAVEINNSSSLPTASTSAVRPTSSSGADHAMPVPPPVDSLRAQMHSRQASSSSNNSSSVCNLGSPKPEKRQANSPLPPTPKAIVGQAHHLQAGSISNLASGRNSVISVIEAGAEGHEAESGEASPQRKHSKSLSPSKEGEGNKNIEGMYAKVMKKHKFSRNSPSSQNSSPILARKQQQDGLGVSPLDSAAALLVDAQKGRVRSNSYSAKDHGYETIPADGQMMHGNRKSDCYAANMLQKERQQEGGAIAQPVTIATAIAISASAKHYETIINQTQPSPPPSRSNNDPGYEQLQPHPVPSGEDEAKKSDYDPNYEVLKSRAHSDDGYAKVLDKKRPPVNADGSGYSTIPGADANHNYASILETKAAAETDHYARIAENAVAGTPGSSSSRLTPTSPSSTSNSVSLNSSTVATSTPISSQYESLTGTGSETDPNYESVCYLTTASNTATTTTATTNTSSGIEPGYEPLQTDQESDTQTSSPRSGAAFTPSEQLLVDDYFHV

SEQ ID NO: 18508 - DNA, 2698 bp, DROSOPHILA
gattcggttagcattggcggcagatcggtaaccgaaatgtttctcgactcaaatttaccctgtagagatgggttttaagtggcgagtttcgattaaacatattaaatacctttggaaaaggacatctccaagcctttgcattgctgttcttggccaaagtgttgaccaaaagatcgatgagaatcttccgcttgcgttcccgcagcaccttgcacacatcgaaggtgatgtcgaatatctgggttatgaccttcttggcattgggtatggacactcgaagtgaaccactgaaaacactcaactgttgcataatattcacagaagcctccatggtccggtttttgggtggtataatcctgcagtacaggttcgcgaaatagttgggattgcccacgcaatccatttgcttcatttctatatagtagcccatgttctgtgggaaataaatgctatatgttgagatatttcttggattagatttgtttcaaaacccactggaatcagcttagcggtatctgcggtatctagactgcatactataatgccgaaccaccagattattggcaacattcccgtgtctcaatggtcgatcaactgagcccacgatcgccccatattacccgttgatcaagtggcataatccacatctaatgacagtttaatcataggcattattgagtaattaaacgacttgcttgtgtgtgtgtgtgtgtgtgtggttattctcgtacgccccattgagttgggccaacacttttggtacccaattcctcctagccgtatccatatcggcatcaatgtcattcggagctgggggcttttaccatagctgcgccatcagagtaaacaaatccggcagttggctcatgaccaccagcatcagcatcccaacccatctggtctccacttggggatcatcagttttaaccgcaagcgtgaagggcaatttggtaatgtaatgttataggccacgcgaggctgagaagtaagttcacttcagttgtcgttttcattatcgtttccaatatttatttcggtgtgtgtgtgtgtgtttgcttaagactaactacggaatgtagacatttcaatttcgtatggcattcaggcagtgcataatactttcaagcgaaatattacaggggacatctatggacatctatggacatctatggacatatgttaaactattgaggtgccaccggcagatggtcaccctccggctggaatccgttctcatcggccacgtagcgcagggtgatgagattgccatcgggatcgctgtagctgtaggatccggtctggaccagtacaagctcctcgtgttcgtcgatcacctggccatcggaggtctcggtcttgggaacgatgatcttcttcagatagccaatgttctctacgcgtattccgttcgatgtctcatagctatatggtttggaagagatcgcagttacgttctgatcctattcgaaaatggttatgctatatatcatttctgtggctcacctgctgttgaagctaccgtcggcgttgttcacattatcctgcttgacaatggtggcagctgtggtggtggtcgctgcactggtggctcccgcccgctgatcctgtggcctggccaggacatagctgagcagcagggcggagcagacgaggaagactaacttgtacatatcgaagggggttgatgtatatatcctgtcacggagtgataagtgtgggcggtatccagcgagcgactgttgactgcccaatcgagagccgggctttttatactctggtccgtggcttcggctgcttacgattgccattacgatgggcgcactagataagcttcgaagtactcgcagaaattacgagcgggcgctgtgacttcttttctttgctttttttttggattttggtttcggttttattgccccgcgatgagtaaacatcagatcgcaccgccaaaagagatgaagatggagcgacgatgtcaacaggtgacagtttactgccctccaccccgcgccacagccacatatcgccagatctggacaggctacgtgattcgtctgagcagaataacatatatattcttctgggagtcggtgctcacctcggttagttccgctgagtccacagcaagttcctggggattccgttaaggatttgagttgaaggagtgctggtatgccctgtaagttcgtacacaatttgtccaatttttccataactcatatcgtattccggatttggcaatccgatcacgtttcaattaggaaaatatttgccagccgaaaagctaacggtgaacgccataaaaaatgtagagtattgttggctataaatcgaattgataacactgcgaacttacagatacccaaatgatggctatatgctgcgaatattaaccacaattgtgtcatagagcctagaaacttgcgggaacggaatggtcaatgaacttcgtttgaataaaaacccaaaaacaaaagagccgagcgacaaaaatttcaattcttcttcgatacatatctgatcaatttcgtggtaagagaaatgttctccaaccttttcctcgaatcgcttcgtttgtttggctttagaattaacatgttattgtaaattaaaacgagttaaacaattccgaatcacactttcggtttctgtagggcttgcataatacccattgattttgtctggtcgaagttctaat

SEQ ID NO: 18509 - DNA, 617 bp, DROSOPHILA
caggatatatacatcaacccccttcgatatgtacaagttagtcttcctcgtctgctccgccctgctgctcagctatgtcctggccaggccacaggatcagcgggcgggagccaccagtgcagcgaccaccaccacagctgccaccattgtcaagcaggataatgtgaacaacgccgacggtagcttcaacagcagctatgagacatcgaacggaatacgcgtagagaacattggctatctgaagaagatcatcgttcccaagaccgagacctccgatggccaggtgatcgacgaacacgaggagcttgtactggtccagaccggatcctacagctacagcgatcccgatggcaatctcatcaccctgcgctacgtggccgatgagaacggattccagccggagggtgaccatctgccggtggcacctcaatagtttaacatatgtccatagatgtccatagatgtccatagatgtcccctgtaatatttcgcttgaaagtattatgcactgcctgaatgccatacgaaattgaaatgtctacattccgtagttagtcttaagcaaacacacacacacacaccgaaataaatattggaaacgataatgaaaacgacaa

SEQ ID NO: 18510 - protein, 134 aa, DROSOPHILA
MYKLVFLVCSALLLSYVLARPQDQRAGATSAATTTTAATIVKQDNVNNADGSFNSSYETSNGIRVENIGYLKKIIVPKTETSDGQVIDEHEELVLVQTGSYSYSDPDGNLITLRYVADENGFQPEGDHLPVAPQ

SEQ ID NO: 18511 - DNA, 2999 bp, DROSOPHILA
agtccgatacgcagaaagagagctgacgcaatgtcaacaattggacaaagtgatcggtttgtcatcgccaatcaccgtcccatcttcgagagcgtgagctggagctgcatgtatagagtctggagccgaaagtcttaagtgggcttacacgcttcactgggccacttgttgactctggctaatttaaagtcgtgcacacgcgctctcaaagcggaagtttacctagagttggggaagaatccaaaggttggcagtgggttagggaatttacttgttaaacgattgaatacttaattccttaatagtgggtttgaagttgttaaattacagctaaaggcactttatgcatatttggcaataaaatgctaacagttctgtaagggttttcctttattaatattaaatgcaaatattgagaatgcctaatcgatcgataatggggataacacatgtaattagacttattaacttagtgctaatgattaggccccttcgaacctccaatacaaagagggtcttcagtttcgcctttgaagcatgaaagcactatatgtatatgaagtaatctctcccatcaaggaactaaacatcctttcgttcttacccaagtaatgaaaattgcatcataaaaagaaatcattgaaatcgaggccacttttgtattttacaattattttacaacttgattttaccacaagtctactagtggcgccactcattaaatttaaaagctgtctaaaaagctttcgtgtctctgaagcctctcgtaagctgaaagttgggaaacccatttccgtcttagaaaaagagtaaataatatgtaatatcattacaaacaatgttataaatatacattttaacttcagatacgcatgacatatttttctgtaattattaaggattttatatcgcaaaacaatgatgataagagaaaaactagaattgttccgtttgatttatagaaaaatgtacatttatttacataaaaatcccatcaccgctatcagtcttttggcaaattgctgtcgctcttccctcggctgtagggtcgtgctccaccgagcatcctttccagcagactctgcttggacttgcgcttggaggccagcacctctttgcacagctcgttgaaaacctcggccacctggtcgacgtggtcggcggcggagacctcgctgaacttgcactcaaagtccttggccaggatttcgccctcgtcgcggctcacctggcgcaggtgcaccatatccactttgttggcacaaagttggacgggtgtatcggactgaagatcggatttggcacggcgtatatagttgaaactcttgcgatctgttatcgagtagaccagcaataggccatcggcccactgaacgagctcagctgcattggggtattcgtcttcagcctggaataatgcgatattaatctataatctatataattttatttgattctcataacccaccttgggacatgtgtctagtatttcaaagagcaccggttcgccatccaccatagcctcgtgcttgtagcgattctcagtctgatgatcgtactccccgatgtaacgctttgtcaagaaacgcacaattagggctgcaatcaaattaaataaccaaaaccatttacgtaacatgaatttaatttattgtcgtctgcgctatcagcgggatcaggtgtaaaccagggtaacgccctctaaaacccaacaaccctcaattcgaaaatgggtcaggatttaagcgagcgtgaagtatgagtagtttctatagttctgccaaaatgaattgcagggaccaatgcagaagtaactgcctccggggcaggtgaatattgtgaaaagtgtgtcttgtggggttaataaacccgattcggctgcccggcaacaaaacgctgagccctaaagttgcgtgactcgggccaacaaacgtcgtccttcgtaggcctcgtgtcctgccgagggggtgaagttcgtcctggcctggtccctggtcatttcctatgcaagtcctttgaactcacgactaagcaaagtgagacaacaacaatagtaacactgggaactgaaacctcaggcgccacttcaagcgaggatgacaacgtctagtctacactgaagcctcaagttgcgaaaatttgaactttataagatacatttccctaggtaaattttgccattttatttcttaccttccagcaaattaatttttgtggtttatgcggctatgaattttgatatttgacaatggactaaataaaatgtattaatttatatttttaatataattgtagtgaataccaactgtatttaaggctttttgagctcgcgtgtgtgcgttttttgtgtggctagtggttgccttggttgcctcgccactttttaatgacattttcatcatttattttcccaacaccgcatacatacgaccagtgcttttccctcaaaatttatgttatccgaattttcttttatactttccgcgaggtcaacgtttaaattcttcgacgcgcgacgccggaatggcaatggggatggcgcttctccgcccgctgggcactgatctcgtctaggcccatatgtctatatggctatatgtctatatggccaagtgcgtgtgtgcacggtgaatttttccggcgagcggtgggcggtgggcgtggaggtgtatgtgggcgatttaattgctccgccgcatccacagacatagacacacagttgaattaaatattttcccggtctctggtcgctgatggtggcggagtgacaataaaatatgtggcaataaatttattaaacatatatgcatttgccattataagttgcttttgggataggaattctatttgctttagggtgttttgtttttgtgcgccaaaagagtgtatgaatttttagcatttagctagatttaagttttagggtttatcttaaaatatttttcgaacaaccctactagcattgtaattattattaattttgctatgtgactacttca

SEQ ID NO: 18512 - DNA, 606 bp, DROSOPHILA
atgaccagggaccaggccaggacgaacttcaccccctcggcaggacacgaggcctacgaaggacgacccctaattgtgcgtttcttgacaaagcgttacatcggggagtacgatcatcagactgagaatcgctacaagcacgaggctatggtggatggcgaaccggtgctctttgaaatactagacacatgtcccaaggctgaagacgaataccccaatgcagctgagctcgttcagtgggccgatggcctattgctggtctactcgataacagatcgcaagagtttcaactatatacgccgtgccaaatccgatcttcagtccgatacacccgtccaactttgtgccaacaaagtggatatggtgcacctgcgccaggtgagccgcgacgagggcgaaatcctggccaaggactttgagtgcaagttcagcgaggtctccgccgccgaccacgtcgaccaggtggccgaggttttcaacgagctgtgcaaagaggtgctggcctccaagcgcaagtccaagcagagtctgctggaaaggatgctcggtggagcacgaccctacagccgagggaagagcgacagcaatttgccaaaagactgatag

SEQ ID NO: 18513 - protein, 200 aa, DROSOPHILA
MTRDQARTNFTPSAGHEAYEGRPLIVRFLTKRYIGEYDHQTENRYKHEAMVDGEPVLFEILDTCPKAEDEYPNAAELVQWADGLLLVYSITDRKSFNYIRRAKSDLQSDTPVQLCANKVDMVHLRQVSRDEGEILAKDFECKFSEVSAADHVDQVAEVFNELCKEVLASKRKSKQSLLERMLGGARPYSRGKSDSNLPKD

SEQ ID NO: 18514 - DNA, 12075 bp, DROSOPHILA
ttgaaagaacaaaaaaaaaacataaacaaaagtattttggtcaggtaaacaaagagagagagagaaaggacaggaaagagagagcaattctcacagctgcgcattggaatggcttctaaacttggtttcacaatatttcaggacgctagtgtacgcgagtgaaagaatttctcagttggtcaagtgaatttaccactagaaagttaataaataaagcaaagagtgacaaacgaaaaaaaaaacaaattttaccttatcaaacattaactaaaaatcaaatcacacataagtgcaatcgattccttacaacttatgctataatgagctttaaggatatagccgcccaataagccagcaatcgtttggcctaaactaaaggtaatttaatctccataaatggtagttatttgttttaacaaagttaagaaatatattgaaaatacgcgttatgcatcgcctttaaagggtcctttctttcttttgtggggtgtgagtacttttctttattctgcctcttgtatttgctcgatgactcattcgactattggccgacactcgtctgcgcttttattggaagcatttgtggattgtggaatttttccccctgcttcaagtgtgtgagtgtgtgtgcgtgtgtgtgagtcagagggtaaaaactagagggaaaactatttgcattaaaatccattacgataagtgataaaactactgaaaaacaaacctaaaatctaacaaaattataaagaatttttaactttctttaactgtatcacttcttattaaaaaaaaagaggagaaagagaactcacctagaatgtttcgaaagcaataaatcttcaatccttaacgtctattgttttataagaaatttgtattataaaatagttggcaatgtacccggcttagtcttcgacgtattgcacatataggacagcaaataataaattcttagccccacccctggcttcaattcaaatttccctggcgagttgccgggggtatgactcatagcttcgagctgccacagaaacaaatcgtggacgagtgtataaccataaagttggggcaattataaaatgtcagtgctgggcagtggtagtctctggccaatttgcagcccactcgaatgactcgaatgtctataaagtattcccgttcctctatttccactccagttaaccggaaaccaggacacccacagagaggaagaaggacaagatgtcgtcggttaaggtggcggtgcgagtgcgccccttcaactcgcgcgaaatagccagggagtcgaaatgcatcatcgagatggcaggagccacaacgggtgagaatcccataaacactctagatttctcttaattaaatacttcaatcttatgtcctgacagccatcaccaatccaaaggtgccgcccaacacaagcgattcagtaaagcgcttcaactttgattactcctactggtcacatgatgtaagttttatttcgagtccaagaaaaaattttacttaaatttatattcgcatcacagcaccacgatgccgatttctccacacaatcgatggtgtacaaggacattggcgaggagatgttacagcactccttcgatggctacaatgtctgtatctttgcctatggccagactggagctggaaagtcgtataccatgatgggcaggcaggaggagcagcaagagggcataatacccatgatatgcaaggatctgttcactcgcatacaggatactgagaccgatgacctcaagtactcggtgcgtctgttaaacagtcttttattttctagcatctaatatagcaattactttaggttgaggtttcctatatggaaatctattgcgagcgagtcagggatttgttgaatccgaaaaacaagggcaatctgcgtgtgagggagcatccccttttgggtccctatgtggaggatttgtccaaactagccgttaccgattaccaggacattcacgatctcattgatgaaggcaacaaagctcggtgagtattattataaatatgtttttaattcttatcatcttattatatatacttataataactttcagaactgtggcagctactaacatgaacgaaaccagttcccgctctcatgccgtctttacaatcttcttcacccaacgtcgtcatgatctgatgaccaatttgaccacagaaaaggtatccaagataagcttggtagacttggccgggtcggaacgagcggattccactggtgccaagggcactcgcttgaaggagggagccaacattaacaagtccttgaccacattgggcaaagttatctcagctttggcggaagtggtaagttcttgaagtctatatctcaattttaaactaactttatgctaataaaataaatgcattttcttgctgtctggatattcaatagtctgtaagtttatattgatttctatataccttttattgttgctaatatatttattatttttggaaggcttccaagaaaaagaacaccaagaaggcagattttattccgtaccgtgattcggccttgacctggctgttacgtgaaaacttgggaggaaattcgaagacagctatgattgcggctatctcaccagcagatattaactacgatgaaaccctcagcacactgcggtaagttaaaattattatttaaataaatatctgatccaatgcttaatacccattttgtttagctatgcggatcgtgccaagcaaattgtttgcaaggctgtggtcaatgaagatgccaatgccaagctgattcgcgaactcaaggaggagatccagaagctgcgggacttactcaaagccgagggcattgaagtgcaggaaggtaagttggaagtagtcttacctagtctagatctggttaaaatatattcaactaagctagagtacattaaacccagccacacatttcaaaactactcgcaacacttgaaaaaaaaaaaacaaaacaaaaacccctgcctaaggtagttctagtcctagtctagttataaatactagaaaaaaagcaaaaccgatcccaaaaccaaacctatttcgtttaggacccgatggcaaagtggtgtgtgagaagcgcgatgcgaatagtaagtaaagtcatatgaaactcagcgctataagaaaaccaaaggcttcacatgcaacaaatgttattcaataaatatgcaaaaatgtacagtgcgtttcaaagcctgatgcgagtttatatttgttaactatacttgaataggttgcgactcaaatgcaattttcatgaatcttcctcgcaattaattgaaagttttgaaacgcactgctattgtaatctaaccactgccaataataatacatttctctctgtgtgtgaatttgtattgtgctgtatcgtcaaagcttctaaacaatacgcttcaggacgaataaaatcttatataacccatactataatcacagtcgagtcctctttatgttgccatatataaaacaccaaagagactgaaagatgtttccaaatagttaatttcagttgcccaagtccaaaacaagactggcaccaactcctcgcagtccgcgctgcttaaaggctagaatgtggacatgcccgagttatgcagtagtccccaaataaccatatcccattggcatctgcttcgtttcgtatcaaaaatattgtgaacatttatattcaatatatctttatgtatatcatacctttaaaaactagcacgcttatcactgcgcttgtgaccgctaaatggtcaaatgttttttgttctcataccacttttgcatttgcagaggatgagctcaccaagtcaacggtgatcaagtcgcccactaagtcacgtaatcgtaatggatccaccacggagatggctgtggatcagctgcaggccagcgagaaacttattgcaggtgagtgggaatatctaagacccctttaccaaacgttatcattaaaatatcaatctttaaatggacataatccatcgcagagctcaacgagacctgggaggagaaacttaagcgcaccgaggagattcgcgtgcagcgagaggcggtcttcgccgaaatgggtgtggctgtcaaggaagatggaataacagttggcgtattctcaccgaagaagactccgcatttggtcaacctaaacgaggatcccaatctgtctgagtgtctgctttactacatcaaggagggtctaactcggttgggtacccatgaagcaaatgtgccccaggacattcagctctccggatcgcacatcctcaaagagcactgcacctttgagaacaagaacagcacggttaccctgctgccacacaaggatgctatcatctatgtaaatggacgcaagttggttgaaccggaggttcttaagaccggttctcgcgtgatcctcggaaagaaccacgtgttccgctttaccaatccagaacaggcacgcgaattacgggataagatcgagaccgaaaatgaggctgagaacgaagtggagaagacagacacccagcaggtggactggaattttgcccagtgcgaattgctcgagaagcaaggcattgatcttaaagctgaaatgaagaagcgtttagacaacttggaggaacaatacaagcgggagaaacttcaggccgatcagcaattcgaggagcagcgcaaaacgtacgaggctcgcatcgatgctttgcaaaaacaggttgaggagcaatccatgaccatgtccatgtacagcagctactcgccggaggatttccaccaggaggaggacgtctacagtacgtgtatgacattgaatttgagataacattagagtaactattatataatccttagccaaccccatgtacgaatcctgctggacagcaagagaggctggcttggctgcctgggctttccgcaagtggcgttaccaccaattcacctctttgcgagatgatctctggggcaatgctatattccttaaggaagcgaatgccatttccgttgagttaaagaagaaggtaaatagtttacgcccaatacttaatataatagattagagatcatatagttaaatatttatttcaggtacaattccaatttactctcttgaccgacaccttgtactctcctttgccgcctgagctggcatccactgtggctcctgtgcatcaggaggatgagttcggagctccacctgtctctaagaccttggtggccgtcgaagtaaccgatactaagaacggagccactcaccactggtctctggagaagttacggtaggttcttttatatccggaaatccatgcgaattcctgctactccctcacattcattcttctctgcactttggttaaaattaaaaaaaaagctggcttttgatttgagttgaatattatttaaataatacgtgcatggtggttgtagttcatggattctagtttctatcaaacgctctagaatttgttggttacttttataactttggctgtaaacaaagcgaagatcacgccgccaccatttacgactcaagtctcatcgccatcattcgtcaaaagccccgacagcttgttatgtttgtttgaaccaatgttgatttgtactttttcggttctcttactacgaatcccaaatccccaaatccacaccgacaaaacctgaaccaaaatcccaaccaaaatcattttcgtacacaaacaagctatcgcctcgagctgatgagacaaatatacaatgtcgagagcccaccatcgtccatgctgttcgatacgtccggcatggaggcattgagcggatggatctcaccacccagccaacatcctggccagcaggcgcagctgctcccattggagccaccagtcgaaagcgagcgtggtcgtctcacattggccaatctgataccttctaggtttgctttgaccgcaggtttcatttgtatatagacgtgtagaaattattcttagttgtagttgcatggctttccatattgtcttctgatctgggatctgggcttaagcttgctgtggcgctctccccgcacttatctatctatgcaataattttattatatacccaatacaaatactacgttaactttatgattctaatttcttgtatctgtttttcaggcaacgtttggagctgatgcgcgagatgtaccacaacgaagccgaaatgagtcccacttcaccggactataatgtggagagcctcactggtggagatccattctacgatcgcttcccctggttccgcatggtgggtcgctccttcatctatctgagcaacctgctctacccagtgccattggtccacaaggtggccattgtcaacgaacgcggagatgtgcgtggctacctaaggattgctgtgcagcccgttctggatgaggagtccattgatttcaataatggtgtcaagcagtcagctcgcttggttttcaatgaggatgatgccaaaccgaaataccgagctctcaatgaaaaggatgatgtgcagcgctatattgacaatggtggtttggacagcaagctggagggtgagtttccacggactatatatcactagagatataactaaaatttcatattcattatttgtaaaagaacttgaggatgtggactctggtcgtggcattgactctaactccgcatccgagtgccacgaaaattcggaggagcctggcgagcatctgcaggtgggcaaggagttcactttccgggtcactgtgctacaggccactggtattggggctgaatatgccgatatcttctgccagttcaagtacgtaatctttcggaaattaactttaggtttgtggtttataaactgttacctttacagctttttgcatcgtcatgaggaggctttctccaccgaacccgtcaagaattcggcatcgggtgctcctctaggcttctaccatgtgcagaacgtaagtggaagattacattaccaagagttttccaccatatcgattattaactgctatatttctgtagataactgtacccgtaaccaaatccttcatcgagtatttgaagacccaacccataatgttcaagatatttgggcactaccagacgcacccattgcataaggatgccaaacaggattttgtttctcggccaccaccacgtcgcatgttgccaccgagcataccgatcagtcagccagtgcgtagtcccaagtttggaccactaccgtgtgcacccacgtctacggttttggctaagcacgatgttttggtttggtttgaaatctgtgaattggctcccaatggagaatatgtgccatcggttagtatggcgcagatgtaatcattcccagtctcactcgcaataatccaaacttaaatttgtaaacaggtggtggagcacagcgatgatcttccctgccgcggactgttcctcttgcatcagggcatccagcggcgcattcgtattactatcgtacatgagcccacaaccgaggtgaagtggaaggacatcaatgagttggtggttggacgtatccgcaatacaccggagtcatccgacgaacaggacgaagacgcctgtgtcttatctttgggcttgttcccaggcgaggctttggaggtgcccggagatgatagatctttctaccgttttgaggctgcctgggactcgagtctgcacaactcggcactgctcaaccgcgtttctcaaggcggtgagaccatctacatcaccctgagcgcttacttggaggtaagatagtatattttaatttactgttcattttttatgtatatgtactccttagctggagaattgcgcccgcccggccataattaccaaggacctgagcatggttatctatggacgcgatgcccgcaccggtccgcgctccctgaagcacctgttttcgggacagtaccgcaatccggaggccaatcgcctaaccggggtttacgagctagcactgcgcagagcatccgaagcaggtagtccaggtagcaattctcaatgtagttgtactcgtactcagtccgcttgcactcgcttgtcgaatcttcagagctgtcccccacttactctttctcttggtgcctttgcaggtgtacaaaggcgtcaacgtcgagtgctggacaccagctctacttatgtgcgcggcgaggagaatcttcatggctggaggccaaggggtgactccctgatcttcgaccaccagtgggagctggagaaactcaccagacttgaagaggttggacgcatgcggcacttgcttctgctgcgcgaacgtctgggcatggacaccaacccaaatccgaccaccaagaccgagaaggatgtatgcaatctagctgctcgggcagccacatcacccgtacatatggtcattccacaatcgccgcagactccggtcaaggacccacagcaaatcattccagaacgcgaatacaaccaacgggagcaggatctcatgcttaaatgcttaaagttggtgcagggtaagttaatactgagacttatcaagcgttccagtcactctcttctaaattcatttaaggacgctatactaagagcgaggccaacgatacgcaaactcagtcggatgtttcgcctagcgatgagggatgcgccgacatgaccgtcagctgcatctccagcaattccatggagtgagtagtcgtttagccacccgtataaacacaccacccacaccagcaccacccatcttagttagcttgcatccattcggctttcttggtttattagaacaaacgaaattggcacgacaccacagcacacccacagcatatatcagtccaccacactaacccaaatcaccttatcacatcctccacctcacaaaaataccctgtatatcccgttcttactctgaacgatccccttgggacagtcggagcgcagagtacatgcgctatgtggaatattgtagacataaccacgcttacagcgacaaggcggtccgcaaagcggtacacagtatttggagcggtattcgcatgtctccggacaaacgccagcacatcccacatatgtggagttgtgacagcagccgaacttgaagggctgcttgatatacttctcctcagggagcgggttccgcttgagggctatttcttcacctattggatgaacgatgtggtatctatgctccaggctatcaaattcgtcaaaaacctttttatgcgggttctccatgaactcgtcatcgtctcgcaaagcatcgaaatgatccaaggttcgagcggtgcgaaaagtcatgccattagttactgttaccggaagttcattgggccaggtcaactcagactccaaggttggctcggcaatgtcatccggccaggtaatctggtcctctgcagaatcttctgccatcagtacatgtttttgaaagagaattccaataagctgtacgacaaaataaaccttcggccatgccatcataggaaaattataataataaactgagattaaaactgtatcacattaaataaatcaggactgtgtcagaattgctgtgaaatggcaatttgttagggtcaccaagcaccaatcactattgtttataagtcattcgcagctagagatttgactagattacttcttttagttgcaaacattagtttattgtctttttaaaacacagaaatattttgaggcttttactgaaaaacgcgatgagtttcaacaaccagttgctttatgtctagaggacaatcagttttaaggatgcatagttgcagattttcgttaaagacatagtcaggtttgcatacgcaatttacaccgcaatatttgggacacttgagcgatttgaaggcacaggtttcggggcaaactccagcacacctcaccatggtggcattctcgccgcaaaatcccgaaaacggattccatatgtacttcatgcggcccggatccgggtccacatcatggttcaggatatgatcctcgtcgatgccagttgtcatgaccgaatccatcagcaaggccggcagcagcagaaagcagagggaattgaaccaaaccatcatgcaaaacaaaagcaactgaagctattagcaatcacttccacttgtttcccagcctttactgcttctgctgccagctgcttccctgtaattgcccaccattcgatcatcgcagtgcaaaaactaacgataaacacacaccatcattcattttcctaataactcgagatactcaaaaacgaaacttccaatactttatttgtttgttttcctttcggttttcttttacacaattagaaacaacaaatttgtaattcgacgcaggtaattttctgttctatccaaagaacctataaatctaaaccaactcttgagcgaggcgtttgactaacaacctttaatttccccaatcagattatgttcaccggatcgagctgatgcacccaatggctgggaggcacctgctccggctactcagccggctcttcccctccgtctctatgtgccggaactggaggagattcgcgtgagtcctgtggtggcccgcaagggtctgttgaatgtcctggagcacggcggttccggctggaagaagcgctgggtggtatgtatttaaccctgtatgttttaaagtgcattctaaccttgagttttggttaaatagatcgtccgtcgcccgtacgtgtttatctaccgctcggagaaggatcccgttgaacgggctgtcctcaatctggcgactgcgcatgtggagtgcagcgaggaccaggcggccatggtcaagatacccaacacattcaggtcggtttgatttccacttaagaagtagacatgcattgctaaataatacatcgatttttcttcagtgtggtgaccaagcatcgtggctatctgctgcaaactctcggtgacaaggaagtacacgactggctgtatgctatcaatccattgcttgctgggcagataaagtaagtaaagaactgaatatacagcattttctaaataataattatatcatattttcaatagatcccgcctggcgcgacggactttggagcctgctagccagacggcttcccagatccaggccaccaatgcggcgaatgccaatagtgcgagcaaatgagatacgattacgatggagtccgttttggtttactgagacgcaggctatggctggctgcagcgcctgagtatcgccagacgactggtcaggcggagatcacaacaaatggcagggacagcagctggcaactgattgatatagcttgaaggattccatcggaagagggaaatgaaatagatgattgttgctgtgaaagcacatcttaatcgaatgcaaaaatcagagataatgagcagaaagaaaccaaatgcaaagcgtacgtaattattaagtagttcaacaacaacctatacaacaatggattatattacatttcgtgattagttggccacggcccaaagagtaggcactagcagctccaatcagatacgatagcctactttttagaatccccttcgattagttttattggacaattttgtaaatagccttcgtttgattcgattgtataaatatttggtattagttaacggaccatttagtttcagttcccacgtgatattatgttgatcagttagactatgtattttttctcaagtatgcgacaaatatgtaaagcttgtaatgcaaacaaacacacacgtatatgcattttaatggagcaaactaaagcaaaatacagacatatatataaatgaggaactatatgtaatgaattaatgtataaaaccctatatatttgctgtttatacacaaattttcatgtacttgtattgtttaacttaaaaagagcaggtaaacgccagagaaaattatgataccaaaaatatgtgtgtgtgtgttaaagaaagaccgtacagtatataggatataggagacgtgaggtataagctcagcagaattgcgaaatctctataaaggtaacgattattgttagatctatatatatatacaagcaaaacagaactatatgcgaatgaaactattttacacaccagagttacgaaccatgaaatcggcgctgctataactcagctgccccacattgtcaactgttgac

SEQ ID NO: 18515 - DNA, 5322 bp, DROSOPHILA
atgactcatagcttcgagctgccacagaaacaaatcgtggacgagtgtataaccataaagacacccacagagaggaagaaggacaagatgtcgtcggttaaggtggcggtgcgagtgcgccccttcaactcgcgcgaaatagccagggagtcgaaatgcatcatcgagatggcaggagccacaacggccatcaccaatccaaaggtgccgcccaacacaagcgattcagtaaagcgcttcaactttgattactcctactggtcacatgatcaccacgatgccgatttctccacacaatcgatggtgtacaaggacattggcgaggagatgttacagcactccttcgatggctacaatgtctgtatctttgcctatggccagactggagctggaaagtcgtataccatgatgggcaggcaggaggagcagcaagagggcataatacccatgatatgcaaggatctgttcactcgcatacaggatactgagaccgatgacctcaagtactcggttgaggtttcctatatggaaatctattgcgagcgagtcagggatttgttgaatccgaaaaacaagggcaatctgcgtgtgagggagcatccccttttgggtccctatgtggaggatttgtccaaactagccgttaccgattaccaggacattcacgatctcattgatgaaggcaacaaagctcgaactgtggcagctactaacatgaacgaaaccagttcccgctctcatgccgtctttacaatcttcttcacccaacgtcgtcatgatctgatgaccaatttgaccacagaaaaggtatccaagataagcttggtagacttggccgggtcggaacgagcggattccactggtgccaagggcactcgcttgaaggagggagccaacattaacaagtccttgaccacattgggcaaagttatctcagctttggcggaagtggcttccaagaaaaagaacaccaagaaggcagattttattccgtaccgtgattcggccttgacctggctgttacgtgaaaacttgggaggaaattcgaagacagctatgattgcggctatctcaccagcagatattaactacgatgaaaccctcagcacactgcgctatgcggatcgtgccaagcaaattgtttgcaaggctgtggtcaatgaagatgccaatgccaagctgattcgcgaactcaaggaggagatccagaagctgcgggacttactcaaagccgagggcattgaagtgcaggaaggacccgatggcaaagtggtgtgtgagaagcgcgatgcgaataaggatgagctcaccaagtcaacggtgatcaagtcgcccactaagtcacgtaatcgtaatggatccaccacggagatggctgtggatcagctgcaggccagcgagaaacttattgcagagctcaacgagacctgggaggagaaacttaagcgcaccgaggagattcgcgtgcagcgagaggcggtcttcgccgaaatgggtgtggctgtcaaggaagatggaataacagttggcgtattctcaccgaagaagactccgcatttggtcaacctaaacgaggatcccaatctgtctgagtgtctgctttactacatcaaggagggtctaactcggttgggtacccatgaagcaaatgtgccccaggacattcagctctccggatcgcacatcctcaaagagcactgcacctttgagaacaagaacagcacggttaccctgctgccacacaaggatgctatcatctatgtaaatggacgcaagttggttgaaccggaggttcttaagaccggttctcgcgtgatcctcggaaagaaccacgtgttccgctttaccaatccagaacaggcacgcgaattacgggataagatcgagaccgaaaatgaggctgagaacgaagtggagaagacagacacccagcaggtggactggaattttgcccagtgcgaattgctcgagaagcaaggcattgatcttaaagctgaaatgaagaagcgtttagacaacttggaggaacaatacaagcgggagaaacttcaggccgatcagcaattcgaggagcagcgcaaaacgtacgaggctcgcatcgatgctttgcaaaaacaggttgaggagcaatccatgaccatgtccatgtacagcagctactcgccggaggatttccaccaggaggaggacgtctacaccaaccccatgtacgaatcctgctggacagcaagagaggctggcttggctgcctgggctttccgcaagtggcgttaccaccaattcacctctttgcgagatgatctctggggcaatgctatattccttaaggaagcgaatgccatttccgttgagttaaagaagaaggtacaattccaatttactctcttgaccgacaccttgtactctcctttgccgcctgagctggcatccactgtggctcctgtgcatcaggaggatgagttcggagctccacctgtctctaagaccttggtggccgtcgaagtaaccgatactaagaacggagccactcaccactggtctctggagaagttacgctatcgcctcgagctgatgagacaaatatacaatgtcgagagcccaccatcgtccatgctgttcgatacgtccggcatggaggcattgagcggatggatctcaccacccagccaacatcctggccagcaggcgcagctgctcccattggagccaccagtcgaaagcgagcgtggtcgtctcacattggccaatctgataccttctaggcaacgtttggagctgatgcgcgagatgtaccacaacgaagccgaaatgagtcccacttcaccggactataatgtggagagcctcactggtggagatccattctacgatcgcttcccctggttccgcatggtgggtcgctccttcatctatctgagcaacctgctctacccagtgccattggtccacaaggtggccattgtcaacgaacgcggagatgtgcgtggctacctaaggattgctgtgcagcccgttctggatgaggagtccattgatttcaataatggtgtcaagcagtcagctcgcttggttttcaatgaggatgatgccaaaccgaaataccgagctctcaatgaaaaggatgatgtgcagcgctatattgacaatggtggtttggacagcaagctggaggaacttgaggatgtggactctggtcgtggcattgactctaactccgcatccgagtgccacgaaaattcggaggagcctggcgagcatctgcaggtgggcaaggagttcactttccgggtcactgtgctacaggccactggtattggggctgaatatgccgatatcttctgccagttcaactttttgcatcgtcatgaggaggctttctccaccgaacccgtcaagaattcggcatcgggtgctcctctaggcttctaccatgtgcagaacataactgtacccgtaaccaaatccttcatcgagtatttgaagacccaacccataatgttcaagatatttgggcactaccagacgcacccattgcataaggatgccaaacaggattttgtttctcggccaccaccacgtcgcatgttgccaccgagcataccgatcagtcagccagtgcgtagtcccaagtttggaccactaccgtgtgcacccacgtctacggttttggctaagcacgatgttttggtttggtttgaaatctgtgaattggctcccaatggagaatatgtgccatcggtggtggagcacagcgatgatcttccctgccgcggactgttcctcttgcatcagggcatccagcggcgcattcgtattactatcgtacatgagcccacaaccgaggtgaagtggaaggacatcaatgagttggtggttggacgtatccgcaatacaccggagtcatccgacgaacaggacgaagacgcctgtgtcttatctttgggcttgttcccaggcgaggctttggaggtgcccggagatgatagatctttctaccgttttgaggctgcctgggactcgagtctgcacaactcggcactgctcaaccgcgtttctcaaggcggtgagaccatctacatcaccctgagcgcttacttggagctggagaattgcgcccgcccggccataattaccaaggacctgagcatggttatctatggacgcgatgcccgcaccggtccgcgctccctgaagcacctgttttcgggacagtaccgcaatccggaggccaatcgcctaaccggggtttacgagctagcactgcgcagagcatccgaagcaggtagtccaggtgtacaaaggcgtcaacgtcgagtgctggacaccagctctacttatgtgcgcggcgaggagaatcttcatggctggaggccaaggggtgactccctgatcttcgaccaccagtgggagctggagaaactcaccagacttgaagaggttggacgcatgcggcacttgcttctgctgcgcgaacgtctgggcatggacaccaacccaaatccgaccaccaagaccgagaaggatgtatgcaatctagctgctcgggcagccacatcacccgtacatatggtcattccacaatcgccgcagactccggtcaaggacccacagcaaatcattccagaacgcgaatacaaccaacgggagcaggatctcatgcttaaatgcttaaagttggtgcagggacgctatactaagagcgaggccaacgatacgcaaactcagtcggatgtttcgcctagcgatgagggatgcgccgacatgaccgtcagctgcatctccagcaattccatggaattatgttcaccggatcgagctgatgcacccaatggctgggaggcacctgctccggctactcagccggctcttcccctccgtctctatgtgccggaactggaggagattcgcgtgagtcctgtggtggcccgcaagggtctgttgaatgtcctggagcacggcggttccggctggaagaagcgctgggtgatcgtccgtcgcccgtacgtgtttatctaccgctcggagaaggatcccgttgaacgggctgtcctcaatctggcgactgcgcatgtggagtgcagcgaggaccaggcggccatggtcaagatacccaacacattcagtgtggtgaccaagcatcgtggctatctgctgcaaactctcggtgacaaggaagtacacgactggctgtatgctatcaatccattgcttgctgggcagataaaatcccgcctggcgcgacggactttggagcctgctagccagacggcttcccagatccaggccaccaatgcggcgaatgccaatagtgcgagcaaatga

SEQ ID NO: 18516 - protein, 1773 aa, DROSOPHILA
MTHSFELPQKQIVDECITIKTPTERKKDKMSSVKVAVRVRPFNSREIARESKCIIEMAGATTAITNPKVPPNTSDSVKRFNFDYSYWSHDHHDADFSTQSMVYKDIGEEMLQHSFDGYNVCIFAYGQTGAGKSYTMMGRQEEQQEGIIPMICKDLFTRIQDTETDDLKYSVEVSYMEIYCERVRDLLNPKNKGNLRVREHPLLGPYVEDLSKLAVTDYQDIHDLIDEGNKARTVAATNMNETSSRSHAVFTIFFTQRRHDLMTNLTTEKVSKISLVDLAGSERADSTGAKGTRLKEGANINKSLTTLGKVISALAEVASKKKNTKKADFIPYRDSALTWLLRENLGGNSKTAMIAAISPADINYDETLSTLRYADRAKQIVCKAVVNEDANAKLIRELKEEIQKLRDLLKAEGIEVQEGPDGKVVCEKRDANKDELTKSTVIKSPTKSRNRNGSTTEMAVDQLQASEKLIAELNETWEEKLKRTEEIRVQREAVFAEMGVAVKEDGITVGVFSPKKTPHLVNLNEDPNLSECLLYYIKEGLTRLGTHEANVPQDIQLSGSHILKEHCTFENKNSTVTLLPHKDAIIYVNGRKLVEPEVLKTGSRVILGKNHVFRFTNPEQARELRDKIETENEAENEVEKTDTQQVDWNFAQCELLEKQGIDLKAEMKKRLDNLEEQYKREKLQADQQFEEQRKTYEARIDALQKQVEEQSMTMSMYSSYSPEDFHQEEDVYTNPMYESCWTAREAGLAAWAFRKWRYHQFTSLRDDLWGNAIFLKEANAISVELKKKVQFQFTLLTDTLYSPLPPELASTVAPVHQEDEFGAPPVSKTLVAVEVTDTKNGATHHWSLEKLRYRLELMRQIYNVESPPSSMLFDTSGMEALSGWISPPSQHPGQQAQLLPLEPPVESERGRLTLANLIPSRQRLELMREMYHNEAEMSPTSPDYNVESLTGGDPFYDRFPWFRMVGRSFIYLSNLLYPVPLVHKVAIVNERGDVRGYLRIAVQPVLDEESIDFNNGVKQSARLVFNEDDAKPKYRALNEKDDVQRYIDNGGLDSKLEELEDVDSGRGIDSNSASECHENSEEPGEHLQVGKEFTFRVTVLQATGIGAEYADIFCQFNFLHRHEEAFSTEPVKNSASGAPLGFYHVQNITVPVTKSFIEYLKTQPIMFKIFGHYQTHPLHKDAKQDFVSRPPPRRMLPPSIPISQPVRSPKFGPLPCAPTSTVLAKHDVLVWFEICELAPNGEYVPSVVEHSDDLPCRGLFLLHQGIQRRIRITIVHEPTTEVKWKDINELVVGRIRNTPESSDEQDEDACVLSLGLFPGEALEVPGDDRSFYRFEAAWDSSLHNSALLNRVSQGGETIYITLSAYLELENCARPAIITKDLSMVIYGRDARTGPRSLKHLFSGQYRNPEANRLTGVYELALRRASEAGSPGVQRRQRRVLDTSSTYVRGEENLHGWRPRGDSLIFDHQWELEKLTRLEEVGRMRHLLLLRERLGMDTNPNPTTKTEKDVCNLAARAATSPVHMVIPQSPQTPVKDPQQIIPEREYNQREQDLMLKCLKLVQGRYTKSEANDTQTQSDVSPSDEGCADMTVSCISSNSMELCSPDRADAPNGWEAPAPATQPALPLRLYVPELEEIRVSPVVARKGLLNVLEHGGSGWKKRWVIVRRPYVFIYRSEKDPVERAVLNLATAHVECSEDQAAMVKIPNTFSVVTKHRGYLLQTLGDKEVHDWLYAINPLLAGQIKSRLARRTLEPASQTASQIQATNAANANSASK

SEQ ID NO: 18517 - DNA, 2792 bp, DROSOPHILA
ctacggcggtggtgaaaatgcagcggatttgatttatattcagctagaaataaccgcagagtatagtcagtgtgtttacgttatatgcaaatatgttaggtggccaaatcgtttgccgttttgtggcccaaaaggttattcggttgtttgttctttcaacctgatgacagtggtttttggtttcaatatttgcgtagccaagggctactccattcgaaatgccaaacggtaaaggtagcctacgttaaatacaataattggcagaacgaagaggtttctcggcgcgaaatcggggctacgccagtaacccattcgtggaccacttcaactggcttcctcagcctttccacatgcaacgcctgcccgcgaagacaagtcgaatggcactggaaaatctgtcgtaattatgcaactggcaaccagtcgagagactcctctcgaaagaaaatttccatggcggcgatgtagaaatatggaaaattggaaaacccaacctgcatggaatgggatcaacaaactaacgtaattcgatctgcgaagtaaataataaagcaacgaaagatgcacggtaaatggggaaatactttgagaaaataatgaggacccataaacgctttgtcacgtttgtctgaacatcgtggatatggtcagctgtaaaacggaaaaaaataatgccagaaaatatggtaagtccatcatcaagtcggttcggcataatggaaacgttagtttacttttattgtttcaaagcagcgaaactttcacactcgttaataaaatattattaatttgattgagcgcccctgtctgttggttttatggtacttagtgggaaattcaaaagttattaaacgattatcattcagtgtggtacagcgatttggatttggaagagcttgcagaatgaaatcacagtcttgttgttgttgatatagaatgcgaagaagttacgtttccaggatcatcggttcggtgggggaatggaatgggcggagctcgtctattggttctccagcagaccgatgtactggccattctggttggccacgcgtcgctcctccagtttcctcgcaaagtctggatctgtcttggccctctgctccagacgctcctgctgcagtttaatgccagcgtagatctgatccaaacccttctgtatctcctcgggaatagccggcggagtaggaatgtgatcacctgtggccctgaatccattctcgtcggccgtgtactgcacattgaccagagttccctcgggggattggtaggagtactggccatgctgaaccaacaccccatttggattggtgtcgaagtccttgaggaaaccggtttcctcatgaatgatgctattgcccgtctcgtattctgtcttgtagcttccatcgtcactctgctccttgttgtacttgattatgggtatccaggtgctggtctctctgtgatcttcatgacgatgatgatctggtttgtcatcgcgtggtatgttgttcacattttggtgctgatgttgatggtggtgttgtccttggcaggaaatggccaacagcacaagaagtatctgaaaggataaatattagcttaagcttactaacacatgcaagtcattacgatttccaaacaaagtaatcacaaaaaagaatatttaatcctatcctttagatgtaatgtaaaccaataaattttatatttgagaagatcgaactgttgcaatgtttgccaatcattcatcgagaatcacttgaccgattttatgtgattggttatgtgaaccacttacgagcactttcatttcgcaaggagtctctgccgcttatccactgtattccactgatttggcccgctttgtcgcccgtttggctggcactgatcgcactggctagtgaaagcagctccgttagacactgtgccaagcgcggccctattttggtcttatataggcgattcgctctgctccgacccgatccgatcctcctgttgcactcgtgtccatacccacacaggtgagcctccatgggagagcgtgcatttgctatttctgctggtgatggagtttctaatggagatgaagttgcagatggatatgcagttgcagttgccgatgaagatgggaggggatgggagtggaagtggaatttgccatggaagctcttattttttgttagctgtctgatccgaccgatcggtaattgttgttcgtaggctcgacgacgcttaaatgctaaaatcgtaaaaaaaaaaacaattcactgtcgctctcgtttgaggctttttcagaggctgaggcagtatgattttaaaaggaatccagaactatgacaaactataaggataaagctaacattccataataattttggattaataatttgtgttcgccttttgtaaaatttgataccgtcattattatataatgaaaaaaaaacgaaaaaattgcaaatgcgcacacagtaaaaaacaaattatttcttttcgcaaagcaaaatcagctctaaaaatgtttaattttaatagcttctgaccttttccctttttctcatgccctaatcttgggatactttattgaaataacaagttcgtttcctaagtcttttgttttaacgcaagaaaattcttatgaaatgttttttttaaacattttatattaaaaatatcttatctattaaactttcttatatattacttatttatgaagagtcgttttgccttgttaagccccttttataccggcacccatcttagcccggcttattgtcgctgttcgtatttggcccgctcgtaggcccggctca

SEQ ID NO: 18518 - DNA, 573 bp, DROSOPHILA
atgaaagtgctcatacttcttgtgctgttggccatttcctgccaaggacaacaccaccatcaacatcagcaccaaaatgtgaacaacataccacgcgatgacaaaccagatcatcatcgtcatgaagatcacagagagaccagcacctggatacccataatcaagtacaacaaggagcagagtgacgatggaagctacaagacagaatacgagacgggcaatagcatcattcatgaggaaaccggtttcctcaaggacttcgacaccaatccaaatggggtgttggttcagcatggccagtactcctaccaatcccccgagggaactctggtcaatgtgcagtacacggccgacgagaatggattcagggccacaggtgatcacattcctactccgccggctattcccgaggagatacagaagggtttggatcagatctacgctggcattaaactgcagcaggagcgtctggagcagagggccaagacagatccagactttgcgaggaaactggaggagcgacgcgtggccaaccagaatggccagtacatcggtctgctggagaaccaatag

SEQ ID NO: 18519 - protein, 190 aa, DROSOPHILA
MKVLILLVLLAISCQGQHHHQHQHQNVNNIPRDDKPDHHRHEDHRETSTWIPIIKYNKEQSDDGSYKTEYETGNSIIHEETGFLKDFDTNPNGVLVQHGQYSYQSPEGTLVNVQYTADENGFRATGDHIPTPPAIPEEIQKGLDQIYAGIKLQQERLEQRAKTDPDFARKLEERRVANQNGQYIGLLENQ

SEQ ID NO: 18520 - DNA, 15435 bp, DROSOPHILA
ggccctgtatagtttgttctaacgttctgtgtgtatatctcatgcagattgacgcgtttataattaatcaggcgaaagaaaattatacagtaattgttgtgtctcgaaaaaagagtttttgaaattggtaagtgaaaagaattggcgtattaatgaaggcgctttcaacctaaattctaagcaaatatcggtactctttttcttcgcttgatccttcgctcagtctgctagctggagatcgcagtcacacacagatccattgatctgataaaggacatgacttccgttgcaaaattgtgcccagagttatggcacccgaaagccaaaagcaaaaggcttgcaaagtgagcgaaatcgaaatcgtgtggtaaggcgccagcggcatgtagttgtagttcgagttcgttggatattagtcacacccgttgcgagagcgagcgcgagagcgcagagcaatgtacatatatgcatgcgcgtatgcgtatgtgtttgtattttaaactggcagagcgacgctcgctcggtcgctctctctctctggcgctctcacgctcttgctctgcttctagccccacaattctgggtgtgtgtgcgtgtgtaggatgcacttgtgtaggtgatatagtgctgttttctgggttttgatcgggttgtattctgcgcgcgcgcgtgtgtgtgtgtgtgtatgtgttatggccagtgtagtcatcacttgtgttaggaaactgaaactaaacaaccagatccaccagttatagttatgctggcagtcctccacattgttgttgttgctgctgctgctgctgctcttgctgtattttgcagagaatgagttaaagttgagttagccaggccaagcaagccaacaacaacggcacgaatccagccaaacaacaacagcaacaacggcaacaacatcaaccagacccgaccgaccagctatggtgtgttatcgacgctgacgtcggcgtcgttctttgtattgattcgaatttggattcagtcgatgagtttctctcgcttctgcgcgttgcgtttttcgcagtgtttccgcgatttttcgttgtcgtcatcgttgtttcgtttgcctcgttgttgtgtgtggtgtattgtgagtgcgccccccgttgccgttgccaccgccgcagacgcctcgccccccttttttttttgcttcgtacagccgtgagcggctgtaaaagtgtgcgtgggtttttaagattattaaaagcgattttcatttgcaattttggatattctgctgcctcttctggtttttttcctgcttcttttttttttttgtttttttttttttttaattttgttctgttttgtgtttgtaatatctgtatgggaaagatttaaagaaaatgtatcttaagatgtggccacttttttgtttcaccttctcgctcgctcgttcgtttgcgctctctttggtctttttgttttatctatttcttatatctatcttataaacagtaggcgtgtgtggggaggggaggagggcatcgcaagatatggacgtgtgtagctttataagcataatatcctatgcctctaggtggcacaccaaaaaaaagaaaaatgaaaaaagaaatcaaaaaaatcaaaatttcataaaaatacatatctaaatacagatgtacatgtgcttgcacacatgtgcgtacgcttttgcacacccataaacgcgaatacacacatgtgcacacacatgcatgcaattagaattgcacttgtgcagaaaaacagactatttgcttaggccccaagcagatgagaaaatacacatgtacgggataccatcgtcatcgtcatcgtcttcttcatcaccagaaacagaatcggaattagaatcagaatcgtcatcgcctaggagccccatctcaattacgagcttctccattaactaacgaagtgtaggaaaaagtctaaaccaaacctatcccatcaatagttggctctccggtggccattcttctttcttcatcttattgccgcagctgcgccttatttccactgaaaggcttactgacacattctcactttcacaaagaccacgatattgtacaaagctgctcatacaaaatacacagttatatatatatgtacatatatcgggagagcgatgagagcgggagagcgagaatagagtgagattgagaagatgcagatgtgtgtgtgtgtgttgcctgtttaactttaacggaatccgaaaaagatctttctcacttcctaagaactccgaaccaattcatgaattattgcagatgtgagtaagtattgcgagtttgcatgtgtgtgcacgcgtagaatcgaaaagtaaagtagtgcaaaaacaagtatcgaatgagccacataatccaaagcgaaagggtttcatttgttcggttttcgtttgaaagtcagcacaaaccccccgcccccgtcaacggacccgttcaaagacgctgccataacttgtacacatgtataatataaattaacaaaccgctccatcgtgttatcaacgacatagataataacacgcccagcgcagagcctgaaaaactgaaaagctgaaaaacagttactgttacaagctaataataataacaagagtgagtgccttgcctttgaccagccggagacgacaacaacgtttgatgttgttggtggagacggtgacatcagagtctaaatctagcgcgaacagatttcttttaattccgtaaactaagtggacaacgcaccgtactcgtaccgcactcgttccgtactcgttctcgtactcgaagtcgtattcctattcctccgggcgggcatactcgtgaatagcgaaacctaaaggaaatctacgaaaaaaaagctggctgcatgaaaaacatcaccagctcgagcacttgcagcactgggctgctgcaattgcagaacaacctgagctgcagcgagttggaagttgccgagaagacagaacaacaggcaggtccgttgcccatccgaattacccagtcatacaaagacacacctcgtaaatccaaactctatgccataaacctacaactccacccccaccccacacacccactccacatccagcgcccaaaagtttgtcgatctctggtttttctttggtgactttcctcgtgggttctcaatgcaaagcacatgcacatgcatggcgggttttcatttgagaaagtcacccgaaaacggagacctgaactgcagggcaccttctctccatcgctatagagtaaactctccacccatctgcacatatctcatacatatcgtacatgtaaaccatacatacatacatacatacatacatacatacccaaatctaaatctaagcgttctaaatccgaaaagagagggcaagctgccaccaactttcgattgccaagatgaataattcaatggattagtcaggtttaagataacacagtggttcttataagatgaatggggggggggggggggggttagctcgaaaatattttgccaaccgagcggatttcgaaaagagcttttctcgcatgtgttgttcattttgcacagcattgcataatcttatttttggccagaagcttgtaaatgcagtgtgggagacaattcgcagcacaaaaaaatcatatacatacggattttgtcgatctggattttggcgaaatatgttgacatgtccacgcgatctgctgttttacgatatatttattacctcagtttaagagccatcaacttgtctgctgttcacatatacatagatacacattatgaaaagatatatgtacatatggacatatacttttatttttattactttactggcaatagtgagcaacgaagactaatcgaatagctgaatgtcctattggaatcattaaaaaaaaaaacctgaaaaagatttggtatacttgtgggcattgtttgccacaacacttgttcgcaacttgtcggttttaaacaaaaactttcaagcaaaactacaataattcacttactatttttacttctgaatcgcattctacgaaatgaattttctaaatgagctgtgtatatttacaataatatcgtaatacctttctgcaaacaacgcaactattgataagtgataaaagaaaatgaagtgaaaacaatgaaaaagtcaacttggacaagccgaacaccatatactctacgagttacaaccaaaatgtattactcacgttggtatatgaccagttgctatcacagctatgggcttctgtagcctacggaatgagtatgtcatgagtcattggcgaatatctttaagagcaacgaaaacatatccgattgtgataaagttaatcgcagttacttaaaaaaaaaaacagcaagctcagcccatttagttgaccgatcgttcttatgactgctgcgttacttactcaataagtaagtacttactcaatttccagcatatcaatgaatgataaatttgaagaacttttagcaaattatgagttctttacacaattatggttttctgccttaaatttcctatgttaagttaaacgtacgtaattttccaacaatatttgaactatataaacttcaaaaggctttcggaaaatttaaagtttagtcacctgttttagcttaaaatatcctatatccgatcaaaatcgtaaatatatctaatgaaccattctagttttcacttccttcgcacatttgttgtctattttctagctgcctgttcttaaacacttgctcttagaaaagtatttcgtaatttcattattcctttatgttcattattaacattacctcacataatttcattaaaagctaagaggacaaaagatttattattaattattttgtcgttgcacctcacagaaattcctttttaacctttgccaggttgcaaattcgtttgtgctgacttctaaagattttcggcagcagaaaatgggagtgcgttgctttaggggttgaaataatgaaagggcagcgcaccgaactctatatgccctatgaataatcaatgaattaatacgtgtacagtgtttcgcttaagacagtttaagttctatagtgcaattgtgaataattaaaattttttacagatcgttatgctgattgaaaatatatttgtacactttatagggttagaatcgccaccttaatttcctataaaactctattgacttgggaataatttgaagacctaaaaaatgatctctacatcatgtgtattgatctgtattttatgtaaccaaaagattatccttttgatagcaccttcacacgaatataggatatatatgctatactaaacatattgtcaataatttgataatgcattgcactgtccttttatattatttgtcactaaaaagatacgaacaataatttttacctgttacggttttctgctgaaagtcaaagtgcgtttggctgtgtagggattgcggatcccaactttgatcctgagtgcgctaagtacgtcatcatcgagctccttaccatcccatccaggcacattcttcgtttatatatgtatgtatgtatatgtatgtataagcggatatatatatatgtatgtacattatgtatgtgtatgcgacggggcatacataaagaaaatgaaaaagcagaatgcataccataaattccaattgccgcacaacaaaattgcggcttctaagggtaggaatggaaaaggcaggaaaaagaacacacattcccttattaaaaccgaacagaactgaacagaacgagcagctgcgtgttgagttttcgaggcggaaattgagttcaagcgtaggaaagtctgtttctagtttttctaattggaaattatcccgaactgaaccgctgctgtttgaattcagaaattctgaaatgccatgtgataatattaatgcacggttcagctattttgtccgtttcattacactccttttcgtccttttgtgtgtgagtgtgtgtgtgtgtgtgtgtgtgtttgtgtgcgtggagtgcttacgagattatgaaaaatggcacattcaccccctaaaacgatcccaacccctgcactgcgccatgcatttccaagctgtgcaatatgcattctacttttttgatagccaaacatacagtcgtttccgtttcgggaaattctggtattgtgcctaggatagaactgggatcgaactgtcccgacttgtcctggatactggcgaactgcttccatacgacgccattctattattaactacacccatctataccatactttattaaactgaactaagtccagtttcttcttaatatagcagattaactatgcagtactataccattatttactctactaactaccattgcaagctacatagctgactacaaactactattgcctattataccatatattccataccttacactataacattctattccttatcatatcatatatggataccatagcataccatgcctctgatccttgatagtgttgactcgccccctgtctgaagttccgtagcacacctttacctatgctagactatagactataccataccataccatgccataccatactataccataccataccatatcatacccctgctgacccagactctcacttgacgccccacactgcaggctggctatttgaaggcttctacttccattctattttattctatcaatagtacgctgcgagggtatgtgccacactgcattctatccgctgtctcacgaatacgaatgcctagagcaaccatccctataggtttatatgggcgaaacaccaggggcagaaaaggaaccggccaaaacaaagaatagaaatatgtggaaactatacggcacatttcagtttgacgtgcgcgtttctcttaaccagacgcattttagtttttgtttctttgccgctgccgtccgggattgttttttttttttttcacgctgtgtggaagaagcaaggcgaatacaaaacaaaaataaattacaaaataattgaaattataatgattcgatagatatgtatatagactcgtacgtgtgcacactcagcagtgatatgtttgactgaaacgattttcttcgtattcgaaaaaaaaagagcccataagagttttttgaatcttattttggaatatcaccagcgatatcggctttacagtggcgcccttctcaaatcatttagattccctcgaggaattcaaggagttatcgggtgagtggattggcatctgatgctcaattcagtgggatatatgcagatgctttgattcttttgaaaatattcaaatatacctaaatcttattggtttctttcttgtcattcgagtttcaataatgctaaagcgttgaacatttaattaaaatcgactaagagcaagagtatctcgactctttgaatactcattacctttttcaaaaagttttgcacactcgcaagcgtaatgtttatcagcactacaatactatttgtcaattgaaaagtactattttcgaattgaaaaaccattgcagtctggcttgcctagtaatataatagagtctatcctctgtacctgttacatggtgttccacagacacagcataccctcgaataccctacgcgaatacaccatcccttagctgcgccaaatatttttcatcgagtccaccgtccaccggggatgttcgaatccaatccgcactgcttaatgccgttcaaccctttccaaatattcactaaacgaaaacgtaaacaatggtgtgttgaaactatttaagtttctattcatttgcaaagaattttaatttgctcgtgggcgcggaggcaatcgccaaatgcgtttcctttccaatgggcagagaagttgggaaatcttactttttatgtgtggcgaaagcttcaatctaatttatgaacaaatccactcgtttttttttaatgcgcatagtacatacatttaaagcaaagattatccattttaagatggagtatctttgtaatcatctttgcttttgattggattgtttcaaatgtttcataaggttgaggaaatgggagtagttattcattatttgcaaaatgtttggagattattcctatttgaatttttctattacagatctgagatccttttgggatattttcgatagtatttcaaattacaataatgtgtaatgtaatgtacactattttttttgttattctaaggtcacactttcatacggcatacgtcagttcttagatgtgtgctttggcatttctatcattcgtatagtaaatattttatttaattttgcataatgttttcagttggacccggcaccataccatcaccgtggacaccagtgaatgccggtcctccaggcgcacttggatcggcagacacaaatggcagcatggtggatagcaaaaacctggatgtcggtgatatgagcgatgtaagtttgcttgtaaagattaagatcaagtcgagggactgcattttggaatatttttgaacaacgtgtttacccaaaatcgaatcaaatgttttcttgtttctaattgagaaatattcttttttttttggcaatgtttatgctgaactataaacttaaagtaccttgtagtgtaaacaaagaacgtagcactgtacgccaaaaactctcaaaaaaatggcaaatctatttatcatctcttgaatgcaaacaaattttcctaaatattccaggacgaaaaggacttgtcatccgctgatgccgaaggtgtatggagtccagatatcgagcagagctttcaagaggctttatctatatatccgccgtgcggacgtagaaaaatcattttatccgacgagggtaaaatgtacggtaagtgcaaactcaatgtataaactcaatagaaatagaatgggagtacagaaatagttggaaactttggaaatacttctaaatacgaatactgacatatcgcagctagaacccattgggaattatagcattgcaggggaaactaattgttctgtttgattctgttgatgttattttaaaagtgcttccattcttcactagtttctgtaactctagcaatgttatgtagtattccgctattatttattaattcaactttatgtaatctttatgccttttttaatgcaggtcgcaacgagctaatcgcacgatatataaaactgcgcacaggcaaaacgagaaccaggaagcaagtcagttcgcacatccaagtgctggctcgccgtaaactccgcgagatccaggcgaaaatcaaagtggtaagtggcctgtggggattttcgaacattgtagttgaattgtagggccctaaggttagattagtgcccatagaaagcgaattttacagctagatccttgggttggatgagcatgaaaagcaaggaagacttgtcagttgagctgcaaatgtgtcagatggaaatcgcaacacccatctcatcttaacatccccccccccaaagaattgaattcgagcattagcattaggaaactccctccaagtcgttcaaattgcagaagggtcaaccgattccaacttggttaatgcgatgatgtgatgcgcacttagtggcaataaacagcatgcaaatgttgcagcaaactgcacagcgatccaatcgcaatcacaagcagcacaagcacaaacagactgtgaacaccatatcgtatatcgtgtatgaacacccttcgaccaactgaaactcttttgcaggaaaccaatggtgtgtctttgcatttattaaatgagaaagaacaagcgttgcaggtcatgagcacaatgaccagttcgcaaatcgtgtccgcccaagcggccaacaatctggcattggctgccacggcattatcggcagcaggtggtggtggtggcagcttacaccacaccacaaggcatctcaatctcagtctcccaccaccccccacccaccatagacactcgtcggcggcagcggcagcagctgctgcagcaggcgtagcagccgcagcagcagccgcagcagcagcagcagcaataggcggcaatgtcccttcagccgcgttggtccccggaccggcggttatgccgcctaccacgtcgacgtcgtcgtcctctgcatcaccacgacagcaacaacagcaacagatacagcagcagcaacaacagcaccactaccaccacccagcccacgcccaccaccaccaccaccaccatcaccattcccatcccaatttgacgcacctaccgcatagtcatatgcatccacaccatcaccagcatgcggcagccgttgcagcggtataccatctacagcagcaacagcagcagcaacagcagcaactgcagcaacagcagcagcagcagcagcaacagcagcgggcaaaccatacggacaacgatccagtggctctgggtactggcggaactagtgaggcgccgccagcaccaccagcgccaccacctcctccgccgccgctgcaccatccgccgttgtattctggcgtaagctaacgttaacgttattataacaaactctcgatttccacctctcgatttccaccgccttgtgcaaatcactcgtatgctgtcataccgcgatccaaaacaaaaaccgaaaagccgaaaaagcgaaaaagcaaaaaagcagaaactgaaacacacgcaactcatttaccaagctactgcgcgcctactgttgcatcgaaaaaaaaaaaaaagaaatgaaaaaaagaaacacaactgcacaagagaatcattgtagctccacaactccgaccaccgaaaacccatcatcactgccataatccgcaatgctcatttaggatttgcaaatgtcttgtttagctttctgttttgtgtgtgctcacccaaaaaaaaaacatcaatgtgccggaggaacctctggcccagcttctccagtctcaacagatttgaaattgctcaaagaggtgtcttagattattgtgctgttcgatgttatgccaacatcccagtctaaagtagctcgttattgggaacaactcgtttcaagagatttccaatctaaagaactttgattccttacaagaagatgtttgtttttaagtggaattcaactctatattaacgaagctcacttttagagaccttttgcatcttctgaggctttaaaccttataagaaggtttttaaaagtgtatcatcttaggaccactaacgtagacacctctttgaatgagatttcgaatcctcggaggcttttgggtgtccataagtacgcaacgaagaatatggcatattcgagatattctatagcatacttttggacactttgttgatgaagggattttcgatctatcgcacccgtgtatataaccaatgtcctgccatcgacgaggaacttcacttttcatctcaaacaacccagcaccgtcatactccttctcctcctccttctgttttcatctctagctagctagccatgcaatcgaactccccaaccctatcatccgcccaaaccactcgaacatcaaaattgcccataaatgagatgcccgtcgtactgctacgccaaaacaccaatgcgctcgcttgctcatttgaaatagactccttgcttttgacttgctatgcgaagatagaaagtagcttcgcccaaaaaaaaaaaaaaacaatttcaaagttcgctattaaactgtgtgtgtactatcgtatgtaacaaacatactcgctgggtaaccttagttaagtgatacaatcagtcggttagtgaatagttgattaacaaatcacctctcaccatatatgtctaaccactcttgtacatcatctactgacaccgatgggtctaagttttaaagctagcctaatcattcgatcgaaacgagtatatgaaactgattttaatcacttgtacatttgcactttttccaacagcaattctggcaacctggactacagccaagcacgtcccaagagtaagttggcatctcgtcgtctactttatgagctagctatacaacgcatttgcattgaccaatagtttctatgattacagcatcaagcccttcccccagccgccgtatccagctggcaaaacgtcgactgcggtttccggggacgaaactggaattccgccctcacaattgccctgggaaggacgagccattgccacgcacaaattccgcttactcgagtttacggcgttcatggaaatccagagagatgaaattgtacgtacgaaccgaaccgcctaacccccccccaaaatctctaccaagccaacatatccacccttgtgcgctgcactgcacaatcaatcaaacgaaaatgtgttattaataaatccccatctcccgatattcacagtatcaccggcatctattcgttcaacttggcggcaagccatccttttccgatccattgcttgaggtgagtactactgatggcaaacaaaattgtagttctgcaatatattatttactcatctttcccatcgcagactgttgatatacggcaaatattcgacaagtttccggagaaatctgggggacttaaagatctctacgaaaagggtccacagaatgcgttttacctagttaaatgctgggcggacctgaataccgatctaacaaccggcagcgaaacgggtgatttctatggcgtaaccagccagtaagtattgaatgtattggatggatggatgatcatcctagattatacatgtatacatgttagagtgatctgatgaaaaacaatgatgatttaaatggcgactcctttcttccccagatacgaaagcaacgagaatgtcgtgctcgtgtgctccacaatcgtttgctcctttggcaagcaagtggtggagaaggtggaaagcgagtactctcgactggagaacaatcgctacgtctatcgcattcaacgctcccccatgtgcgagtacatgatcaactttattcagaagctgaagaacctaccggaacgctatatgatgaacagtgtgctggaaaactttacaatattgcaagtaagtttgatcttgtgcccatcatggttgacatacgcataatgtctacatattttaggtaatgagggcccgcgagacgcaggagacactgttgtgcatagcctatgtgtttgaggtggcggcccagaacagcggcaccacccatcacatataccgtctaattaaggaatagcaaaagctgcatggagcagaacccaacctgtctgcgaatcccatcatcaacacacaagttcacaaatataccgacaacaacaacagcagcagcatcaacaataatagtatcatcaatacggctaagaattgcgataataagacgagtaatgaaattgccaacacaatatccaacaccaagagtgccagaatcatcagcagtatcaacagtatcaacagcatcagcaacaccagcaacatcggcaacatcagcaacatcagcaacatcggcagcagcaatagcaacactatcgcactaaaatgtggcgacggcaatatgaaaaccaggaacctatccgttgctggcgccacaattatcaagcaatcactcacctcaccgcaacatcatacggatatcgatgccttgacagcacttcaagtggaggaggttatttatacacagtcacaagggaataccagttatcaattagacaccgaaacaagcattgctcccaacgtacaagagccaacactccagcagcaacataccgcctatgaggatcgtacagtgacagtcctgccaccgtataatctatgtatcggcaacaagcaaccacaaccattcgaggctgagcaacacgaacacgaacacgaccaggaacaggaactggaactggaactggatcaggaacagcagaagcaactggggaacacgggctatgagcagttcctgaagttgtccgctcatgaatattcagaaactgacagacgctccgcggctgctctaaatctcagcagtattggcgaaaaagaagcggcattggtcggtgaatccaagacggatcttgaagatccgccagagtttcggatgcttcgagaggtcagtgcgacagcggcggaggatccacgacgaggacccaacgccgatggaatcagtaacaaaggccgtgagccgtgagcgccatataataccaccagcctttaagcaaggttgaggcttattttaagggttagaaatacgattgcaaggaacgacacaatcagagctttttgttttccacccaaaacgagaaagaaaaaaaatgaaaaaaaaaaccacatggcaggggacaatggaagagcctcaaaacaagagatgattgattggtgttcagtatcgaaatcagatttttatttgtgcaaaataaaaaatgtatcatattttatgttacaatcatttgaaagactcaaaaaacaaccgactttagttcagcatagagtgctttctgtaaaattgtactataatacataaaaaacaaaaaaaaaacaaaaaaaaaaatacatttaaatgatctcaaagttacttaaaacatattttttgtgtataattttttttatgaaaactttacaaaatcctaaaaacgcaaaacaaacaaaaaaaataatgaatgaaggagtcgtcctgcgctgattttaaaaagtagcaaactaagagtatatatattgaataatatgtttgaaacaaagaacgccgcaaaagaaacagatacaatatagttttccgaattaccatttagatatgcatggtcatgtgcaaataggattaagccatttttttttatataacagcccttgcgtaaggctacaaaatgtatagaaataatacgttagttttattttattcaagctctcaagcttaatcttcatttagcaactgtgctgagcagtcgaagggaaggccaagttgccaactagtttagattgctggctggagttagcgctgatatggagctaaggtgcgataaggtgacttcgagcacctgtctggcgaggagctgaaaatgaaattcattttttttttgttcattgatttcgatatcctgtcgtgggagcgcgagtgttgtgaggtgaggagggcaaaggagcgagggagcgtaggaggatcttgtgtgttaagcgatggtttttgtctatccattcgcaatcatagtggcaaaaatggatatgtaagtaattgaattaagcatgtgtcgaatgatccaccgttaattaaattattgattactgatttaaattcattagtattaaaaatgcttatatatattatgatatgaatacaactggtatgtaattagccatttctgcatccaccgaagacaagctcgaacacatcaaatgtccaaaactgtaagaaattatacataaatgcagaagaaatagcataccgatttatttttcgatcgaagtaaagaggtaaagataactaaaatgtattctgaatgtaaaacagcctaattaaaattatctaattagtaataatacgattacacacacacacacatatatatatatatat

SEQ ID NO: 18521 - DNA, 3313 bp, DROSOPHILA
cagtcgatgagtttctctcgcttctgcgcgttgcgtttttcgcagtgtttccgcgatttttcgttgtcgtcatcgttgtttcgtttgcctcgttgttgtgtgtggtgtattgtgagtgcgccccccgttgccgttgccaccgccgcagacgcctcgccccccttttttttttgcttcgtacagccgtgagcggctgtaaaagtatctttctcacttcctaagaactccgaaccaattcatgaattattgcagatgtgaataataacacgcccagcgcagagcctgaaaaactgaaaagctgaaaaacagttactgttacaagctaataataataacaagagtgagtgccttgcctttgaccagccggagacgacaacaacgtttgatgttgttggtggagacggtgacatcagagtctaaatctagcgcgaacagatttcttttaattccgtaaactaagtggacaacgcaccgtactcgtaccgcactcgttccgtactcgttctcgtactcgaagtcgtattcctattcctccgggcgggcatactcgtgaatagcgaaacctaaaggaaatctacgaaaaaaaagctggctgcatgaaaaacatcaccagctcgagcacttgcagcactgggctgctgcaattgcagaacaacctgagctgcagcgagttggaagttgccgagaagacagaacaacaggcagttggacccggcaccataccatcaccgtggacaccagtgaatgccggtcctccaggcgcacttggatcggcagacacaaatggcagcatggtggatagcaaaaacctggatgtcggtgatatgagcgatgacgaaaaggacttgtcatccgctgatgccgaaggtgtatggagtccagatatcgagcagagctttcaagaggctttatctatatatccgccgtgcggacgtagaaaaatcattttatccgacgagggtaaaatgtacggtcgcaacgagctaatcgcacgatatataaaactgcgcacaggcaaaacgagaaccaggaagcaagtcagttcgcacatccaagtgctggctcgccgtaaactccgcgagatccaggcgaaaatcaaagtgcaattctggcaacctggactacagccaagcacgtcccaagatttctatgattacagcatcaagcccttcccccagccgccgtatccagctggcaaaacgtcgactgcggtttccggggacgaaactggaattccgccctcacaattgccctgggaaggacgagccattgccacgcacaaattccgcttactcgagtttacggcgttcatggaaatccagagagatgaaatttatcaccggcatctattcgttcaacttggcggcaagccatccttttccgatccattgcttgagactgttgatatacggcaaatattcgacaagtttccggagaaatctgggggacttaaagatctctacgaaaagggtccacagaatgcgttttacctagttaaatgctgggcggacctgaataccgatctaacaaccggcagcgaaacgggtgatttctatggcgtaaccagccaatacgaaagcaacgagaatgtcgtgctcgtgtgctccacaatcgtttgctcctttggcaagcaagtggtggagaaggtggaaagcgagtactctcgactggagaacaatcgctacgtctatcgcattcaacgctcccccatgtgcgagtacatgatcaactttattcagaagctgaagaacctaccggaacgctatatgatgaacagtgtgctggaaaactttacaatattgcaagtaatgagggcccgcgagacgcaggagacactgttgtgcatagcctatgtgtttgaggtggcggcccagaacagcggcaccacccatcacatataccgtctaattaaggaatagcaaaagctgcatggagcagaacccaacctgtctgcgaatcccatcatcaacacacaagttcacaaatataccgacaacaacaacagcagcagcatcaacaataatagtatcatcaatacggctaagaattgcgataataagacgagtaatgaaattgccaacacaatatccaacaccaagagtgccagaatcatcagcagtatcaacagtatcaacagcatcagcaacaccagcaacatcggcaacaatagcaacactatcgcactaaaatgtggcgacggcaatatgaaaaccaggaacctatccgttgctggcgccacaattatcaagcaatcactcacctcaccgcaacatcatacggatatcgatgccttgacagcacttcaagtggaggaggttatttatacacagtcacaagggaataccagttatcaattagacaccgaaacaagcattgctcccaacgtacaagagccaacactccagcagcaacataccgcctatgaggatcgtacagtgacagtcctgccaccgtataatctatgtatcggcaacaagcaaccacaaccattcgaggctgagcaacacgaacacgaacacgaccaggaacaggaactggaactggaactggatcaggaacagcagaagcaactggggaacacgggctatgagcagttcctgaagttgtccgctcatgaatattcagaaactgacagacgctccgcggctgctctaaatctcagcagtattggcgaaaaagaagcggcattggtcggtgaatccaagacggatcttgaagatccgccagagtttcggatgcttcgagaggtcagtgcgacagcggcggaggatccacgacgaggacccaacgccgatggaatcagtaacaaaggccgtgagccgtgagcgccatataataccaccagcctttaagcaaggttgaggcttattttaagggttagaaatacgattgcaaggaacgacacaatcagagctttttgttttccacccaaaacgagaaagaaaaaaaatgaaaaaaaaaaccacatggcaggggacaatggaagagcctcaaaacaagagatgattgattggtgttcagtatcgaaatcagatttttatttgtgcaaaataaaaaatgtatcatattttatgttacaatcatttgaaagactcaaaaaacaaccgactttagttcagcatagagtgctttctgtaaaattgtactataatacataaaaaacaaaaaaaaaacaaaaaaaaaaatacatttaaatgatctcaaagttacttaaaacatattttttgtgtataattttttttatgaaaactttacaaaatcctaaaaacgcaaaacaaacaaaaaaaataatgaatgaaggagtcgtcctgcg

SEQ ID NO: 18522 - protein, 440 aa, DROSOPHILA
MKNITSSSTCSTGLLQLQNNLSCSELEVAEKTEQQAVGPGTIPSPWTPVNAGPPGALGSADTNGSMVDSKNLDVGDMSDDEKDLSSADAEGVWSPDIEQSFQEALSIYPPCGRRKIILSDEGKMYGRNELIARYIKLRTGKTRTRKQVSSHIQVLARRKLREIQAKIKVQFWQPGLQPSTSQDFYDYSIKPFPQPPYPAGKTSTAVSGDETGIPPSQLPWEGRAIATHKFRLLEFTAFMEIQRDEIYHRHLFVQLGGKPSFSDPLLETVDIRQIFDKFPEKSGGLKDLYEKGPQNAFYLVKCWADLNTDLTTGSETGDFYGVTSQYESNENVVLVCSTIVCSFGKQVVEKVESEYSRLENNRYVYRIQRSPMCEYMINFIQKLKNLPERYMMNSVLENFTILQVMRARETQETLLCIAYVFEVAAQNSGTTHHIYRLIKE
